(19) United States
(12) Patent Application Publication
(10) Pub. No.: US 2012/0277999 A1
(43) Pub. Date: Nov. 1, 2012

(54) METHODS, KITS AND ARRAYS FOR SCREENING FOR, PREDICTING AND IDENTIFYING DONORS FOR HEMATOPOIETIC CELL TRANSPLANTATION, AND PREDICTING RISK OF HEMATOPOIETIC CELL TRANSPLANT (HCT) TO INDUCE GRAFT VS. HOST DISEASE (GVHD)

(75) Inventors: Roland Somogyi, Sydenham (CA); Larry David Greller, Annapolis, MD (US)

(73) Assignee: PBD BIODIAGNOSTICS, LLC, Davidsonville, MD (US)

(21) Appl. No.: 13/286,058

(22) Filed: Oct. 31, 2011

Related U.S. Application Data
(60) Provisional application No. 61/498,965, filed on Jun. 20, 2011.
(60) Provisional application No. 61/408,491, filed on Oct. 29, 2010.

(51) Int. Cl. G06F 19/24; C40B 40/06; G06F 17/30; C07H 21/04

(52) U.S. Cl. 702/19; 536/24.33; 536/24.31; 506/16; 707/736; 707/E17.045

(57) ABSTRACT

The invention relates to predicting or determining risk of a hematopoietic cell transplant (HCT) from a donor to induce Graft vs. Host Disease (GVHD) in a HCT recipient; to classifying HCT from a candidate donor according to the risk of inducing GVHD in a HCT recipient; and to organizational constructs (e.g., databases) and methods of producing organizational constructs (e.g., databases) in which HCT of one or more candidate donors is classified or scored according to risk of inducing GVHD in a HCT recipient. The invention also relates to kits and arrays useful for predicting or determining risk of HCT from a candidate donor to induce GVHD in a HCT recipient, and for classifying or scoring such donors according to risk of inducing GVHD in a HCT recipient.

### RELATED APPLICATIONS

[0001] This application claims the benefit of priority of application Ser. No. 61/498,965, filed Jun. 20, 2011, and application Ser. No. 61/408,491, filed Oct. 29, 2010, all of which applications are expressly incorporated herein by reference in their entirety.

### TECHNICAL FIELD

[0002] The invention relates to predicting or determining risk of a hematopoietic cell transplant (HCT) from a donor to induce Graft vs. Host Disease (GVHD) in a HCT recipient. The invention also relates to classifying HCT from a candidate donor according to the risk of inducing GVHD in a HCT recipient. The invention further relates to organizational constructs (e.g., databases) and methods of producing organizational constructs (e.g., databases) in which HCT of one or more candidate donors is classified or scored according to risk of inducing GVHD in a HCT recipient. The invention moreover relates to kits and arrays useful for predicting or determining risk of HCT from a candidate donor to induce GVHD in a HCT recipient, and for classifiying or scoring such donors according to risk of inducing GVHD in a HCT recipient.

### INTRODUCTION

[0003] Hematopoietic cell transplantation (HCT, also referred to herein as Hematopoietic cell transplant) [the more modem term], or bone marrow transplantation (BMT) [the more lay term], is an often life-extending or curative treatment for a variety of different hematologic cancers and diseases, such as acute lymphoblastic leukemia, acute myeloid leukemia, chronic myelogenous leukemia, chronic lymphocytic leukemia, myelodysplastic syndrome (ALL, AML, CML, CLL, and MDS, respectively). The major obstacle to more widespread and successful application of HCT is the risk of GVHD (Graft vs. Host Disease) in a HCT recipient.

[0004] Of the 10,000 HCTs annually in the U.S. (conservatively, more precise number is closer to over 12,000 annually), a large majority (˜75%) is carried out using donors familially unrelated to the HCT recipients. It is well-established in the medical practice of HCT that on average only 1 of 4 candidates for HCT will ever have a sibling, or other family relative, suitable as a donor, which is why approximately 3 out of 4 HCTs that occur in the US and in much of Europe involve donors familially unrelated to corresponding patients. Of these ˜7,500 unrelated donor transplantations, ˜5,600 (−75%) use donor\recipient pairs HLA-matched for so-called 10/10 major alleles (standard nomenclature: HLA-A, HLA-B, HLA-C, HLA-DRB1, HLA-DQB1).

[0005] Graft vs. Host Disease (GVHD) can be a severe and fatal rejection of the HCT recipient's tissues and organs (the host) by the immune system T-cells originating from the donor's transplanted hematopoietic stem cells (the graft) (Bhushan & Collins 2003; Ferrara, et al., 2005). Even with close HLA (human leukocyte antigen) matching between HCT donors and HCT recipients for 10/10 alleles (HLA-A, HLA-B, HLA-C, HLA-DRB1, HLA-DQB1), GVHD occurs in 50% to 60% of transplant recipients, whether using either sibling or familially unrelated donors. Accordingly, there is a need for predicting and determining risk of a hematopoietic cell transplant (HCT) from a donor to induce GVHD in a HCT recipient, and identifying donors at lower risk for inducing GVHD to reduce GVHD in a HCT recipient. The invention herein satisfies this need and provides additional benefits.

### SUMMARY

[0006] The invention is based, at least in part on analysis of samples from 180HCTs carried out in 57 different U.S. transplant centers, using donors unrelated to the respective recipient (i.e., patient). Gene expression analysis revealed molecular RNA marker profiles in peripheral blood-derived pre-transplant donor CD4+ T cells that are highly predictive of acute or chronic GVHD outcomes in the HCT recipient. Overall, the data reveals for several multi-gene predictive models, using various gene marker combinations, covering outcome prediction of different degrees of acute and chronic GVHD (see Table 20), (1) Negative Predictive Values (the fraction of HCTs that are predicted as GVHD-negative, which are predicted correctly) of 82% on average over all GNOS (GVHD Negative Outcome Score) thresholds, and 78% on average for GNOS threshold of 0.50, (2) Specificities (True Negative Rate, i.e. the fraction of GVHD-negative HCTs that are correctly predicted as GVHD-negative) of 50% on average over all GNOS thresholds, and 78% on average for GNOS threshold of 0.50, and (3) Sensitivities (True Positive Rate, i.e. the fraction of GVHD-positive HCTs that are correctly predicted as GVHD-positive) of 88% on average over all GNOS thresholds, and 78% on average for GNOS threshold of 0.50. In particular, for one of the best performing multi-gene predictive models, SG43RGP36-RGPgreedysearch, for the Gneg vs. Gag3 division (no GVHD vs. acute grades BI or IV GVHD), at GNOS threshold of 0.55, the observed Negative Predictive Value is 92%, Specificity is 80%, and Sensitivity is 94% (see Table 20). The accurate, donor-based, pre-transplant GVHD outcome prediction is robust with respect to variations of transplant clinical center sample origin, the hematological disease outcome classification by physicians and whether the donor HCT was in the form of bone marrow or PBMCs (peripheral blood mononuclear cells). Reliably predicting GVHD from donor T-cell RNA expression measurements in donors familially unrelated and related to HCT recipients, optionally as an additional practice to HLA matching, and selecting low GVHD-risk donor HCT, would significantly reduce the occurrence and intensity/severity of GVHD in HCT recipients.

[0007] Thus, in accordance with the invention there are provided methods for predicting or determining the risk of a hematopoietic cell transplant (HCT) from an actual or a candidate donor to induce (or not) graft vs. host disease (GVHD) in a HCT recipient. In one embodiment, a method includes measuring expression of one or more positive or negative GVHD predictor genes, or a combination of positive and/or negative GVHD predictor genes, selected from Tables 1 (RNA 1538), 2, 2A (RNA 143), 2B (RNA 192), 3, 13 (SG175), 15 (SG128) or 18 (SG64), or a polymorphism thereof, in CD4+ T cells or CD8+ T cells from a candidate donor. An expression value for the positive or negative GVHD predictor genes based upon the gene expression level measured is obtained. Alternatively, or in addition, linear or non-linear combinations of expression values for the combination of positive and/or negative GVHD predictor genes based upon the expression levels measured is obtained. A comparison is performed, of the expression value for the positive or negative GVHD predictor gene to a predefined reference expression value for the positive or negative GVHD predictor gene, or of the linear or non-linear combinations of expression values for the combination of positive and/or negative GVHD predictor genes to predefined reference values for the linear or non-linear combinations of the positive and/or negative GVHD predictor genes. Based upon the comparison, 1) an expression value for the positive GVHD predictor gene greater or less than the predefined reference expression value for the positive GVHD predictor gene indicates that the HCT from the candidate donor is at higher or lower risk, respectively, of inducing GVHD in a HCT recipient, 2) an expression value for the negative GVHD predictor gene greater or less than the predefined reference expression value for the negative GVHD predictor gene indicates that the HCT from the candidate donor is at lower or higher risk, respectively, of inducing GVHD in a HCT recipient, 3) a linear or non-linear combination of expression values for the combination of positive and/or negative GVHD predictor genes greater or less than the predefined reference value indicates that the HCT from the candidate donor is at higher or lower risk, respectively, of inducing GVHD in a HCT recipient, and 4) a linear or non-linear combination of expression values for the combination of positive and/or negative GVHD predictor genes greater or less than the predefined reference value indicates that the HCT from the candidate donor is at lower or higher risk, respectively, of inducing GVHD in a HCT recipient. Based upon an evaluation of expression values comparisons, total numbers or identity of positive or negative GVHD predictor genes, or comparisons of the linear or non linear combination of expression values for the combination of positive and/or negative GVHD predictor genes, that indicate that the HCT from the candidate donor is at higher or lower risk of inducing GVHD in a HCT recipient, the risk or probability of the HCT from the candidate donor to induce or to not induce graft vs. host disease (GVHD) in a HCT recipient is predicted and/or determined.

[0008] In accordance with the invention, there are also provided methods for predicting or determining the risk of HCT from an actual or candidate donor to induce (or not) graft vs. host disease (GVHD) in a HCT recipient. In one embodiment, a method includes contacting CD4+ T cells or CD8+ T cells, or nucleic acid or protein expressed by CD4+ T cells or CD8+ T cells, from a candidate donor with an analyte that detects expression of one or more positive or negative GVHD predictor genes listed in Tables 1 (RNA 1538), 2, 2A (RNA 143), 2B (RNA 192), 3, 13 (SG175), 15 (SG128) or 18 (SG64), or a polymorphism thereof, and measuring expression of the one or more positive or negative GVHD predictor genes in CD4+ T cells or CD8+ T cells to obtain an expression value for the positive or negative GVHD predictor genes, or measuring expression of a combination of the positive and/or negative GVHD predictor genes to obtain linear or non-linear combinations of expression values for the combination of positive and/or negative GVHD predictor genes. A comparison is performed, of the expression value for the positive or negative GVHD predictor gene to a predefined reference expression value for the positive or negative GVHD predictor gene, or of the linear or non-linear combinations of expression values of the combination of positive and/or negative GVHD predictor genes to a predefined reference value for the linear or non-linear combinations of expression values of the combination of positive and/or negative GVHD predictor genes. Based upon the comparison, 1) an expression value for the positive GVHD predictor gene greater or less than the predefined reference expression value for the positive GVHD predictor gene indicates that the HCT from the candidate donor is at higher or lower risk, respectively, of inducing GVHD in a HCT recipient, 2) an expression value for the negative GVHD predictor gene greater or less than the reference expression value for the negative GVHD predictor gene indicates that the HCT from the candidate donor is at lower or higher risk, respectively, of inducing GVHD in a HCT recipient, 3) a linear or non-linear combination of expression values for the combination of positive and/or negative GVHD predictor genes greater or less than the predefined reference value indicates that the HCT from the candidate donor is at higher or lower risk, respectively, of inducing GVHD in a HCT recipient, and 4) a linear or non-linear combination of expression values for the combination of positive and/or negative GVHD predictor genes greater or less than the predefined reference value indicates that the HCT from the candidate donor is at lower or higher risk, respectively, of inducing GVHD in a HCT recipient. Based upon an evaluation of expression value comparisons, total numbers or identity of positive or negative GVHD predictor genes, or linear or non linear combinations of expression values of the combination of positive and/or negative GVHD predictor gene comparisons, that indicate that the HCT from the candidate donor is at higher or lower risk of inducing GVHD in a HCT recipient, leads to predicting or determining the risk of the HCT from the candidate donor to induce or to not induce GVHD in a HCT recipient.

[0009] In accordance with the invention, there are further provided methods for classifying a hematopoietic cell transplant (HCT) from an actual or a candidate donor for risk of inducing (or not) graft vs. host disease (GVHD) in a HCT recipient. In one embodiment, a method includes measuring expression of a plurality of positive or negative GVHD predictor genes selected from a gene listed in Tables 1 (RNA 1538), 2, 2A (RNA 143), 2B (RNA 192), 3, 13 (SG175), 15 (SG128) or 18 (SG64), or a polymorphism thereof, in CD4+ T cells or CD8+ T cells from the candidate HCT donor, and obtaining an expression value for the positive or negative GVHD predictor genes based upon the expression measured, or obtaining linear or non-linear combinations of expression values for the combination of positive and/or negative GVHD predictor genes based upon the expression measured. A comparison is performed, of the expression value for the positive or negative GVHD predictor gene to a predefined reference expression value for the positive or negative GVHD predictor gene, or of the linear or non-linear combinations of expression values for the combination of positive and/or negative GVHD predictor genes to predefined reference values for the linear or non-linear combinations of the positive and/or negative GVHD predictor genes. Based upon the comparison, 1) an expression value for the positive GVHD predictor gene greater or less than the predefined reference expression value for the positive GVHD predictor gene indicates that the HCT from the candidate donor is at higher or lower risk, respectively, of inducing GVHD in a HCT recipient, 2) an expression value for the negative GVHD predictor gene greater or less than the reference expression value for the negative GVHD predictor gene indicates that the HCT from the candidate donor is at lower or higher risk, respectively, of inducing GVHD in a HCT recipient, 3) a linear or non-linear combination of expression values for the combination of positive and/or negative GVHD predictor genes greater or less than the predefined reference value indicates that the HCT from the candidate donor is at higher or lower risk, respectively, of inducing GVHD in a HCT recipient, and 4) a linear or non-linear combination of expression values for the combination of positive and/or negative GVHD predictor genes greater or less than the predefined reference value indicates that the HCT from the candidate donor is at lower or higher risk, respectively, of inducing GVHD in a HCT recipient. The actual or candidate donor HCT is classified for risk of inducing or not inducing graft vs. host disease (GVHD) based upon an evaluation of expression values, total numbers or identity of positive or negative GVHD predictor genes, or combination of positive and/or negative GVHD predictor genes, that indicate that the HCT from the candidate donor is at higher or lower risk of inducing GVHD in a HCT recipient.

[0010] In accordance with the invention, there are moreover provided methods for producing a database or organizational construct comprising a plurality of actual or candidate HCT donors each assigned a score (or classified) based upon the probability or degree of risk of the actual or candidate donor HCT to induce or not to induce graft vs. host disease (GVHD) in a HCT recipient. In one embodiment, a method includes measuring expression of one or more positive or negative GVHD predictor genes listed in Tables 1 (RNA 1538), 2, 2A (RNA 143), 2B (RNA 192), 3, 13 (SG175), 15 (SG128) or 18 (SG64), or a polymorphism thereof, in CD4+ T cells or CD8+ T cells from an actual or a candidate donor, and obtaining an expression value for the positive or negative GVHD predictor genes based upon the expression measured, or obtaining linear or non-linear combinations of expression values for the combination of positive and/or negative GVHD predictor genes based upon the expression measured. A comparison is performed, of the expression value for the positive or negative GVHD predictor gene to a predefined reference expression value for the positive or negative GVHD predictor gene, or of the linear or non-linear combinations of expression values for the combination of positive and/or negative GVHD predictor genes to predefined reference values for the linear or non-linear combinations of the positive and/or negative GVHD predictor genes. Based upon the comparison, 1) an expression value for the positive GVHD predictor gene greater or less than the predefined reference expression value for the positive GVHD predictor gene indicates that the HCT from the candidate donor is at higher or lower risk, respectively, of inducing GVHD in a HCT recipient, 2) an expression value for the negative GVHD predictor gene greater or less than the reference expression value for the negative GVHD predictor gene indicates that the HCT from the candidate donor is at lower or higher risk, respectively, of inducing GVHD in a HCT recipient, 3) a linear or non-linear combination of expression values for the combination of positive and/or negative GVHD predictor genes greater or less than the predefined reference value indicates that the HCT from the candidate donor is at higher or lower risk, respectively, of inducing GVHD in a HCT recipient, and 4) a linear or non-linear combination of expression values for the combination of positive and/or negative GVHD predictor genes greater or less than the predefined reference value indicates that the HCT from the candidate donor is at lower or higher risk, respectively, of inducing GVHD in a HCT recipient. The actual or candidate donor HCT is assigned a score or classified based upon an evaluation of expression value comparisons, total numbers or identity of positive or negative GVHD predictor genes, or linear or non linear combinations of expression values of the combination of positive and/or negative GVHD predictor gene comparisons, that indicate that the HCT from the candidate donor is at higher or lower risk of inducing GVHD in a HCT recipient, wherein the score reflects the probability or degree of risk of the actual or candidate donor HCT to induce GVHD in a HCT recipient. The score can then be recorded or stored. Subsequently, the foregoing steps can be repeated for one or more additional actual or candidate HCT donors, thereby producing a database or organizational construct comprising actual or candidate HCT donors each assigned a score based upon the probability or degree of risk of the actual or candidate donor HCT to induce or to not induce graft vs. host disease (GVHD) in a HCT recipient.

[0011] Exemplary positive and negative “GVHD” predictor genes and exemplary housekeeping (“HSK”) genes for measurement, are listed in and can be selected from Tables 1 (RNA 1538, SEQ ID NOs:1-1546), 2, 2A (RNA143), 2B (RNA192), 3, 12 (HSK6), 13 (SG175), 15 (SG128) and 18 (SG64). The sequences of 1546, 192, 175, 128 and 64 exemplary positive and negative GVHD predictor genes and HSK (housekeeping genes) are listed as a “Sequence Listing Appendix” following the claims (SEQ ID NOs:1-1738). Exemplary probes and primers for hybridization (detection) and/or RT-PCR which can be used to detect, measure or analyze expression of the positive and negative predictor genes are also listed, or can be derived from or based upon, for example, sequences listed in Tables 1 (RNA 1538, SEQ ID NOs:1-1546), 2, 2A (RNA143), 2B (RNA192), 3, 12 (HSK6), 13 (SG175), 15 (SG128) and 18 (SG64).

[0012] In accordance with the invention, there are additionally provided databases and organizational constructs. In one embodiment, a database or organizational construct includes a gene expression profile of two or more positive or negative GVHD predictor genes, linear or non-linear combinations of expression values for combinations of positive and/or negative GVHD predictor genes, or scores or risk probability of inducing or not inducing GVHD, from a plurality of actual or candidate HCT donors, wherein the two or more positive or negative GVHD predictor genes are any combination of genes listed in Tables 1 (RNA 1538, SEQ ID NOs:1-1546), 2, 2A (RNA143), 2B (RNA192), 3, 12 (HSK6), 13 (SG175), 15 (SG128) and 18 (SG64), or a polymorphism thereof, or wherein the scores or risk probability is based upon expression of one or more positive or negative GVHD predictor genes listed in Tables 1 (RNA 1538, SEQ ID NOs:1-1546), 2, 2A (RNA143), 2B (RNA192), 3, 12 (HSK6), 13 (SG175), 15 (SG128) and 18 (SG64), and wherein the database or organizational construct associates the gene expression profile, score or risk probability of inducing or not inducing GVHD, with each of the actual or candidate HCT donors.

[0013] In accordance with the invention, there are yet further provided kits. In one embodiment, a kit includes one or more analytes for detecting, measuring or analyzing one or more positive and/or negative GVHD predictor genes. In a particular aspect, a kit includes two or more primer pairs, wherein each primer pair is oppositely oriented to each other, and wherein each of the primer pairs hybridize to RNA or cDNA produced from one of the positive or negative predictor genes listed in Tables 1 (RNA 1538, SEQ ID NOs:1-1546), 2, 2A (RNA143), 2B (RNA192), 3, 12 (HSK6), 13 (SG175), 15 (SG128) or 18 (SG64), or a polymorphism thereof. In another particular aspect, a kit includes one or more nucleic acid probes, wherein at least one of said one or more probes hybridizes to RNA or cDNA of one or more of the positive or negative GVHD predictor genes listed in Tables 1 (RNA 1538, SEQ ID NOs:1-1546), 2, 2A (RNA143), 2B (RNA192), 3, 12 (HSK6), 13 (SG175), 15 (SG128) or 18 (SG64), or a polymorphism thereof.

[0014] In accordance with the invention, there are still further provided arrays. In one embodiment, an array includes one or more analytes for detecting, measuring or analyzing one or more positive and/or negative GVHD predictor genes. In a particular aspect, an array includes two or more primer pairs, wherein each primer pair is oppositely oriented to each other, wherein each of the primer pairs hybridize to RNA or cDNA produced from one of the positive or negative GVHD predictor genes listed in Tables 1 (RNA 1538, SEQ ID NOs:1-1546), 2, 2A (RNA143), 2B (RNA192), 3, 12 (HSK6), 13 (SG175), 15 (SG128) or 18 (SG64) or a polymorphism thereof, and wherein each primer pair is affixed to or contained in a support or substrate. In another particular aspect, an array includes one or more probes, wherein at least one of the probes hybridizes to RNA or cDNA produced from a positive or negative GVHD predictor gene listed in Tables 1 (RNA 1538, SEQ ID NOs:1-1546), 2, 2A (RNA143), 2B (RNA192), 3, 12 (HSK6), 13 (SG175), 15 (SG128) or 18 (SG64), or a polymorphism thereof, and wherein each probe is affixed to or contained in a support or substrate.

### DESCRIPTION OF DRAWINGS

[0015] FIG. 1 shows a representative unsmoothed histogram of 48803 probes by 48 samples Illumina signal values (Plot 5,1).

[0016] FIG. 2 shows a scatterplot of log 10(bead_stderr) vs. log 10(positive signal) from Illumina measurements.

[0017] FIG. 3 shows empirically that the vast majority of Illumina raw signal data occurs at levels less than about 1500 even though there are many signals at the multiple tens of thousands level; that for 98% of signals there is still clear and marked dependence of standard deviation or variance with signal level; and is the data employed in the calculation of the VST data-dependent parameters c1 and c2 for each sample separately.

[0018] FIG. 4 shows a histogram of all the signal values of the 48803 by 48 sample ensemble after the ensemble is transformed using VST. The largest 5% are omitted to improve visualization along the horizontal axis.

[0019] FIG. 5 shows RNA expression measurement values plotted for all 122 samples in ascending order for each of the six GVHD outcome classes, and labeled according to the samples' transplant center sources (TCS) for CTCF. BLVRA TCS, RNA20 TCS)

[0020] FIG. 6 shows RNA expression measurement values plotted for all 122 samples in ascending order for each of the six GVHD outcome classes, and labeled according to the samples' transplant center sources (TCS) for BLVRA.)

[0021] FIG. 7 shows RNA expression measurement values plotted for all 122 samples in ascending order for each of the six GVHD outcome classes, and labeled according to the samples' transplant center sources (TCS) for the RNA20 model gene set.

[0022] FIG. 8 shows a steady, monotonously increasing series of GVHD Group average with GVHD Group number for CTCF.

[0023] FIG. 9 shows a steady downward trend of GVHD Group average with GVHD Group number for BLVRA.

[0024] FIG. 10 is a plot (RNA20 GROUPS) of the relative score of GVHD negative votes from 20 well-performing individual LDA genes, and shows a steady downward trend of GVHD Group average score with increasing GVHD severity.

[0025] FIG. 11 shows sample-specific GVHD outcome prediction for anyGVHD vs. no GVHD for the LDA model corresponding to the individual RNA expression marker, CTCF. CTCF LDA samples are classified as GVHD negative below the separatrix.

[0026] FIG. 12 shows sample-specific GVHD outcome prediction for anyGVHD vs. no GVHD for the LDA models corresponding to the individual RNA expression marker, BLVRA. BLVRA LDA samples are classified as GVHD negative above the separatrix.

[0027] FIG. 13 shows sample-specific GVHD outcome prediction for anyGVHD vs. no GVHD for the LDA models corresponding to the 20 RNA marker voting model, RNA20 LDA-A). RNA 20 LDA samples are classified as GVHD negative above the separatrix.

[0028] FIG. 14 shows that in distinguishing chronic GVHD (alone or in combination with any form of acute GVHD) from no GVHD outcomes (cGVHD vs. noGVHD), only 2 False Negative classifications were reported (RNA20 LDA-B) (negative predictive value=0.95).

[0029] FIG. 15 shows that in distinguishing any form of acute GVHD (alone or in combination with chronic GVHD) from no GVHD outcomes (aGVHD vs. noGVHD), only 3 False Negative classifications were reported (RNA20 LDA-C) (negative predictive value=0.94).

[0030] FIG. 16 shows that in distinguishing chronic GVHD in combination with acute GVHD (in any form) from no GVHD outcomes (a&cGVHD vs. noGVHD), only 1 False Negative classification was reported (RNA20 LDA-D) (Negative Predictive Value=0.96).

[0031] FIG. 17 shows that in distinguishing the most severe forms of grade 3 or 4 acute GVHD (alone or in combination with chronic GVHD) from no GVHD outcomes (a34GVHD vs. noGVHD), not a single False Negative classification was reported (RNA20 LDA-E) (Negative Predictive Value=1.00).

[0032] FIG. 18 shows selection of a threshold value of 0.77 to minimize False Negatives and maximize the Negative Predictive Value, while maintaining a relatively high number of True Negatives and high true negative rate (RNA20 LDA PERFORMANCE-A, for any GVHD vs. no GVHD).

[0033] FIG. 19 shows the detailed behavior of all 5 LDA accuracy measures, also including Positive Predictive Value (PPV) and True Positive Rate (TPR, Sensitivity), RNA20 LDA PERFORMANCE-B, for any GVHD vs. no GVHD.

[0034] FIG. 20 shows a comparison of Vmod T-test performance in the presence of noise, ranging from 0.1× to 10× of SG measurement standard deviation, for the Gneg vs. Gag3 division (“3VmodnoisecompTtest”), at a GNOS threshold of 0.55 and prevalence P=0.25 (average and s.d. of performance values over 1,000 iterations of noise).

[0035] FIG. 21 shows a comparison of Vmod projected GVHD reduction in the presence of noise, ranging from 0.1× to 10× of SG measurement standard deviation, for the Gneg vs. Gag3 division (:3VmodnoisecompGVHDred″), at a GNOS threshold of 0.55 and prevalence P=0.25 (average and s.d. of performance values over 1,000 iterations of noise).

### DETAILED DESCRIPTION

[0036] The invention relates to gene expression profiles of CD4+ T cells from AHCT (allogeneic hematopoietic cell transplantation, or hematopoietic cell transplant) donors, such donors known to induce GVHD and known not to induce GVHD in a HCT recipient. The studies described herein identify numerous genes in CD4+ of HCT donors whose expression was increased in HCT donors that did not induce GVHD in HCT recipients, referred to as negative predictor genes. The studies described herein also identify numerous genes in CD4+ T cells of HCT donors whose expression was increased in HCT donors that did induce GVHD in HCT recipients, referred to as positive predictor genes. Measuring expression of one or more such “GVHD” predictor genes can be used to ascertain or predict the risk of HCT from a candidate donor to induce GVHD in an HCT recipient. For example, expression of one or more such genes in CD4+ T cells of candidate donor HCT, optionally HLA matched (10 out of 10, or 9 out of 10, HLA matches), to an HCT recipient can be measured. Increased expression of one or more genes known to increase with HCT inducing GVHD in a HCT recipient can provide information as to whether the donor HCT is likely to induce GVHD in a HCT recipient. Likewise, increased expression of one or more genes known to increase with HCT not inducing GVHD in a HCT recipient can provide information as to whether the donor is likely to not induce GVHD in a HCT recipient. Measurement of one or more such positive or negative GVHD predictor genes, or such positive or negative GVHD predictor genes in a combination, a plurality of positive and negative GVHD predictor genes, or particularly ratios of such positive and/or negative GVHD predictor genes, can be used to predict or determine the risk of any HCT donor of inducing GVHD in a HCT recipient, with a moderate, high or very high degree of confidence.

[0037] Accordingly, the invention provides methods for predicting and/or determining the risk of a hematopoietic cell transplant (HCT) from a candidate donor to induce or not induce graft vs. host disease (GVHD) in a HCT recipient. In one embodiment, a method includes In one embodiment, a method includes measuring expression of one or more positive or negative GVHD predictor genes, or a combination of positive and/or negative GVHD predictor genes, selected from Tables 1 (RNA 1538), 2, 2A (RNA 143), 2B (RNA 192), 3, 13 (SG175), 15 (SG128) or 18 (SG64), or a polymorphism thereof, in CD4+ T cells or CD8+ T cells from a candidate donor. An expression value for the positive or negative GVHD predictor genes based upon the gene expression level measured is obtained, or a linear or non-linear combinations of expression values for the combination of positive and/or negative GVHD predictor genes based upon the expression levels measured is obtained. A comparison of the expression value for the positive or negative GVHD predictor gene to a predefined reference expression value for the positive or negative GVHD predictor gene, or of the linear or non-linear combinations of expression values for the combination of positive and/or negative GVHD predictor genes to predefined reference values for the linear or non-linear combinations of the positive and/or negative GVHD predictor genes is performed. A comparison in which 1) an expression value for the positive GVHD predictor gene greater or less than the predefined reference expression value for the positive GVHD predictor gene indicates that the HCT from the candidate donor is at higher or lower risk, respectively, of inducing GVHD in a HCT recipient, 2) an expression value for the negative GVHD predictor gene greater or less than the predefined reference expression value for the negative GVHD predictor gene indicates that the HCT from the candidate donor is at lower or higher risk, respectively, of inducing GVHD in a HCT recipient, 3) a linear or non-linear combination of expression values for the combination of positive and/or negative GVHD predictor genes greater or less than the predefined reference value indicates that the HCT from the candidate donor is at higher or lower risk, respectively, of inducing GVHD in a HCT recipient, and 4) a linear or non-linear combination of expression values for the combination of positive and/or negative GVHD predictor genes greater or less than the predefined reference value indicates that the HCT from the candidate donor is at lower or higher risk, respectively, of inducing GVHD in a HCT recipient. Based upon an evaluation of expression values comparisons, total numbers or identity of positive or negative GVHD predictor genes, or comparisions of the linear or non linear combination of expression values for the combination of positive and/or negative GVHD predictor genes, that indicate that the HCT from the candidate donor is at higher or lower risk of inducing GVHD in a HCT recipient, the risk or probability of the HCT from the candidate donor to induce or to not induce graft vs. host disease (GVHD) in a HCT recipient is predicted and/or determined.

[0038] In another embodiment, a method for predicting and/or determining the risk of a hematopoietic cell transplant (HCT) from a candidate donor to induce or not induce graft vs. host disease (GVHD) in a HCT recipient includes contacting CD4+ T cells or CD8+ T cells, or nucleic acid or protein expressed by CD4+ T cells or CD8+ T cells, from a candidate donor with an analyte that detects expression of one or more positive or negative GVHD predictor genes listed in Tables 1 (RNA 1538), 2, 2A (RNA 143), 2B (RNA 192), 3, 13 (SG175), 15 (SG128) or 18 (SG64), or a polymorphism thereof, and measuring expression of the one or more positive or negative GVHD predictor genes in CD4+ T cells or CD8+ T cells to obtain an expression value for the positive or negative GVHD predictor genes, or measuring expression of a combination of the positive and/or negative GVHD predictor genes to obtain linear or non-linear combinations of expression values for the combination of positive and/or negative GVHD predictor genes. A comparison of the expression value for the positive or negative GVHD predictor gene to a predefined reference expression value for the positive or negative GVHD predictor gene, or of the linear or non-linear combinations of expression values of the combination of positive and/or negative GVHD predictor genes to a predefined reference value for the linear or non-linear combinations of expression values of the combination of positive and/or negative GVHD predictor genes, is performed. Based upon the comparison, 1) an expression value for the positive GVHD predictor gene greater or less than the predefined reference expression value for the positive GVHD predictor gene indicates that the HCT from the candidate donor is at higher or lower risk, respectively, of inducing GVHD in a HCT recipient, 2) an expression value for the negative GVHD predictor gene greater or less than the reference expression value for the negative GVHD predictor gene indicates that the HCT from the candidate donor is at lower or higher risk, respectively, of inducing GVHD in a HCT recipient, 3) a linear or non-linear combination of expression values for the combination of positive and/or negative GVHD predictor genes greater or less than the predefined reference value indicates that the HCT from the candidate donor is at higher or lower risk, respectively, of inducing GVHD in a HCT recipient, and 4) a linear or non-linear combination of expression values for the combination of positive and/or negative GVHD predictor genes greater or less than the predefined reference value indicates that the HCT from the candidate donor is at lower or higher risk, respectively, of inducing GVHD in a HCT recipient. Based upon an evaluation of expression value comparisons, total numbers or identity of positive or negative GVHD predictor genes, or linear or non linear combinations of expression values of the combination of positive and/or negative GVHD predictor gene comparisons, that indicate that the HCT from the candidate donor is at higher or lower risk of inducing GVHD in a HCT recipient, leads to predicting or determining the risk of the HCT from the candidate donor to induce or to not induce GVHD in a HCT recipient.

[0039] The invention also provides methods for classifying or categorizing a candidate hematopoietic cell transplant (HCT) donor according to the risk or probability of inducing or not inducing graft vs. host disease (GVHD) in a HCT recipient. In one embodiment, a method includes measuring expression of a plurality of positive or negative GVHD predictor genes selected from a gene listed in Tables 1 (RNA 1538), 2, 2A (RNA 143), 2B (RNA 192), 3, 13 (SG175), 15 (SG128) or 18 (SG64), or a polymorphism thereof, in CD4+ T cells or CD8+ T cells from the candidate HCT donor, and obtaining an expression value for the positive or negative GVHD predictor genes based upon the expression measured, or obtaining linear or non-linear combinations of expression values for the combination of positive and/or negative GVHD predictor genes based upon the expression measured. A comparison of the expression value for the positive or negative GVHD predictor gene to a predefined reference expression value for the positive or negative GVHD predictor gene, or of the linear or non-linear combinations of expression values for the combination of positive and/or negative GVHD predictor genes to predefined reference values for the linear or non-linear combinations of the positive and/or negative GVHD predictor genes, is performed. Based upon the comparison, 1) an expression value for the positive GVHD predictor gene greater or less than the predefined reference expression value for the positive GVHD predictor gene indicates that the HCT from the candidate donor is at higher or lower risk, respectively, of inducing GVHD in a HCT recipient, 2) an expression value for the negative GVHD predictor gene greater or less than the reference expression value for the negative GVHD predictor gene indicates that the HCT from the candidate donor is at lower or higher risk, respectively, of inducing GVHD in a HCT recipient, 3) a linear or non-linear combination of expression values for the combination of positive and/or negative GVHD predictor genes greater or less than the predefined reference value indicates that the HCT from the candidate donor is at higher or lower risk, respectively, of inducing GVHD in a HCT recipient, and 4) a linear or non-linear combination of expression values for the combination of positive and/or negative GVHD predictor genes greater or less than the predefined reference value indicates that the HCT from the candidate donor is at lower or higher risk, respectively, of inducing GVHD in a HCT recipient. The actual or candidate donor HCT is classified for risk of inducing or not inducing graft vs. host disease (GVHD) based upon an evaluation of expression value comparisons, total numbers or identity of positive or negative GVHD predictor genes, or linear or non linear combinations of expression values of the combination of positive and/or negative GVHD predictor gene comparisons, that indicate that the HCT from the candidate donor is at higher or lower risk of inducing GVHD in a HCT recipient.

[0040] The invention further provides methods for producing or generating databases and organizational constructs, in which the database or organizational construct includes a plurality of actual and/or candidate HCT donors, optionally classified, categorized or assigned a score or identified based upon the probability or degree of risk of HCT from the actual or candidate donor to induce or to not induce graft vs. host disease (GVHD) in a HCT recipient. In one embodiment, a method includes: measuring expression of one or more positive or negative GVHD predictor genes listed in Tables 1 (RNA 1538), 2, 2A (RNA 143), 2B (RNA 192), 3, 13 (SG175), 15 (SG128) or 18 (SG64), or a polymorphism thereof, in CD4+ T cells or CD8+ T cells from an actual or a candidate donor, and obtaining an expression value for the positive or negative GVHD predictor genes based upon the expression measured, or obtaining linear or non-linear combinations of expression values for the combination of positive and/or negative GVHD predictor genes based upon the expression measured. A comparison is performed, of the expression value for the positive or negative GVHD predictor gene to a predefined reference expression value for the positive or negative GVHD predictor gene, or of the linear or non-linear combinations of expression values for the combination of positive and/or negative GVHD predictor genes to predefined reference values for the linear or non-linear combinations of the positive and/or negative GVHD predictor genes. Based upon the comparison, 1) an expression value for the positive GVHD predictor gene greater or less than the predefined reference expression value for the positive GVHD predictor gene indicates that the HCT from the candidate donor is at higher or lower risk, respectively, of inducing GVHD in a HCT recipient, 2) an expression value for the negative GVHD predictor gene greater or less than the reference expression value for the negative GVHD predictor gene indicates that the HCT from the candidate donor is at lower or higher risk, respectively, of inducing GVHD in a HCT recipient, 3) a linear or non-linear combination of expression values for the combination of positive and/or negative GVHD predictor genes greater or less than the predefined reference value indicates that the HCT from the candidate donor is at higher or lower risk, respectively, of inducing GVHD in a HCT recipient, and 4) a linear or non-linear combination of expression values for the combination of positive and/or negative GVHD predictor genes greater or less than the predefined reference value indicates that the HCT from the candidate donor is at lower or higher risk, respectively, of inducing GVHD in a HCT recipient. The actual or candidate donor HCT is assigned a score or classified based upon an evaluation of expression value comparisons, total numbers or identity of positive or negative GVHD predictor genes, or linear or non linear combinations of expression values of the combination of positive and/or negative GVHD predictor gene comparisons, that indicate that the HCT from the candidate donor is at higher or lower risk of inducing GVHD in a HCT recipient, wherein the score reflects the probability or degree of risk of the actual or candidate donor HCT to induce GVHD in a HCT recipient. The score can then be recorded or stored, and the foregoing steps can optionally be repeated for one or more additional actual or candidate HCT donors, to produce a database or organizational construct comprising actual or candidate HCT donors each assigned a score based upon the probability or degree of risk of the actual or candidate donor HCT to induce or to not induce graft vs. host disease (GVHD) in a HCT recipient.

[0041] In further particular aspects of the methods of the invention, one or more of the positive or negative gene expression profile of the candidate HCT donor, expression values of the positive or negative GVHD predictor genes of the candidate HCT donor, comparisions of the expression values to the respective predefined reference expression values for the positive or negative predictor genes of the candidate HCT donor, or comparisons of the linear or non linear combinations of expression values of the combination of positive and/or negative GVHD predictor genes, can be recorded or stored, for example, on an electronic medium, format or form, optionally that is computer readable or accessible.

[0042] In additional embodiments, methods of the invention can be performed using one or more probes or primers that specifically hybridizes to a gene, wherein the one or more probes or primers is selected from a probe or primer, or is derived from or based upon, a sequence listed in Tables 1 (RNA 1538, SEQ ID NOs:1-1546), 2, 2A (RNA143), 2B (RNA192), 3, 12 (HSK6), 13 (SG175), 15 (SG128) or 18 (SG64). For example, in a method of predicting and/or determining risk of a hematopoietic cell transplant (HCT) from a candidate donor to induce or to not induce GVHD in a HCT recipient, expression of one or more positive or negative GVHD predictor genes employs one or more probes or primers selected from, or derived from or based upon, a sequence in Tables 1 (RNA 1538, SEQ ID NOs:1-1546), 2, 2A (RNA143), 2B (RNA192), 3, 12 (HSK6), 13 (SG175), 15 (SG128) or 18 (SG64). Such probes and primers are presumed to hybridize to the respective genes listed in Tables 1 (RNA 1538, SEQ ID NOs:1-1546), 2, 2A (RNA143), 2B (RNA192), 3, 12 (HSK6), 13 (SG175), 15 (SG128) and 18 (SG64), and therefore, other such probes and primers based upon the nucleic acid sequence of the gene can be designed in order to measure or analyze expression of the gene as set forth herein. However, should the probes or primers hybridize to a different gene, methods of the invention can be performed using one or more of the particular probes (or probes of similar sequence and/or length) or primers listed in Tables 1 (RNA 1538, SEQ ID NOs:1-1546), 2, 2A (RNA143), 2B (RNA192), 3, 12 (HSK6), 13 (SG175), 15 (SG128) or 18 (SG64) as they are specific for a negative or positive GVHD predictor gene, no matter if the probe or primer does not hybridize to the particular gene listed in the Table.

[0043] Particular genes, the increased expression of which correlates with reduced risk of donor HCT inducing GVHD in a HCT recipient, are identified in Tables 1 (RNA 1538, SEQ ID NOs:1-1546), 2, 2A (RNA143), 2B (RNA192), 3, 12 (HSK6), 13 (SG175), 15 (SG128) or 18 (SG64), and are referred to as Negative Predictor genes. Negative Predictor genes according to the invention are therefore genes whose increased expression in CD4+ T cells or CD8+ T cells of candidate donors correlates with a reduced risk of inducing GVHD in a HCT recipient. Exemplary Negative Predictor genes are indicated in Tables 1 (RNA 1538, SEQ ID NOs:1-1546), 2, 2A (RNA143), 2B (RNA192), 3, and 13 (SG175), by an “N” symbol. In addition, for certain Negative Predictor genes, the greater the expression of the negative Predictor genes in donor CD4+ T cells or CD8+ T cells, the lower the risk or probability of donor HCT inducing GVHD in a HCT recipient.

[0044] As set forth herein, increased expression of negative predictor genes in CD4+ T cells correlates with HCT that does not induce GVHD and therefore indicates a reduced risk or probability of a donor HCT to induce GVHD in a HCT recipient. Accordingly, decreased expression of such negative predictor genes correlates and therefore indicates an increased risk or probability of a donor HCT to induce GVHD in a HCT recipient.

[0045] Particular genes, the increased expression of which correlates with increased risk of donor HCT inducing GVHD in a HCT recipient are identified in Tables 1 (RNA 1538, SEQ ID NOs:1-1546), 2, 2A (RNA143), 2B (RNA192), 3, 13 (SG175), 15 (SG128) or 18 (SG64), are referred to as Positive Predictor genes. Positive Predictor genes according to the invention are therefore genes whose increased expression in CD4+ T cells of candidate donors correlates with an increased risk of inducing GVHD in a HCT recipient. Exemplary Positive Predictor genes are indicated in Tables 1 (RNA 1538, SEQ ID NOs:1-1546), 2, 2A (RNA143), 2B (RNA192), 3, and 13 (SG175) by a “P” symbol. In addition, for certain positive predictor genes, the greater the expression of the Positive Predictor genes in donor CD4+ T cells, the greater the risk or probability of donor HCT inducing GVHD in a HCT recipient.

[0046] As set forth herein, increased expression of positive predictor genes in CD4+ T cells correlates with HCT that induces GVHD and therefore indicates an increased risk or probability of donor HCT to induce GVHD in a HCT recipient. Accordingly, decreased expression of such positive predictor genes correlates and therefore indicates a decreased risk or probability of a donor HCT to induce GVHD in a HCT recipient.

[0047] Negative and positive GVHD predictor genes according to the invention, and as listed in Tables 1 (RNA 1538, SEQ ID NOs:1-1546), 2, 2A (RNA143), 2B (RNA192), 3, 12 (HSK6), 13 (SG175), 15 (SG128) and 18 (SG64), can be measured or analyzed individually, or a plurality of such genes can be measured or analyzed in CD4+ T cells or CD8+ T cells of a candidate (or actual) HCT donor in order to predict or determine the risk of the candidate (or actual) donor HCT to induce or to not induce GVHD in a recipient, or any other methods of the invention. Thus, the grouping of Negative and Positive Predictor genes listed in the Tables is merely for purposes of illustration, and convenience, and is not in any way intended to mean that all genes within the Table must be analyzed, or that a minimum number of Negative and/or Positive Predictor genes in the Table must be analyzed, etc. Rather, in view of the guidance herein, any desired combination of Negative and/or Positive GVHD predictor genes in Tables 1 (RNA 1538, SEQ ID NOs:1-1546), 2, 2A (RNA143), 2B (RNA192), 3, 12 (HSK6), 13 (SG175), 15 (SG128) and 18 (SG64) can be measured or analyzed in order to perform the invention methods or used in producing the invention kits and arrays. Thus, by way of a non-limiting example, one or more negative and/or positive GVHD predictor genes selected from Table 2B (RNA192) can be combined with any gene listed in any of Tables 12 (HSK6), 13 (SG175), 15 (SG128) or 18 (SG64); one or more negative and/or positive GVHD predictor genes selected from Table 13 (SG175) can be combined with any gene listed in any of Tables 2B (RNA192), 12, (HSK6), 15 (SG128) or 18 (SG64); etc.

[0048] In accordance with the invention, the number of genes measured or analyzed can be a single gene (any sequence in Tables 1 (RNA 1538, SEQ ID NOs:1-1546), 2, 2A (RNA143), 2B (RNA192), 3, 12 (HSK6), 13 (SG175), 15 (SG128) or 18 (SG64), or any number of Negative and/or Positive GVHD predictor genes, up to all genes listed in Tables 1 (RNA 1538, SEQ ID NOs:1-1546), 2, 2A (RNA143), 2B (RNA192), 3, 12 (HSK6), 13 (SG175), 15 (SG128) or 18 (SG64), without limitation, and without inferring that any particular Negative or Positive Predictor genes must be analyzed. Likewise, analysis of gene ratios and combinations of positive and/or negative GVHD predictor genes can be undertaken based upon the sequences in Tables 1 (RNA 1538, SEQ ID NOs:1-1546), 2, 2A (RNA143), 2B (RNA192), 3, 12 (HSK6), 13 (SG175), 15 (SG128) or 18 (SG64). Again, the gene Tables set forth herein are intended to be representative and not limiting to particular genes or combinations of genes. For example, Table 3 is a representative 20 gene model (aka RNA20 model) in which analysis/measurement of such genes in CD4+ T cells of a donor provides a much greater ability to predict or determine risk of donor HCT inducing GVHD in a HCT recipient than by using the standard 10 out of 10 HLA matches between donor and recipient. Likewise, Tables 1 (RNA 1538, SEQ ID NOs:1-1546), 2, 2A (RNA143), 2B (RNA192), 3, 13 (SG175), 15 (SG128) and 18 (SG64) illustrate genes in which their analysis/measurement in CD4+ T cells of a candidate HCT donor provides a greater ability to predict or determine risk of donor HCT inducing GVHD in a HCT recipient than by using the standard 10 out of 10 HLA matches between donor and recipient. Other suitable models to predict or determine risk of donor HCT inducing GVHD in a HCT recipient can be readily constructed based upon any combination of the Negative and Positive Predictor genes in Tables 1 (RNA 1538, SEQ ID NOs:1-1546), 2, 2A (RNA143), 2B (RNA192), 3, 12 (HSK6), 13 (SG175), 15 (SG128) and 18 (SG64), and the teachings herein. Accordingly, the invention methods include measuring or analyzing one, or any combination of any number of the Negative and/or Positive Predictor genes, in Tables 1 (RNA 1538, SEQ ID NOs:1-1546), 2, 2A (RNA143), 2B (RNA192), 3, 12 (HSK6), 13 (SG175), 15 (SG128) or 18 (SG64). Likewise, invention compositions, such as kits, arrays and databases, include without limitation primers and/or probes for analysis or measurement of, or databases with expression profiles of, any one, or any combination of any number of the Negative and/or Positive GVHD Predictor genes in Tables 1 (RNA 1538, SEQ ID NOs:1-1546), 2, 2A (RNA143), 2B (RNA192), 3, 12 (HSK6), 13 (SG175), 15 (SG128) and 18 (SG64).

[0049] As used herein, a gene expression profile or “expression profile” refers to expression levels of one or more positive and/or negative GVHD predictor genes from CD4+ T cells or CD8+ T cells from a candidate HCT donor relevant to GVHD outcome prediction or determination. Such a profile can also include gene ratios, and combinations of expression values of positive and/or negative GVHD predictor genes. A profile corresponds to a particular candidate donor, and thus provides a way to score, identify or document suitability for their HCT as a donor for an HCT recipient.

[0050] Gene expression levels, profiles, scores, and other indicia of a candidate HCT donor or HCT recipient may be represented by any form of data which is suitable for use in the methods (e.g., comparisons and assessments) described herein. The levels, profiles, and scores may be presented as a physical representation (e.g., paper, such as a graph), computer (e.g., on a screen) or digital representation or as data stored in an electronic or computer-readable medium. Such data can be accessed by a user, for example, to identify a candidate donor HCT at low risk or probability of inducing GVHD in a HCT recipient.

[0051] As set forth herein, polymorphisms of negative and positive GVHD predictor genes listed in Tables 1 (RNA 1538, SEQ ID NOs:1-1546), 2, 2A (RNA143), 2B (RNA192), 3, 12 (HSK6), 13 (SG175), 15 (SG128) and 18 (SG64) are included. A polymorphism is a genetic variant at the RNA or genmonic DNA sequence level. Such polymorphisms are typically naturally occurring sequence variants, and can be single or multiple nucleotide changes. Polymorphisms may be silent in terms of not affecting the function, changing an amino acid residue of the encoded protein, or affecting activity, expression, half-life, etc. of the gene, mRNA or encoded protein. However, such polymorphisms may not be silent and may affect the function, change an amino acid residue of the encoded protein, or affect activity, expression, half-life, etc. of the gene, mRNA or encoded protein. Particular polymorphisms of negative and positive predictor genes listed in Tables 1-3 are known to one of skill in the art, and can be measured or analyzed as set forth herein or using other methods.

[0052] As used herein, the term “plurality” means 2 or more. As set forth herein, a plurality of positive and/or negative predictor genes can be measured or analyzed. Thus, 2 or more genes of Tables 1 (RNA 1538, SEQ ID NOs:1-1546), 2, 2A (RNA143), 2B (RNA192), 3, 12 (HSK6), 13 (SG175), 15 (SG128) or 18 (SG64) can be measured or analyzed in methods of the invention. In particular embodiments, the number of negative and/or positive predictor genes measured or analyzed is 2, 3, 4, 5, 6, 7, 8, 9, 10, 11, 12, 13, 14, 15, 16, 17, 18, 19, 20 or more, e.g., 21, 22, 23, 24, 25, 26, 27, 28, 29, 30, 31, 32, 33, 34, 35, 36, 37, 38, 39, 40, 41, 42, 43, 44, 45, 46, 47, 48, 49, 50, etc. . . . up to all genes listed in Tables 1 (RNA 1538, SEQ ID NOs:1-1546), 2, 2A (RNA143), 2B (RNA192), 3, 12 (HSK6), 13 (SG175), 15 (SG128) and 18 (SG64).

[0053] Likewise, a plurality of analytes (e.g., primers, probes or antibodies) in the kits and/or arrays can bind to or hybridize with positive or negative predictor genes listed in Tables 1 (RNA 1538, SEQ ID NOs:1-1546), 2, 2A (RNA143), 2B (RNA192), 3, 12 (HSK6), 13 (SG175), 15 (SG128) or 18 (SG64), or expression products (proteins) encoded by such genes, to obtain expression values for the positive or negative GVHD predictor genes and comparing the expression value for the positive or negative predictor genes to a predefined reference expression value. Thus, analytes (e.g., primers, probes or antibodies) in the kits and/or arrays of the invention can include those that bind to or hybridize with 2, 3, 4, 5, 6, 7, 8, 9, 10, 11, 12, 13, 14, 15, 16, 17, 18, 19, 20 or more, e.g., 21, 22, 23, 24, 25, 26, 27, 28, 29, 30, 31, 32, 33, 34, 35, 36, 37, 38, 39, 40, 41, 42, 43, 44, 45, 46, 47, 48, 49, 50, etc., up to all genes listed in Tables 1 (RNA 1538, SEQ ID NOs:1-1546), 2, 2A (RNA143), 2B (RNA192), 3, 12 (HSK6), 13 (SG175), 15 (SG128) and 18 (SG64), or expression products (proteins) encoded by such genes.

[0054] GVHD outcome prediction and/or determination, or classifying, categorizing, scoring or identifying according to risk or probability of a candidate donor HCT to induce or to not induce GVHD in a HCT recipient for a plurality of such genes is based upon the totality of comparisons of expression values of the plurality of positive or negative predictor genes to their respective predefined reference expression values. A gene expression profile or more simply an expression profile refers to expression of a plurality of Negative and/or Positive Predictor genes of a given candidate HCT donor, or is a dataset of expression values of the plurality of positive or negative predictor genes, or a dataset of linear or non linear combinations of expression values of the combination of positive and/or negative GVHD predictor gene comparisons, optionally compared to their respective predefined reference expression values, or 2 or more candidate HCT donors. Thus, a sufficient plurality of negative and/or positive predictor genes is measured for expression and an expression value, or combinations of expression values, is determined for each in order to provide a determination or prediction of risk of GVHD outcome, score, etc.

[0055] Of course, additional genes not listed in Tables 1 (RNA 1538, SEQ ID NOs:1-1546), 2, 2A (RNA143), 2B (RNA192), 3, 12 (HSK6), 13 (SG175), 15 (SG128) and 18 (SG64), and expression products (proteins) encoded by such genes, can be measured or analyzed, or included in methods of the invention, and analytes (e.g., primers, probes or antibodies) in the invention kits and arrays of the invention can bind to or hybridize with one or more genes not listed in Tables 1 (RNA 1538, SEQ ID NOs:1-1546), 2, 2A (RNA143), 2B (RNA192), 3, 12 (HSK6), 13 (SG175), 15 (SG128) or 18 (SG64). However, for purposes of predicting or determining degree of risk or probability of HCT from a candidate donor inducing or not inducing GVHD, the genes whose expression is measured or analyzed are one or more genes selected from among those genes listed in Tables 1 (RNA 1538, SEQ ID NOs:1-1546), 2, 2A (RNA143), 2B (RNA192), 3, 12 (HSK6), 13 (SG175), 15 (SG128) or 18 (SG64), or an expression product (protein) encoded by such genes.

[0056] In methods of the invention, GVHD outcome prediction or determination depends upon the expression level of one or more positive or negative predictor genes compared to a predefined or predetermined reference expression value for the particular positive or negative predictor gene. Expression of a gene from a candidate HCT donor closer to a value that correlates with higher risk of GVHD means that the particular gene is considered to indicate a higher risk of inducing GVHD, whereas expression of a gene from a candidate HCT donor closer to a value that correlates with a lower risk of GVHD means that the particular gene is considered to indicate a lower risk of inducing GVHD. In particular, for a positive predictor gene, a greater level of expression than the predefined or predetermined reference expression value for the particular positive predictor gene correlates with expression of the positive predictor gene in one or more HCT donors known to induce GVHD, and therefore indicates a higher degree of risk or probability of HCT inducing GVHD in a recipient. Accordingly, an expression value for the positive predictor gene greater than the predefined or predetermined reference expression value indicates that the HCT from the candidate donor is at higher risk of inducing graft vs. host disease (GVHD). For a negative predictor gene, greater level of expression than the predefined or predetermined reference expression value for the particular negative predictor gene correlates with expression of the negative predictor gene in one or more HCT donors known not to induce GVHD, and therefore indicates a lower degree of risk or probability of HCT inducing GVHD in a recipient. Accordingly, an expression value for the negative predictor gene greater than the predefined or predetermined reference expression value indicates that the HCT from the candidate donor is at lower risk of inducing graft vs. host disease (GVHD).

[0057] A predefined or predetermined reference expression value for positive and negative GVHD predictor genes is a value determined or set by expression analysis of donor HCT known to induce GVHD, at least to some extent in a HCT recipient, and donor HCT known not to induce GVHD in a HCT recipient. A predefined or predetermined reference expression value for positive and negative GVHD predictor genes (or analogously, linear or non linear combinations of expression values of the combination of positive and/or negative GVHD predictor genes has a predefined or predetermined reference value) is therefore a value set such that a greater level of expression is considered to indicate a higher or lower risk, respectively, of HCT of a candidate donor inducing GVHD in a HCT recipient. Of course, expression of a positive or negative GVHD predictor gene less than a predefined or predetermined reference expression value for the respective positive or negative predictor gene is considered to indicate a lower or higher risk, respectively, of HCT of a candidate donor to induce GVHD in a HCT recipient. A predefined or predetermined reference expression value is therefore considered a boundary value that separates (i.e., is a separatix) a higher and a lower risk or probability of GVHD outcome of a candidate donor HCT in a HCT recipient.

[0058] A predefined or predetermined reference expression value can be determined by discriminatory analysis. Such analysis determines the amount of positive or negative predictor gene expression that is statistically meaningful and that that separates GVHD outcome prediction or determination between a higher and a lower risk of inducing GVHD. For example, Discriminant Analysis, such as Linear Discriminant Analysis (LDA), or Quadratic Discriminant Analysis (QDA) provides a basis for discriminating gene expression values of candidate donor HCTs known to induce GVHD or known not to induce GVHD in a HCT recipient.

[0059] A predefined or predetermined reference expression value can be set by the user. For example, a predefined or predetermined reference expression value for a given positive or negative predictor gene can be set approximately or precisely midway between expression of the positive or negative predictor gene in CD4+ T cells or CD8+ T cells from an HCT donor known to induce GVHD and expression of the positive or negative predictor gene in CD4+ T cells or CD8+ T cells from an HCT donor known to not induce GVHD in a HCT recipient. Accordingly, an expression value for a positive predictor gene greater than the midway value indicates that the HCT from the candidate donor is at higher risk of inducing graft vs. host disease (GVHD); an expression value for a negative predictor gene greater than the midway value indicates that the HCT from the candidate donor is at lower risk of inducing graft vs. host disease (GVHD); an expression value for a positive predictor gene less than the midway value indicates that the HCT from the candidate donor is at lower risk of inducing graft vs. host disease (GVHD); and an expression value for a negative predictor gene less than the midway value indicates that the HCT from the candidate donor is at higher risk of inducing graft vs. host disease (GVHD).

[0060] Generally, a more reliable predefined or predetermined reference expression value can be based upon average or median expression of the positive or negative GVHD predictor gene in CD4+ T cells or CD8+ T cells from a plurality or multiple HCT donors that induce GVHD, and an average or median expression of the positive or negative predictor gene in CD4+ T cells or CD8+ T cells from a plurality or multiple HCT donors that do not induce GVHD in a HCT recipient. Accordingly, in one embodiment, a predefined or predetermined reference expression value for the positive predictor gene is set approximately or precisely midway between an average or median expression level of the positive predictor gene from two or more HCT donors that induce GVHD and two or more HCT donors that do not induce GVHD. In another embodiment, a predefined or predetermined reference expression value for the negative predictor gene is set approximately or precisely midway between an average or median expression level of the negative predictor genes from two or more HCT donors that induce GVHD and two or more HCT donors that do not induce GVHD. In more particular embodiments, the predefined reference expression value for the positive or negative predictor gene is set approximately or precisely midway between an average or median expression level of the positive or negative predictor genes from at least 2, 3, 4, 5 or more HCT donors (e.g., 6, 7, 8, 9, 10, 11, 12, 13, 14, 15, 16, 17, 18, 19, or more HCT donors, e.g., 20, 21, 22, 23, 24, 25, etc., or more) that induce GVHD and at least 2, 3, 4, 5 or more HCT donors (e.g., 6, 7, 8, 9, 10, 11, 12, 13, 14, 15, 16, 17, 18, 19, or more HCT donors, e.g., 20, 21, 22, 23, 24, 25, etc., or more) that do not induce GVHD.

[0061] A predefined or predetermined reference expression value for a positive or negative GVHD predictor gene can optionally be assigned a numerical value for ease of comparison of the expression value measured for the positive or negative predictor gene. Expression greater than the value can be taken to indicate a higher or lower risk of donor HCT inducing GVHD in a HCT recipient. In a particular embodiment, the predefined or predetermined reference expression value (e.g., midway value) is assigned a value of 0.5, and an expression value for one or more negative predictor genes greater than 0.5 indicates that the HCT from the candidate donor is at lower risk of inducing graft vs. host disease (GVHD). In another particular embodiment, the predefined or predetermined reference expression value (e.g., midway value) is assigned a value of 0.5, and an expression value for one or more positive predictor genes greater than 0.5 indicates that the HCT from the candidate donor is at higher risk of inducing graft vs. host disease (GVHD). Of course, should greater confidence in GVHD outcome prediction or determination be desired, the expression values required to be above the predefined or predetermined reference expression (numerical) value can be increased. Thus, for example, a negative predictor gene must have an expression value of 0.55 or greater (e.g., 0.60, 0.65, 0.70, 0.75, or 0.80) to indicate that the HCT from the candidate donor is at lower risk of inducing graft vs. host disease (GVHD). In another example, a positive predictor gene must have an expression value of 0.55 or greater (e.g., 0.60, 0.65, 0.70, 0.75, or 0.80) to indicate that the HCT from the candidate donor is at higher risk of inducing graft vs. host disease (GVHD).

[0062] The reference expression value (or predefined reference value) can be set to a higher or lower threshold. Such reference expression values therefore can be adjusted to increase reliability, accuracy, reproducibility, and to account for variables such as statistical error, etc., in order to improve the robustness of GVHD determination/prediction. Generally, to reduce or minimize the risk or probability of candidate donor HCT inducing GVHD in a HCT recipient (i.e., to reduce false negatives, i.e., to correctly predict a candidate donor who is at increased risk of inducing GVHD in a recipient), the user can select for higher expression of negative predictor genes by setting the reference expression value higher, and/or lower expression of positive predictor genes by setting the reference expression value lower, in a gene expression profile of CD4+ T cells or CD8+ T cells from a candidate HCT donor.

[0063] An expression value obtained for the positive or negative GVHD predictor genes can be adjusted or normalized relative to expression of one or more reference genes prior to comparing the expression value of the positive or negative predictor gene to the predefined reference expression value for the positive or negative predictor gene. Methods for normalizing the level of gene expression are known to those of skill in the art. For example, expression of a positive or negative predictor gene can be normalized on the basis of the relative ratio of the mRNA level of the gene to the mRNA level of a reference gene, such as a gene whose expression is constitutive and at a relatively constant level in CD4+ T cells or CD8+ T cells, or a positive or negative predictor gene whose expression is not used to determine the expression value, so that variations in sample amount, extraction efficiency, extracted amount, or measurement chemistry or instrumentation performance are reduced in measuring gene expression amounts or level. In particular embodiments, a reference gene is a housekeeping gene (e.g., in Tables 12 or 13).

[0064] As used herein, “housekeeping gene” is a gene the expression of which is substantially the same from sample to sample or from tissue to tissue, or one that is relatively refractory to change in response to external stimuli. A housekeeping gene can be any gene other than the positive or negative predictive gene of interest for which the expression value is determined that will allow normalization of sample RNA or any other marker that can be used to normalize for the amount of total RNA added to each reaction. Non-limiting examples include those designated with the “HSK” symbol in Tables 1 (RNA 1538), 2A, 2B (RNA 192), 12 and 13, and/or more particularly, eukaryotic translation initiation factor 4H (EIF4H) transcript variant 1, 3 beta actin (ACTB), aldolase A (ALDOA), lactate dehydrogenase A (LDHA), phosphoglycerate kinase 1 (PGK1), transferrin receptor (TFRC), tubulin beta (TUBB), tubulin beta 2A (TUBB2A), thioredoxin (TXN), ubiquitin C (UBC), or ubiquitin-activating enzyme E1 (UBE1).

[0065] The term, “combination,” when used in reference to one or more GVHD predictor genes, refers to a minimal combination of 2 predictor genes, and could also be combinations of more predictor genes, such as 3, 4, 5, 6, 7, 8, 9, 10, 11, 12, 13, 14, 15, 16, 17, 17, 18, 19, 20, 21, 22, 23, 24, 25, 26, 27, 28, 29, 30, 31, 32, 33, 34, 35, 36, 37, 38, 39, 40, 41, 42, 43, 44, 45, 46, 57, 48, 49, 50, or more, up to “n” positive and/or negative GVHD predictor genes, where “n” is a natural number. Thus, by way of illustration only and without limitation, a combination could be 2 or more positive GVHD predictor genes in combination, 2 or more negative GVHD predictor genes in combination, or 2 or more positive and/or negative GVHD predictor genes in combination, the number of such combinations of positive and/or negative predictor genes being 2² for 2 genes in combination (P-P, P-N, N-P, N-N), 2³ for 3 genes in combination (P-P-P, P-P-N, P-N-P, P-N-N, N-P-P, N-P-N, N-N-P, N-N-N), 2⁴, 2⁵, or 2ⁿ for any higher order combination of “n” genes. In the context of combinations, a “predefined reference value,” for example, as used in the comparison step in accordance with the methods of the invention, also refers to a combination of expression values, and not a single expression value.

[0066] A “linear combination,” when used in reference to “combinations of” expression values, refers minimally to the difference of 2 expression values, X−Y, or the difference of the logarithm of 2 expression values, log X−log Y, or the sum of 2 expression values, X+Y, or the sum of the logarithm of 2 expression values, log X+log Y, or also combined differences and/or sums of more than 2 expression values, for which the expression value or the logarithm of the expression value of any of the genes may be multiplied by a factor, “c,” where “c” is a real number, and where the value of “c” may differ for each of the genes, and for which a constant term, “d,” can be added or subtracted to the expression value of any of the genes, where “d” is a real number, and where the value of “d” may differ for each of the genes. A “non-linear combination,” when used in reference to expression values, refers minimally to the ratio of 2 expression values, X/Y, or the ratio of the logarithm of 2 expression values, log X/log Y, or the product of 2 expression values, X*Y, or the product of the logarithm of 2 expression values, log X*log Y, or also combined ratios and/or products of more than 2 expression values, for which the expression value or the logarithm of the expression value of any of the genes may be exponentiated by an exponent, “b,” where “b” is a real number, and where the value of “b” may differ for each of the genes, and for which the expression value or the logarithm of the expression value of any of the genes may be multiplied by a factor, “c,” where “c” is a real number, and where the value of “c” may differ for each of the genes, and for which a constant term, “d,” can be added or subtracted to the expression value or the logarithm of the expression value of any of the genes, where “d” is a real number, and where the value of “d” may differ for each of the genes.

[0067] Normalization of gene expression may be performed in a straightforward manner for predictive models that involve pairs of predictor genes in competitive relationships, i.e. a ratio of gene 1 over gene 2 in a predictor gene pair (referred to herein as a ratiometric gene pair, or RGP), obviating the need for an additional reference gene (see Examples). Instead of reporting the level of a positive or negative predictor gene with respect to a separate housekeeping gene and/or reference sample, the level of predictor gene 1 with respect to predictor gene 2 (their ratio) provides a relative expression measurement ratio with high information content.

[0068] Accordingly, an expression value for positive or negative GVHD predictor genes can also be represented as a ratio, as in a ratiometric gene pair (RGP). Ratios of gene expression data can be represented in a variety of ways. In one embodiment, an expression value is represented by a ratio of gene expression, denoted a ratiometric gene pair (RGP), of the positive or negative GVHD predictor gene to one or more reference genes. In a more particular embodiment, an expression value is represented by a ratio of gene expression, denoted a ratiometric gene pair (RGP), of the positive or negative predictor GVHD gene to a reference gene, and is represented by the formula “N/D,” (numerator/denominator), where the numerator value “N” is the expression level of the positive or negative GVHD predictor gene and the denominator value “D” is the expression level of one or more reference genes. The N and D values can optionally reflect an average or median expression of one or more positive or negative GVHD predictor genes, or one or more reference genes, respectively, and optionally reflect expression in a plurality of samples. Such RGPs include combinations of positive and negative GVHD predictor genes (N-P and P-N), combinations of positive GVHD predictor genes (P-P), and combinations of negative GVHD predictor genes (N-N).

[0069] For such expression value determination, expression normalization and expression ratio determinations (e.g., RGPs), a reference gene can be a housekeeping (HSK) gene, or a positive or negative GVHD predictor gene that is different from the positive or negative predictor gene used to obtain the ratio of gene expression, or any other gene selected by the user.

[0070] In accordance with the invention, positive and negative GVHD predictor genes in which expression is measured for GVHD, whether expression of a single gene or using ratios of two (or more) genes (RGPs, pairs of gene pairs, etc.), or combinations of genes, are listed in and can be selected from Tables 1 (RNA 1538), 2A (RNA 143), 2B (RNA 192), 3, 13 (SG175), 15 (SG128), or 18 (SG64), or a polymorphism thereof. In one embodiment, at least one of the positive or negative GVHD predictor genes whose expression is measured is selected from one or more single genes (SGs) set forth in Tables 1 (RNA 1538), 2A (RNA143), 2B (RNA 192), 3, 13 (SG175), 15 (SG128) or 18 (SG64), or is selected from ratiometric gene pairs (RGPs) or single genes (SGs) set forth in Tables 1 (RNA 1538), 2A (RNA143), 2B (RNA 192), 3, 13 (SG175), 15 (SG128), or 18 (SG64). Exemplary non-limiting ratiometric gene pairs (RGPs) are set forth in and can be selected from Tables 14 (RGP348) and 17 (VmodRGP100), and exemplary non-limiting examples of multiple genes in ratios such as “pairs of gene pairs,” are set forth in and can be selected from Table 16 (“PRGP348”). Accordingly, expression of single genes, ratios of genes (e.g., RGPs) and combinations of genes, including multi-gene ratios of negative, positive and/or mixtures of negative and positive GVHD predictor genes from any of Tables 1 (RNA 1538), 2A (RNA143), 2B (RNA 192), 3, 13 (SG175), 15 (SG128), 17 (VmodRGP100) and 18 (VmodSG64), in any combination, can be undertaken to perform the invention.

[0071] In a more particular embodiment of the invention, the negative and/or positive GVHD predictor genes used to predict or determine risk that a hematopoietic cell transplant (HCT) from a candidate donor will induce or not induce graft vs. host disease (GVHD) in a HCT recipient is selected from one or more genes set forth in Table 18 (VmodSG64). In another more particular embodiment of the invention, the negative and/or positive GVHD predictor genes used to predict or determine risk that a hematopoietic cell transplant (HCT) from a candidate donor will induce or not induce graft vs. host disease (GVHD) in a HCT recipient is a plurality of ratiometric gene pairs (RGPs) of two or more genes selected from the genes listed in Tables 1 (RNA 1538), 2, 2A (RNA 143), 2B (RNA 192), 3, 13 (SG175), 15 (SG128) or 18 (SG64). In a further particular embodiment of the invention, the ratiometric gene pairs (RGPs) used to predict or determine risk that a hematopoietic cell transplant (HCT) from a candidate donor will induce or not induce graft vs. host disease (GVHD) in a HCT recipient is one or more gene pairs (RGPs) selected from the genes listed in Table 17 (VmodRGP100). In an additional particular embodiment of the invention, the negative and/or positive GVHD predictor genes include a combination of single genes (SGs) and ratiometric gene pairs (RGPs) to predict or determine risk that a hematopoietic cell transplant (HCT) from a candidate donor will induce or not induce graft vs. host disease (GVHD) in a HCT recipient is a plurality of genes selected from the single genes (SGs) listed in Table 18 (VmodSG64) and ratiometric gene pairs (RGPs) selected from the RGPs listed in Table 17 (VmodRGP100).

[0072] In accordance with the invention, where a plurality of positive and/or negative GVHD predictor genes are measured or analyzed for expression, typically there will be a threshold (e.g., minimum) number of genes, or expression levels or amounts or types of genes evaluated, in order to predict or determine that the candidate donor HCT is at high risk or at low risk to induce graft vs. host disease (GVHD) in a HCT recipient. Evaluation refers to analysis based upon one or more criteria including, but not limited to, gene expression greater or less than a threshold expression level, or the number of positive and/or negative GVHD predictor genes above or below a threshold, which can be set by the user, or the GVHD predictive direction of particular genes whose expression tends to have a high correlation with GVHD outcome. All of such criteria, which can be set by the user, can be based upon the desired degree of confidence or accuracy. By way of a non-limiting example, the number of single genes (SGs), gene expression ratios (e.g., RGPs) or multi-gene ratios (e.g., PRGPs, such as Table 16) measured or analyzed for expression is 2, 3, 4, 5, 6, 7, 8, 9, 10, 11, 12, 13, 14, 15, 16, 17, 18, 19, 20, 21, 22, 23, 24, 25, 26, 27, 28, 29, 30, 31, 32, 33, 34, 35, 36, 37, 38, 39, 40, 41, 42, 43, 44, 45, 46, 57, 48, 49, 50, or more genes and/or gene expression ratios.

[0073] The number of genes or expression levels, or linear or non-linear combination of expression values, could be represented by a percent of the total number of genes whose expression is measured, for example, at least 30%, 40%, 50%, 60%, 70%, 80% or more of the total number of positive and/or negative predictor genes. Thus, if expression of a total of 10 predictor genes are measured, a threshold could be 3, 4, 5, 6, 7, 8 or more of the genes must indicate a low or high risk of HCT inducing GVHD in order to predict or determine that the HCT is at low or high risk of inducing GVHD. In particular embodiments, a majority of the positive or negative GVHD predictor genes must indicate a high risk of inducing graft vs. host disease (GVHD) in a HCT recipient to predict or determine that the candidate donor HCT is at high risk to induce graft vs. host disease (GVHD) in a HCT recipient; or a majority of the positive or negative GVHD predictor genes must indicate a low risk of inducing graft vs. host disease (GVHD) in a HCT recipient to predict or determine that the candidate donor HCT is at low risk to induce graft vs. host disease (GVHD) in a HCT recipient. In particular embodiments, when the number of positive or negative GVHD predictor genes, or the combination of positive and/or negative GVHD predictor genes, indicating that the HCT from the candidate donor is at higher risk of inducing GVHD is greater than the number of positive or negative predictor genes, or the combination of positive and/or negative GVHD predictor genes indicating that the HCT from the candidate donor is at lower risk of inducing GVHD in a HCT recipient, this predicts or determines a higher risk of the HCT of a candidate donor to induce GVHD in an HCT recipient. In more particular embodiments, when the number of positive or negative GVHD predictor genes, or the combination of positive and/or negative GVHD predictor genes, indicating that the HCT from the candidate donor is at lower risk of inducing GVHD is greater than the number of positive or negative predictor genes, or the combination of positive and/or negative GVHD predictor genes, indicating that the HCT from the candidate donor is at higher risk of inducing GVHD in a HCT recipient, predicts or determines a lower risk of the HCT from a candidate donor to induce GVHD in an HCT recipient.

[0074] In further particular embodiments, at least 66% of the positive or negative predictor genes must indicate a high risk of inducing graft vs. host disease (GVHD) in a HCT recipient to predict or determine that the candidate donor HCT is at high risk to induce graft vs. host disease (GVHD) in a HCT recipient; or at least 66% of the positive or negative predictor genes must indicate a low risk of inducing graft vs. host disease (GVHD) in a HCT recipient to predict or determine that the candidate donor HCT is at low risk to induce graft vs. host disease (GVHD) in a HCT recipient. In an additional particular embodiment, at least 75% of the positive or negative predictor genes must indicate a low risk of inducing graft vs. host disease (GVHD) in a HCT recipient to predict or determine that the candidate donor HCT is at low risk to induce graft vs. host disease (GVHD) in a HCT recipient.

[0075] By way of illustration only, one non-limiting model for ascertaining the risk of GVHD in a recipient is to assign each positive and/or negative GVHD predictor gene whose expression is analyzed a “vote” for purposes of ascertaining risk of inducing or not inducing GVHD. The votes are tabulated depending upon whether the expression values, or combinations of expression values, obtained from each gene measured indicates an increased or reduced risk of GVHD. For example, if expression of a total of 10 positive and/or negative predictor genes is measured, a majority (i.e., 6 of the 10) might indicate a reduced risk, and 4 out of 10 might indicate an increased risk of GVHD. Thus, 6 genes would vote reduced risk of GVHD, and 4 genes would vote increased risk of GVHD. Depending upon the genes and their ability to accurately predict risk of GVHD or not, a majority of votes for such a 10 gene voting model may be sufficient to conclude a reduced risk of inducing GVHD. If greater confidence in predictive accuracy is desired, the threshold number of gene “votes” required to predict a particular GVHD outcome, can be increased, for example, from 6 to 7 out of 10 genes, or from 6 to 8 out of 10 genes, or greater.

[0076] In accordance with the invention, one exemplary model is to assign a “vote” to each gene whose expression is measured, and depending upon the expression value obtained from each gene assign a vote, and based upon the sum total of votes, risk of inducing or not inducing GVHD is determined or predicted. In one embodiment, a plurality of expression values for negative or positive GVHD predictor genes is determined, and a vote is assigned to each negative or positive predictor gene according to whether the expression value for the gene indicates the risk of the candidate or actual donor to induce or not to induce GVHD. Subsequently, a score is assigned to the candidate or actual donor based upon the total number of votes indicative or not indicative of inducing or not inducing GVHD in a HCT recipient. In particular aspects, if more than 50% of the votes are indicative of inducing GVHD, then the score reflects an increased risk of the hematopoietic cell transplant (HCT) from the candidate or actual donor to induce GVHD in a HCT recipient; or if more than 50% of the votes are indicative of not inducing GVHD, then the score reflects a decreased risk of the hematopoietic cell transplant (HCT) from the candidate or actual donor to induce GVHD in a HCT recipient. In additional aspects, when at least 55%, 60%, 65%, 70%, 75%, 80%, 85%, 90%, 95%, or more of the votes are indicative of inducing GVHD, then the score reflects a increased risk of the hematopoietic cell transplant (HCT) from the candidate or actual donor to induce GVHD in a HCT recipient; or wherein when at least 55%, 60%, 65%, 70%, 75%, 80%, 85%, 90%, 95%, or more of the votes are indicative of not inducing GVHD, then the score reflects a decreased risk of the hematopoietic cell transplant (HCT) from the candidate or actual donor to induce GVHD in a HCT recipient.

[0077] Numerous non-limiting, representative voting models (Vmods) that predict or determine risk of inducing and not inducing GVHD, are disclosed herein. Such non-limiting examples of voting models include the combination of single genes (SGs) and ratiometric gene pairs (RGPs) set forth in: SG43RGP46-GPperformance; SG42RGP21-GPminimalist; SG43RGP37-GPconnectivity; SG43RGP51-PRGPminranksort; SG43RGP55-PRGPmedranksort; SG43RGP36-RGPgreedysearch; or SG21RGP28-RGPmaxgreedysearch, each of which combinations include the SGs and RGPs. The SGs and RGPs that are comprised in each of the voting models (Vmods) and whose expression is measured is indicated by an “x” in Tables 17 and 18.

[0078] Methods of the invention are typically superior to identifying GVHD negative donor HCT based upon having 10 out of 10 HLA marker loci matches of the HCT donor to a HCT recipient. In particular embodiments, a method predicts a donor HCT that induces or does not induce GVHD in a HCT recipient with an accuracy of at least 60%, at least 70%, at least 80%, or at least 90%. In another particular embodiment, the accuracy of predicting a GVHD negative donor is the probability or degree of risk of correctly identifying a GVHD negative donor within a group of candidate HCT donors classified as negative by 10 out of 10 HLA marker loci matches with an HCT recipient.

[0079] As used herein, the term “measuring” or “analyzing” in the context of determining expression or quantifying amounts of gene expression can refer to absolute or to relative quantification. In the context of gene expression, measuring refers to a laboratory procedure involving one or more isolating, purifying, processing, manipulating, extracting, or determining steps practiced with a sample or specimen, such as CD4+ T cells or CD8+ T cells, the amount of expression of one or more genes, which is distinct from any mental steps. Absolute quantification may be accomplished by inclusion of a known concentration(s) of one or more target nucleic acids or expression products and referencing the hybridization or binding intensity of unknowns to the known target nucleic acids or expression products (e.g., through generation of a standard curve). Alternatively, relative quantification can be accomplished by comparing signals between two or more genes, or between two or more samples to quantify the changes in signal and, by implication, transcript or expression product and therefore gene expression amounts.

[0080] Comparing can be carried out by visual inspection, or by using a computer algorithm. Examples of algorithms include linear or nonlinear regression algorithms; linear or nonlinear classification algorithms; ANOVA (analysis of variance); computational neural network algorithms; computational genetic algorithms; support vector machines algorithms; hierarchical analysis or clustering algorithms; hierarchical algorithms using decision trees; kernel based machine algorithms; table look-up algorithms; discriminatory algorithms such as partial least squares algorithms, matching pursuit algorithms, Fisher discriminate analysis algorithms, principal components analysis algorithms, singular value decomposition algorithms; Bayesian probability function algorithms; Markov Blanket algorithms; hidden Markov algorithms; deterministic optimization algorithms; stochastic search optimization or simulated annealing algorithms; recursive feature elimination or entropy-based recursive feature elimination algorithms; algorithms arranged in combination; plurality of algorithms arranged in a committee network; and forward floating search or backward floating search algorithms. Further methods to obtain values for determining or predictive GVHD outcome using one or more single genes or ratiometric gene pairs (RGPs, pairs of gene pairs (PRGPs), etc., as set forth herein are described in Example 20.

[0081] Candidate and actual HCT donors and HCT recipients include animals, typically mammalian animals (mammals), such as humans. Humans include, but are not limited to, family members genetically related to a candidate HCT recipient. Humans also include non-family members which are non-genetically related to a candidate HCT recipient, including non-familial actual or candidate HCT donors having HLA matches with a candidate HCT recipient. More specifically, an actual or a candidate HCT donor and a HCT recipient have 10 out of 10 or 9 out of 10 human leukocyte antigen (HLA) marker loci matches, for example, HLA marker loci matches of: HLA-A, HLA-B, HLA-C, HLA-DRB1 and HLA-DQB1 loci, or any combination of 4 of HLA-A, HLA-B, HLA-C, HLA-DRB1 or HLA-DQB1 loci matches. Such HLA marker loci matches may have been determined either serologically or by sequence analysis of HLA genes. Animals appropriate for analysis include those that may be a HCT donor for an HCT recipient of another animal, for example, an animal model of HCT GVHD.

[0082] For purposes of defining an actual or a candidate donor HCT that induces GVHD, as set forth herein if an HCT recipient manifests symptoms of GVHD following transplantation from the donor, the donor HCT is considered to induce GVHD. For purposes of defining an actual or a candidate donor HCT that does not induce GVHD, as set forth herein if an HCT recipient does not manifest symptoms of GVHD following transplantation from the donor, the donor HCT is considered to not induce GVHD. Occassionally, a candidate or actual donor HCT may be defined as a donor HCT that does not induce GVHD, for cases in which the recipient manifests only the least serious form of acute GVHD, i.e., acute grade I GVHD, and no other forms of acute or chronic GVHD at any time after HCT, following transplantation from the donor.

[0083] GVHD can be classified or grouped according to symptom severity and duration, and is classified herein to be within Groups 1-6, which generally reflect differences in severity. Exemplary classes begin with Group 1, which exhibits neither acute nor chronic GVHD, and ends with Group 6, showing severe acute grade 3 or 4 GVHD and extensive chronic GVHD. Group 5 also shows grade 3 or 4 GVHD, but no chronic GVHD. Group 4 and Group 3 show grade 1 or 2 acute GVHD, with and without chronic GVHD, respectively. Group 2 shows only chronic GVHD and no acute GVHD. Acute grade 3 or 4 GVHD characterize the most intense and life-threatening form of GVHD, while acute grade 1 or 2 GVHD is much less severe and occasionally may be considered mild. The grade classifications of acute GVHD are multi-symptom diagnostic gradations of well-established in medical practice for physician grading of GVHD severity. Although the definitions of the Groups are per se, they are medically meaningful GVHD-severity groups. Other classifications are possible. For example, the terms acute GVHD, chronic GVHD, grades 0-4 are established, accepted, medically defined terms; whereas Groups 1-6 are terms defined herein.

[0084] Methods of the invention further include assigning an actual or a candidate HCT donor a score, or identifying an actual or a candidate HCT donor. Such a score or identification can be based upon the HCT donor gene expression profile, expression value(s) for the positive and/or negative predictor gene(s) of the HCT donor, or the totality of information for a candidate HCT donor, such as also including the HLA marker loci profile. The score or identification can reflect the probability or degree of risk of the actual or candidate donor HCT to induce or to not induce graft vs. host disease (GVHD) in a HCT recipient, based upon risk prediction or determination. The score or identification can also reflect a class or group of GVHD predicted or determined to occur, which can indicate GVHD outcome or severity (e.g., as defined by Groups 1-6 as set forth herein, or as defined by acute grades I, II, III or IV GVHD, with or without chronic GVHD, or chronic GVHD without acute GVHD).

[0085] As set forth herein, the invention is exemplified by analysis of expression levels of genes, including negative and/or positive GVHD predictor genes, as well as reference genes (e.g., HSK genes), in CD4+ T cells. Methods of the invention can also employ other types of T cells. For example, methods of the invention can ascertain expression levels of negative and/or positive GVHD predictor genes, as well as reference genes (e.g., HSK genes), in CD8+ T cells. Accordingly, the invention can be practiced with various T cells, including but not limited to, CD4+ T cells, CD8+ T cells, T-regulatory cells, and mixtures of these and other T cell sub-types.

[0086] Biological samples include any sample capable of having a biological material. Biological samples include any biological material that includes cellular material from a candidate HCT donor. Typically, such samples include immunological cells, for example, CD4+ T cells and/or CD8+ T cells. Biological samples therefore include a biological material or fluid or any material that includes nucleic acid, such as DNA, RNA or polypeptide (protein) suitable for measurement or analysis of expression of one or more positive and/or negative predictor genes from a candidate HCT donor, for GVHD outcome prediction or determination. A biological sample therefore need only be suitable for measuring or analyzing expression of one or more positive and/or negative predictor genes, and that includes nucleic acid and/or protein that correlates with a GVHD outcome. Typically, biological samples include CD4+ T cells, CD8+ T cells or cellular material. Non-limiting examples include blood, blood cells (e.g., peripheral blood mononuclear cells), serum, plasma, bone marrow, mucus, saliva, feces, cerebrospinal fluid, or urine.

[0087] A biological sample can be transformed, processed or manipulated, for example, to determine the presence of, or measure or analyze gene expression or expression product amounts or levels or function. Typically, a biological sample is transformed or processed to purify or isolate a nucleic acid (e.g., total, or mRNA) or a gene expression product (e.g., a protein or fragment) that directly or indirectly indicates expression and/or amounts or levels of one or more positive and/or negative GVHD predictor genes. Thus, samples also include nucleic acid and protein purified, isolated, derived from, extracted from, or obtained from CD4+ T cells or CD8+ T cells from a candidate HCT donor.

[0088] Negative and/or positive GVHD predictor gene expression levels may be determined by measuring mRNA (or a cDNA reverse transcribed from the mRNA) from a sample comprising CD4+ T cells or CD8+ T cells from a candidate HCT donor. A negative or positive GVHD predictor gene may be capable of encoding a protein. Accordingly, gene expression levels may be determined by measuring an expression product, such as a polypeptide or protein. Expression of transcripts and/or proteins encoded by negative and/or positive predictor genes set forth in Tables 1 (RNA 1538, SEQ ID NOs:1-1546), 2, 2A (RNA143), 2B (RNA192), 3, 13 (SG175), 15 (SG128), or 18 (SG64) may be measured and/or analyzed by any of a variety of methods known to one of skill in the art.

[0089] Suitable nucleic acid samples for detection, measuring or analysis include transcripts of interest (i.e., transcripts, such as RNA, preprocessed RNA, or mRNA derived from positive and/or negative predictor genes of HCT inducing GVHD in a HCT recipient). Thus, when measuring or analyzing RNA expression (e.g., mRNA), such RNA can be measured directly.

[0090] Suitable nucleic acid samples for screening also include nucleic acids derived from a transcript of interest (e.g., such as cDNA from the mRNA derived from positive and/or negative predictor gene). A nucleic acid derived from a transcript refers to a nucleic acid for whose synthesis an mRNA transcript or a subsequence thereof (ultimately) served as a template. Examples of such nucleic acids include cDNA reverse transcribed from a transcript, an RNA transcribed from that cDNA, a DNA amplified from the cDNA, an RNA transcribed from the amplified DNA, etc.—all derived from the transcript, and measurement of such derived products is indicative of the presence and/or amount of positive and/or negative gene expression. For example, RNA of a positive or negative predictor gene can be reverse transcribed into cDNA (complementary DNA), which can then be measured, since the amount of cDNA correlates with the amount of RNA expressed.

[0091] In general, nucleic acid (e.g., DNA or RNA) in a sample can be detected by any suitable method or technique of measuring or detecting a gene sequence or expression or amount. Non-limiting exemplary methods of measuring gene (e.g., nucleic acid expression) include, but are not limited to, polymerase chain reaction (PCR), reverse transcriptase-PCR (RT-PCR), in situ PCR, quantitative PCR (q-PCR), in situ hybridization, Southern blot, Northern blot, sequence analysis, microarray analysis, detection of a reporter gene, or other nucleic acid hybridization platform. For measuring RNA expression, methods include, but are not limited to: extraction of cellular mRNA and Northern blotting using labeled probes that hybridize to transcripts of all or part of one or more of the negative and/or positive predictor genes set forth herein; amplification of mRNA expressed from one or more of the negative and/or positive predictor genes using specific primers, polymerase chain reaction (PCR), quantitative PCR (q-PCR), and reverse transcriptase-polymerase chain reaction (RT-PCR), followed by quantitative detection of the product; and extraction of total RNA from cells, which is then processed (e.g. reverse transcribed or amplified), labeled and used to probe cDNAs or oligonucleotides encoding all or part of the negative and/or positive predictor genes; and in situ hybridization. Primers for RT-PCR corresponding to the positive and negative GVHD predictor genes, and the housekeeping genes, are listed, for example, in Table 2B (RNA 192), and are specified according to commercially available ABI Assay ID numbers. Other primers and probes can be derived from or based upon gene sequences listed in Tables 1 (RNA 1538, SEQ ID NOs:1-1546), 2, 2A (RNA143), 2B (RNA192), 3, 13 (SG175), 15 (SG128), and 18 (SG64).

[0092] Methods of isolating RNA, such as total or mRNA, are known to those of skill in the art. Non-limiting examples include, for example, acid guanidinium-phenol-chloroform extraction to obtain total nucleic acid from a biological sample, and isolating mRNA by oligo dT column chromatography or by using (dT)n magnetic beads (see, e.g., Sambrook et al., Molecular Cloning: A Laboratory Manual (2nd ed.), Vols. 1-3, Cold Spring Harbor Laboratory, (1989), or Current Protocols in Molecular Biology, F. Ausubel et al., ad. Greene Publishing and Wiley-Interscience, New York (1987)).

[0093] In embodiments in which nucleic acid is amplified, whatever amplification method is used, if a result that reflects gene expression amounts or levels is desired, a method is used that maintains or controls for the relative frequencies of the amplified nucleic acids to achieve quantitative amplification. Various methods of “quantitative” amplification are known to those skilled in the art. For example, quantitative PCR involves simultaneously co-amplifying a known quantity of a control sequence using the same primers. This provides an internal standard that may be used to calibrate the PCR reaction. Thus, primers and/or probes specific to the internal standard can be used for quantification of the amplified nucleic acid. Other suitable amplification methods include, but are not limited to polymerase chain reaction (PCR; Innis, et al., PCR Protocols. A Guide to Methods and Application. Academic Press, Inc. San Diego, (1990)), ligase chain reaction (LCR; Wu and Wallace, Genomics, 4:560; Landegren et al., Science, 241: 1077; and Barringer, et al., Gene, 89:117)), transcription amplification (Kwoh et al., Proc. Natl. Acad. Sci. USA, 86:1173), and self-sustained sequence replication (Guatelli et al., Proc. Nat. Acad. Sci. USA, 87:1874).

[0094] Accordingly, gene expression levels may in general be measured or analyzed by detecting RNA, such as mRNA from cells (or cDNA thereof) and/or detecting gene expression products, such as a polypeptide or protein. Expression of the transcripts and/or proteins encoded by the positive and/or negative predictor genes described herein Tables 1 (RNA 1538, SEQ ID NOs:1-1546), 2, 2A (RNA143), 2B (RNA192), 3, 13 (SG175), 15 (SG128), and 18 (SG64) may be measured by any of a variety of known methods in the art. Analytes according to the invention therefore include nucleic acid sequences.

[0095] As used herein, the terms “nucleic acid” and “polynucleotide” and the like refer to at least two or more ribo- or deoxy-ribonucleic acid bases (nucleotides) that are linked through a phosphoester bond or equivalent covalent bond. Nucleic acids include polynucleotides and polynucleosides. Nucleic acids include single, double or triplex stranded, circular or linear, molecules. Nucleic acids include sense and anti-sense sequences, for example, sense and anti-sense sequences that bind to all or a portion of any sequence in Tables 1 (RNA 1538), 2, 2A, 2B (RNA 192) and/or 3, or a complementary sequence thereof of any sequence in Tables 1 (RNA 1538), 2, 2A, 2B (RNA 192) and/or 3. Exemplary nucleic acids include but are not limited to: total RNA, mRNA, DNA, cDNA, genomic nucleic acid, naturally occurring and non naturally occurring nucleic acid, e.g., synthetic nucleic acid.

[0096] Nucleic acids can be of various lengths. Nucleic acid lengths typically range from about 10 nucleotides to 20 Kb, or any numerical value or range within or encompassing such lengths, e.g., 10 nucleotides to 250 Kb, 1 to 15 Kb or less, 1000 to about 5000 nucleotides or less, 500-1000 nucleotides in length. Nucleic acids can also be shorter, for example, 100 to about 500 nucleotides, or from about 10 to 25, 25 to 50, 50 to 100, 100 to 250, or about 250 to 500 nucleotides in length, or any numerical value or range or value within or encompassing such lengths. In particular aspects, a nucleic acid sequence has a length from about 5-10, 10-20, 20-30, 30-40, 40-50, 50-60, 60-70, 70-80, 80-90, 90-100, 100-150, 150-200, 200-250, 250-300, 300-400, 400-500, 500-1000, 1000-2000, nucleotides, or any numerical value or range within or encompassing such lengths. Shorter polynucleotides are commonly referred to as “oligonucleotides” or “probes” or “primers” of single- or double-stranded DNA, typically a length from about 10-20, 20-30, 30-50, 50-100 nucleotides. However, there is no upper limit to the length of such oligonucleotides.

[0097] Nucleic acids include, for example, polynucleotides and oligonucleotides (primers and probes) that hybridize to a negative and/or positive predictor gene sequence (or a transcript, RNA or cDNA thereof), for example, to all or a portion of any sequence in Tables 1 (RNA 1538, SEQ ID NOs:1-1546), 2, 2A (RNA143), 2B (RNA192), 3, 13 (SG175), 15 (SG128), or 18 (SG64), or a sequence complementary to all or a portion of any sequence in Tables 1 (RNA 1538, SEQ ID NOs:1-1546), 2, 2A (RNA143), 2B (RNA192), 3, 13 (SG175), 15 (SG128), and 18 (SG64). Such hybridizing nucleic acids allow detection of a target sequence, transcript, or a complementary or amplified sequence, and can be used in the methods of the invention for predicting or determining the risk of HCT to induce or to not induce GVHD in a HCT recipient, as well as in the kits and arrays of the invention.

[0098] In order to detect or measure expression of a negative and/or positive predictor gene, a nucleic acid (e.g., oligo- or poly nucleotide probe or primer) can “hybridize” to all or a portion of the corresponding negative and/or positive predictor gene sequence (or an RNA transcript or cDNA thereof) or complementary sequence, i.e., to all or a portion of any sequence in Tables 1 (RNA 1538, SEQ ID NOs:1-1546), 2, 2A (RNA143), 2B (RNA192), 3, 13 (SG175), 15 (SG128), or 18 (SG64), or a sequence complementary to all or a portion of any sequence in Tables 1 (RNA 1538, SEQ ID NOs:1-1546), 2, 2A (RNA143), 2B (RNA192), 3, 13 (SG175), 15 (SG128), or 18 (SG64), which refers to the binding between two or more nucleic acid sequences. Sequences “sufficiently complementary” allow stable hybridization of a nucleic acid sequence to a target sequence (a negative and/or positive predictor gene sequence, or a transcript, RNA or cDNA thereof, for example, all or a portion of any sequence in Tables 1 (RNA 1538, SEQ ID NOs:1-1546), 2, 2A (RNA143), 2B (RNA192), 3, 13 (SG175), 15 (SG128), and 18 (SG64), or a sequence complementary to all or a portion of any sequence in Tables 1 (RNA 1538, SEQ ID NOs:1-1546), 2, 2A (RNA143), 2B (RNA192), 3, 13 (SG175), 15 (SG128), and 18 (SG64), and therefore detection even if the two sequences are not completely complementary. Detection may either be direct (i.e., resulting from a probe hybridizing directly to a sequence) or indirect (i.e., resulting from a probe hybridizing to an intermediate molecular structure that links the probe to the target sequence).

[0099] Hybridizing sequences will generally be more than about 50% complementary to all or a portion of any sequence in Tables 1 (RNA 1538, SEQ ID NOs:1-1546), 2, 2A (RNA143), 2B (RNA192), 3, 13 (SG175), 15 (SG128), or 18 (SG64), or a sequence complementary to all or a portion of any sequence in Tables 1 (RNA 1538, SEQ ID NOs:1-1546), 2, 2A (RNA143), 2B (RNA192), 3, 13 (SG175), 15 (SG128), or 18 (SG64). Typically, hybridizing sequences are 60%, 70%, 80%, 85%, 90%, or 95% complementary, or more to all or a portion of any sequence in Tables 1 (RNA 1538, SEQ ID NOs:1-1546), 2, 2A (RNA143), 2B (RNA192), 3, 13 (SG175), 15 (SG128), or 18 (SG64), or a sequence complementary to all or a portion of any sequence in Tables 1 (RNA 1538, SEQ ID NOs:1-1546), 2, 2A (RNA143), 2B (RNA192), 3, 13 (SG175), 15 (SG128), or 18 (SG64). The hybridization region between hybridizing sequences typically is at least about 5-10, 10-15 nucleotides, 15-20 nucleotides, 20-30 nucleotides, 30-50 nucleotides, 50-75 nucleotides, 75-100 nucleotides, 100-200 nucleotides, 300-400 nucleotides, 400-500 nucleotides or more, or any numerical value or range within or encompassing such lengths.

[0100] Hybridization between complementary regions of two strands of nucleic acid to form a duplex molecule will vary depending upon the nature of the hybridization method and the composition and length of the hybridizing nucleic acid sequences. Generally, temperature of hybridization and the ionic strength (such as the Na+ concentration) of the hybridization buffer will determine the stringency of hybridization (hybridization conditions for attaining particular degrees of stringency are discussed in Sambrook et al., (1989) Molecular Cloning, second edition, Cold Spring Harbor Laboratory, Plainview, N.Y.).

[0101] The following are exemplary non-limiting hybridization conditions: Very High Stringency (Detects Sequences that Share 90% Identity)—Hybridization: 5×SSC at 65° C. for 16 hours, Wash twice in 2×SSC at room temperature (RT) for 15 minutes each, Wash twice in 0.5×SSC at 65° C. for 20 minutes each.

High Stringency (Detects Sequences that Share 80% Identity or Greater)—Hybridization: 5-6×SSC at 65° C.-70° C. for 16-20 hours, Wash twice in 2×SSC at RT for 5-20 minutes each, Wash twice: 1×SSC at 55° C.-70° C. for 30 minutes each.
Low Stringency (Detects Sequences that Share Greater than 50% Identity)—Hybridization: 6×SSC at room temp. to 55° C. for 16-20 hours, Wash at least twice in 2-3×SSC at room temp. to 55° C. for 20-30 minutes each.

[0102] Accordingly, in various embodiments, polynucleotides and oligonucleotides (primers and probes) for hybridization include (e.g., contact) an oligo- or poly-nucleotide probe to an RNA transcript produced from a positive or negative predictor gene, or a polymorphism thereof, or hybridization of an oligo- or poly-nucleotide probe to a cDNA derived from the RNA transcript of a positive or negative predictor gene, or a polymorphism thereof. In a particular embodiment, polynucleotides and oligonucleotides (primers and probes) for hybridization include (e.g., contact) an oligo- or poly-nucleotide probe that binds to a positive or negative GVHD predictor gene sequence or a fragment thereof (e.g., to all or a portion of gene set forth in Tables 1 (RNA 1538, SEQ ID NOs:1-1546), 2, 2A (RNA143), 2B (RNA192), 3, 13 (SG175), 15 (SG128), or 18 (SG64), or a sequence complementary to all or a portion of any sequence in Tables 1 (RNA 1538, SEQ ID NOs:1-1546), 2, 2A (RNA143), 2B (RNA192), 3, 13 (SG175), 15 (SG128), or 18 (SG64). Such sequences therefore include fragments of the sequences in Tables 1 (RNA 1538, SEQ ID NOs:1-1546), 2, 2A (RNA143), 2B (RNA192), 3, 13 (SG175), 15 (SG128), and 18 (SG64), and sequences that are 50%, 60%, 70%, 80%, 85%, 90%, or 95% identical to all or a portion of any of the sequences in Tables 1 (RNA 1538, SEQ ID NOs:1-1546), 2, 2A (RNA143), 2B (RNA192), 3, 13 (SG175), 15 (SG128), and 18 (SG64), or a sequence complementary to all or a portion of any sequence in Tables 1 (RNA 1538, SEQ ID NOs:1-1546), 2, 2A (RNA143), 2B (RNA192), 3, 13 (SG175), 15 (SG128), or 18 (SG64).

[0103] A plurality of polynucleotides can be used in the invention methods, arrays and kits. Multiple polynucleotides (e.g., probes or primer pairs) can be used to detect, measure or analyze expression of a positive and/or negative predictor gene (e.g., any of the sequences in Tables 1 (RNA 1538, SEQ ID NOs:1-1546), 2, 2A (RNA143), 2B (RNA192), 3, 13 (SG175), 15 (SG128), and 18 (SG64), or a polymorphism thereof.

[0104] The term “complementary” or “antisense” refers to a polynucleotide or peptide nucleic acid (PNA) capable of binding to a specific DNA or RNA sequence, e.g, to all or a portion of any sequence in Tables 1 (RNA 1538, SEQ ID NOs:1-1546), 2, 2A (RNA143), 2B (RNA192), 3, 13 (SG175), 15 (SG128), and 18 (SG64), or a sequence complementary to all or a portion of any sequence in Tables 1 (RNA 1538, SEQ ID NOs:1-1546), 2, 2A (RNA143), 2B (RNA192), 3, 13 (SG175), 15 (SG128), and 18 (SG64) Antisense includes single, double, triple or greater stranded RNA and DNA polynucleotides and peptide nucleic acids (PNAs) that bind RNA transcript or DNA. Particular examples include RNA and DNA antisense that binds to sense RNA. For example, a single stranded nucleic acid can target a transcript of a negative and/or positive predictor gene. Antisense/Sense molecules are typically 100% complementary to the sense/anti-sense strand but can be “partially” complementary, in which only some of the nucleotides bind to the sense/anti-sense molecule (less than 100% complementary, e.g., 95%, 90%, 80%, 70% and sometimes less), or any numerical value or range within or encompassing such percent values.

[0105] Polynucleotides useful as primers and probes in invention methods, arrays and kits are typically a portion/fragment of a gene (sense or anti-sense) suitable for use as a hybridization probe or primer for the identification, detection, measurement or analysis of a gene (or portion/fragment thereof) in a given sample (e.g., a sample comprising CD4+ T cells or CD8+ T cells). Typically, primers are oppositely oriented, (i.e., one primer positioned 5′, and a second primer positioned 3′) such that they can hybridize to and amplify the nucleic acid sequence (e.g., via PCR).

[0106] Accordingly, in another embodiment, measuring includes hybridization of a primer pair (oppositely oriented) and subsequent amplification of a cDNA derived from the RNA transcript of the positive or negative GVHD predictor gene produced of the positive or negative predictor genes, or a polymorphism thereof (e.g., a gene set forth in any of Tables 1 (RNA 1538, SEQ ID NOs:1-1546), 2, 2A (RNA143), 2B (RNA192), 3, 13 (SG175), 15 (SG128), and 18 (SG64)). In a further embodiment, measuring includes reverse transcription of RNA transcript (e.g., using a primer pair, oppositely oriented) to produce cDNA to determine expression levels of one or more positive or negative GVHD predictor genes (e.g., a gene set forth in any of Tables 1 (RNA 1538, SEQ ID NOs:1-1546), 2, 2A (RNA143), 2B (RNA192), 3, 13 (SG175), 15 (SG128), and 18 (SG64)).

[0107] Nucleic acid sequences can include nucleotide and nucleoside substitutions, additions and deletions, derivatized forms and fusion/chimeric sequences (e.g., encoding recombinant polypeptide), as well as variants thereof (e.g., substitutions, additions insertions and deletions). Particular examples of such variants include polymorphisms and fragments of any sequence in Tables 1 (RNA 1538, SEQ ID NOs:1-1546), 2, 2A (RNA143), 2B (RNA192), 3, 13 (SG175), 15 (SG128), and 18 (SG64), or a sequence complementary to any sequence in Tables 1 (RNA 1538, SEQ ID NOs:1-1546), 2, 2A (RNA143), 2B (RNA192), 3, 13 (SG175), 15 (SG128), and 18 (SG64).

[0108] The term “identity” and grammatical variations thereof mean that two or more referenced entities are the same. Thus, where two sequences are identical, they have the same amino acid sequence. “Areas, regions or domains of identity” mean that a portion of two or more referenced entities are the same. Thus, where two sequences are identical or homologous over one or more sequence regions, they share identity in these regions.

[0109] The degree of “identity” and “homology” can be determined by comparing each position in the sequences. A degree of identity or homology is a function of the number of identical or matching positions (e.g., matching nucleotides or amino acid residues) at positions shared by the sequences. Specific examples of “identity” and “homology” include (e.g., 1-3, 3-5, 5-10, 10-20, 20-30, or more) residues of the sequences. A sequence can have 50%, 60%, 70%, 75%, 80%, 85%, 90%, 95%, 96%, 97%, 98%, 99%, or more identity or homology to a reference sequence, to all or a portion of any sequence in Tables 1 (RNA 1538, SEQ ID NOs:1-1546), 2, 2A (RNA143), 2B (RNA192), 3, 13 (SG175), 15 (SG128), and 18 (SG64), or a sequence complementary to all or a portion of any sequence in Tables 1 (RNA 1538, SEQ ID NOs:1-1546), 2, 2A (RNA143), 2B (RNA192), 3, 13 (SG175), 15 (SG128), and 18 (SG64). As used herein, a given percentage of identity or homology between sequences denotes the degree of sequence identity in optimally aligned sequences.

[0110] The extent of identity between two sequences can be ascertained using a computer program and mathematical algorithm. Such algorithms that calculate percent sequence identity (homology) generally account for sequence gaps and mismatches over the comparison region. For example, a BLAST (e.g., BLAST 2.0) search algorithm (see, e.g., Altschul et al., J. Mol. Biol. 215:403 (1990), publicly available through the National Center for Biotechnology Information, NCBI) has exemplary search parameters as follows: Mismatch-2; gap open 5; gap extension 2. The BLAST algorithm involves first identifying high scoring sequence pairs (HSPs) by identifying short words of length W in the query sequence that either match or satisfy some positive-valued threshold score T when aligned with a word of the same length in a database sequence. T is referred to as the neighborhood word score threshold. Initial neighborhood word hits act as seeds for initiating searches to find longer HSPs. The word hits are extended in both directions along each sequence for as far as the cumulative alignment score can be increased. Extension of the word hits in each direction is halted when the following parameters are met: the cumulative alignment score falls off by the quantity X from its maximum achieved value; the cumulative score goes to zero or below, due to the accumulation of one or more negative-scoring residue alignments; or the end of either sequence is reached. The BLAST algorithm parameters W, T and X determine the sensitivity and speed of the alignment. The BLAST program may use as defaults a word length (W) of 11, the BLOSUM62 scoring matrix (Henikoff and Henikoff, 1992, Proc. Natl. Acad. Sci. USA 89: 10915-10919) alignments (B) of 50, expectation (E) of 10 (or 1 or 0.1 or 0.01 or 0.001 or 0.0001), M=5, N=4, and a comparison of both strands. One measure of the statistical similarity between two sequences using the BLAST algorithm is the smallest sum probability (P(N)), which provides an indication of the probability by which a match between two nucleotide or amino acid sequences would occur by chance.

[0111] For polypeptide sequence comparisons, a BLASTP algorithm is typically used in combination with a scoring matrix, such as PAM100, PAM 250, BLOSUM 62 or BLOSUM 50. FASTA (e.g., FASTA2 and FASTA3) and SSEARCH sequence comparison programs are also used to quantitate the extent of identity (Pearson et al., Proc. Natl. Acad. Sci. USA 85:2444 (1988); Pearson, Methods Mol Biol. 132:185 (2000); and Smith et al., J. Mol. Biol. 147:195 (1981)). Programs for quantitating protein structural similarity using Delaunay-based topological mapping have also been developed (Bostick et al., Biochem Biophys Res Commun. 304:320 (2003)).

[0112] Nucleic acids can be produced using various standard cloning and chemical synthesis techniques. Techniques include, but are not limited to nucleic acid amplification, e.g., polymerase chain reaction (PCR), with genomic DNA or cDNA targets using primers (e.g., a degenerate primer mixture) capable of annealing to antibody encoding sequence. Nucleic acids can also be produced by chemical synthesis (e.g., solid phase phosphoramidite synthesis) or transcription from a gene. The sequences produced can then be translated in vitro, or cloned into a plasmid and propagated and then expressed in a cell (e.g., a host cell such as eukaryote or mammalian cell, yeast or bacteria, in an animal or in a plant).

[0113] As disclosed herein, gene expression can be measured and/or analyzed by detection of an expression product. As used herein, the term “expression product” is an amino acid sequence, protein, polypeptide, or peptide encoded by a gene. In particular, an expression product, for example, is encoded by all or a part of a negative or positive GVHD predictor gene set forth in sequence in Tables 1 (RNA 1538, SEQ ID NOs:1-1546), 2, 2A (RNA143), 2B (RNA192), 3, 13 (SG175), 15 (SG128), or 18 (SG64). Invention methods, kits and arrays include detection, measurement or analysis of expression products encoded by one or more negative or positive GVHD predictor genes as set forth, for example, in Tables 1 (RNA 1538, SEQ ID NOs:1-1546), 2, 2A (RNA143), 2B (RNA192), 3, 13 (SG175), 15 (SG128), or 18 (SG64).

[0114] Accordingly, analytes further include molecules that bind to expression products, i.e., bind to amino acid sequence, protein, polypeptide, or peptide encoded by all or a part of a negative or positive GVHD predictor gene (e.g, a sequence set forth in any of Tables 1 (RNA 1538, SEQ ID NOs:1-1546), 2, 2A (RNA143), 2B (RNA192), 3, 13 (SG175), 15 (SG128), and 18 (SG64)). As used herein the terms “amino acid sequence,” “protein,” “polypeptide” and “peptide” are used interchangeably to refer to two or more amino acids, or “residues,” covalently linked by an amide bond or equivalent. Exemplary lengths of such amino acid sequences are from about 5 to 10, 10 to 20, 20 to 25, 25 to 50, 50 to 100, 100 to 150, 150 to 200, or 200 to 300, 400 to 500, 500 to 1000, or more amino acid residues in length.

[0115] Analytes according to the invention therefore include antibodies and subsequences thereof that bind to proteins or fragments (peptides, polypeptides, etc.) encoded by the positive or negative GVHD predictor genes. The term “antibody” refers to a protein that binds to other molecules (antigens) via heavy and/or light chain variable domains, V_{H} and/or V_{L}, respectively. An “antibody” refers to any monoclonal or polyclonal immunoglobulin molecule, such as IgG, IgA, IgD, IgE, IgM, and any subclass thereof (e.g., IgG₁, IgG₂, IgG₃ or IgG₄). Antibodies include full-length antibodies that include two heavy and two light chain sequences. Antibodies can have kappa or lambda light chain sequences, either full length as in naturally occurring antibodies, mixtures thereof (i.e., fusions of kappa and lambda chain sequences), and subsequences/fragments thereof. Naturally occurring antibody molecules contain two kappa or two lambda light chains.

[0116] Antibodies and subsequences thereof include mammalian, primatized, humanized and fully human antibodies and subsequences thereof. Antibodies and subsequences thereof include those produced or expressed by or on transformed cells or hybridomas, or B cells, or those produced synthetically or by other organisms (plant, insect, bacteria, etc.).

[0117] Antibodies include polyclonal and monoclonal antibodies. A “monoclonal” antibody refers to an antibody that is based upon, obtained from or derived from a single clone, including any eukaryotic, prokaryotic, or phage clone. A “monoclonal” antibody is therefore defined structurally, and not the method by which it is produced.

[0118] Antibodies include subsequences. Non-limiting representative antibody subsequences include but are not limited to Fab, Fab′, F(ab′)₂, Fv, Fd, single-chain Fv (scFv), disulfide-linked Fvs (sdFv), V_{L}, V_{H}, Camel Ig, V-NAR, VHH, trispecific (Fab₃), bispecific (Fab₂), diabody ((V_{L}-V_{H})₂ or (V_{H}-V_{L})₂), triabody (trivalent), tetrabody (tetravalent), minibody ((scF_{V}-C_{H}3)₂), bispecific single-chain Fv (Bis-scFv), IgGdeltaCH2, scFv-Fc, (scFv)₂-Fc, affibody, aptamer, avimer or nanobody, or other antigen binding subsequences of an intact immunoglobulin. Antibodies include those that bind to more than one epitope (e.g., bi-specific antibodies), or antibodies that can bind to one or more different antigens (e.g., bi- or multi-specific antibodies).

[0119] Antibodies and subsequences thereof can be produced or are available commercially or from other sources. For example, antibodies that bind to an expression produce or fragment encoded by all or a portion of any sequence in Tables 1 (RNA 1538), 2, 2A, 2B (RNA 192) and/or 3 can be produced using standard immunological methods known to one of skill in the art.

[0120] A mammalian antibody is an antibody produced by a mammal, transgenic or non-transgenic, or a non-mammalian organism engineered to produce a mammalian antibody, such as a non-mammalian cell (bacteria, yeast, insect cell), animal or plant. A “human” antibody means that the amino acid sequence of the antibody is fully human, i.e., human heavy and human light chain variable and human constant regions. Thus, all of the amino acids are human or exist in a human antibody. A “humanized” antibody, means that the amino acid sequence of the antibody has non-human amino acid residues (e.g., mouse, rat, goat, rabbit, etc.) of one or more complementarity determining regions (CDRs) that specifically bind to the desired antigen in an acceptor human immunoglobulin molecule, and one or more human amino acid residues in the Fv framework region (FR), which are amino acid residues that flank the CDRs.

[0121] Methods of measuring amounts of expression products encoded by negative and/or positive predictor genes are known to those of skill in the art. Non-limiting examples of protein detection, measurement and analysis methods include Western blot, immunoblot, enzyme-linked immunosorbant assay (ELISA), radioimmunoassay (RIA), immunoprecipitation, surface plasmon resonance, chemiluminescence, absorption, emission, fluorescent polarization, phosphorescence, immunohistochemical analysis, matrix-assisted laser desorption/ionization time-of-flight (MALDI-TOF) mass spectrometry, microcytometry, microarray, microscopy, fluorescence activated cell sorting (FACS) and flow cytometry. Amounts of expression products encoded by negative and positive predictor genes also include functional assays, based upon a function of the protein, such as enzyme or catalytic function, DNA binding function, ligand or receptor binding, signal transduction, etc.

[0122] The term “bind,” or “binding,” when used in reference to an analyte means that the binding moiety interacts at the molecular level with all or a part of a nucleic acid sequence or a gene expression product (e.g., protein). Specific binding is selective for the sequence or expression product. Specific and selective binding can be distinguished from non-specific binding using assays known in the art (e.g., immunoprecipitation, ELISA, flow cytometry, immunohistochemistry, Western blotting, nucleic acid hybridization, etc.).

[0123] An analyte can be labeled or tagged in order to be detectable. Detectable labels, markers and tags include labels suitable for gene expression or expression product detection, measurement, analysis and/or quantitation, and include any composition detectable by enzymatic, biochemical, spectroscopic, photochemical, immunochemical, isotopic, electrical, optical, chemical or other means. A detectable label can be attached (e.g., linked conjugated) to the analyte, or be within or be one or more atoms that comprise the analyte. As the structure of analytes can include one or more of carbon, hydrogen, nitrogen, oxygen, sulfur, phosphorous, etc., radioisotopes of any of carbon, hydrogen, nitrogen, oxygen, sulfur, phosphorous, etc., can be included within an analyte detectably labeled.

[0124] Non-limiting exemplary detectable labels also include a radioactive material, such as a radioisotope, a metal or a metal oxide. Radioisotopes include radionuclides emitting alpha, beta or gamma radiation. In particular embodiments, a radioisotope can be one or more of: C, N, O, H, S, Cu, Fe, Ga, Ti, Sr, Y, Tc, In, Pm, Gd, Sm, Ho, Lu, Re, At, Bi or Ac. In additional embodiments, a radioisotope can be one or more of: ³H, ¹¹C, ¹⁴C, ¹³N, ¹⁸O, ¹⁵C, ³²P, ³³P, ³⁵S, ¹²⁵I, or ¹³¹I.

[0125] Further non-limiting exemplary detectable labels include contrast agents (e.g., gadolinium; manganese; barium sulfate; an iodinated or noniodinated agent; an ionic agent or nonionic agent); magnetic and paramagnetic agents (e.g., iron-oxide chelate); nanoparticles; an enzyme (horseradish peroxidase, alkaline phosphatase, β-galactosidase, or acetylcholinesterase); a prosthetic group (e.g., streptavidin/biotin and avidin/biotin); a colorimetric labels such as colloidal gold or colored glass or plastic (e.g., polystyrene, polypropylene, latex, etc.) beads; a fluorescent material or dye (e.g., umbelliferone, fluorescein, fluorescein isothiocyanate, rhodamine, dichlorotriazinylamine fluorescein, dansyl chloride, texas red, rhodamine); a luminescent material (e.g., luminol); or a bioluminescent material (e.g., green fluorescent protein, luciferase, luciferin, aequorin). A label can be any imaging agent that can be employed for gene expression or expression product detection, measurement, analysis and/or quantitation (e.g., for computed axial tomography (CAT or CT), fluoroscopy, single photon emission computed tomography (SPECT) imaging, optical imaging, positron emission tomography (PET), magnetic resonance imaging (MRI), gamma imaging).

[0126] A detectable label can also be linked or conjugated (e.g., covalently) to the analyte. In various embodiments a detectable label, such as a radionuclide or metal or metal oxide can be bound or conjugated to the analyte, either directly or indirectly. A linker or an intermediary functional group can be used to link an analyte to a detectable label.

[0127] The terms “fusion” or “chimeric” or “conjugate” and grammatical variations thereof, when used in reference to a molecule, means that the molecule contains portions or sections that are derived from, obtained or isolated from, or are based upon or modeled after two different molecular entities that are distinct from each other as they do not typically exist together in nature. That is, for example, one portion of an analyte fusion or conjugate includes or consists of a portion (e.g., antibody) that binds to a gene product (encoded by a positive or negative predictor gene), and a second portion that includes or consists of a detectable moiety or agent, each of first and second portions structurally distinct.

[0128] Fusions, chimers and conjugates can be linked indirectly or directly, by a covalent or by a non-covalent bond. Non-limiting examples of covalent bonds are amide bonds, non-natural and non-amide chemical bonds, which include, for example, glutaraldehyde, N-hydroxysuccinimide esters, bifunctional maleimides, N, N′-dicyclohexykarbodiimide (DCC) or N,N′-diisopropylcarbodiimide (DIC) Linking groups alternative to amide bonds include, for example, ketomethylene (e.g., —C(═O)—CH₂— for —C(═O)—NH—), aminomethylene (CH₂—NH₂), ethylene, olefin (CH═CH), ether (CH₂—O), thioether (CH₂—S), tetrazole (CN₄—), thiazole, retroamide, thioamide, or ester (see, e.g., Spatola (1983) in Chemistry and Biochemistry of Amino Acids, Peptides and Proteins, Vol. 7, pp 267-357, “Peptide and Backbone Modifications,” Marcel Decker, NY).

[0129] Compositions and methods of the invention may be contacted or provided in vitro, ex vivo or in vivo. The term “contact” and grammatical variations thereof means conditions allowing a physical interaction (direct or indirect) between two or more entitites (e.g., an analyte and nucleic acid or expression product). In one example, contact means interaction (e.g., binding) of an analyte (e.g., polynucleotide, probe, primer, antibody or fragment, etc.) and a biological sample, such as CD4+ T cells, CD8+ T cells, or a cellular or other material derived from a biological sample, such as nucleic acid, protein, etc.

[0130] For methods of the invention for detection, measurement or analysis of expression, contact as used herein includes in solution, in solid phase, in situ, in vitro, ex vivo, in a cell, such as a sample that includes CD4+ cells or CD8+ T cells in vivo, in vitro, in primary cell isolates, passaged cells, cultured cells, or cells ex vivo. Thus, methods of the invention include contact under conditions allowing the analyte to bind to another entity indicative of positive and/or negative predictor gene expression amounts or levels.

[0131] An analyte (i.e., the nucleic acid, protein, antibody or fragment thereof) can be either in a free state, in solution or in solid phase, such as immobilized on a substrate or a support (e.g., solid). Examples of substrates and supports include a multiwall plate, a bead or sphere, a tube or vial, a microarray or any other suitable substrate or support. Immobilization can be by passive adsorption (non-covalent binding) or covalent binding between the substrate or support and the analyte, or indirectly by attaching the analyte to a reagent which reagent is then attached to the substrate or support (e.g., a ligand-receptor system, for example, where a molecule is grafted onto the analyte and the corresponding receptor immobilized on the substrate or support, as exemplified by the biotin-streptavidin system).

[0132] The term “bind,” or “binding,” means a physical interaction at the molecular level (directly or indirectly). Typically, binding is that which is specific or selective for a target, i.e., is statistically significantly higher than the background or control binding for the assay. The term “specifically binds” refers to the ability to preferentially or selectively bind to a target, for example, an analyte such as a polynucleotide, primer, probe, or antibody that binds to (or hybridizes with) a nucleic acid or gene expression product. Specific and selective binding can be distinguished from non-specific binding using assays known in the art (e.g., for nucleic acid detection, polymerase chain reaction, DNA transcription, northern and southern blotting, etc., and or protein detection, immunoprecipitation, ELISA, flow cytometry, and Western blotting). For example, when performing an immunoassay, controls typically include a reaction well/tube that contains an antibody or antigen binding fragment alone (i.e., in the absence of protein sample), wherein an amount of reactivity (e.g., non-specific binding to the well) by the antibody or antigen binding fragment thereof in the absence of protein sample is considered to be background.

[0133] The invention further provides databases and organizational constructs. A “database” or “organizational construct” refers to a collection of information. A database or organizational construct typically includes a gene expression profile of one or more actual and/or candidate HCT donors, or a score or other indicia that indicates the risk or probability of HCT from an actual and/or a candidate donor to induce or to not induce GVHD in a HCT recipient. In one embodiment, a database or organizational construct includes a gene expression profile of a plurality of positive and/or negative predictor genes of an actual or a candidate HCT donor, or a score that indicates the risk or probability of HCT from an actual or a candidate donor to induce or to not induce GVHD in a HCT recipient. In another embodiment, a database or organizational construct includes a gene expression profile of a plurality of positive and/or negative predictor genes of a plurality of an actual or a candidate donor HCT, or a score that indicates the risk or probability of HCT from a plurality of actual or candidate donors to induce or to not induce GVHD in a HCT recipient.

[0134] The risk of HCT of a given actual or candidate donor inducing GVHD can be used to anticipate whether, and to what extent (e.g., severity) that GVHD is induced in a HCT recipient. For example, if there are limited compatible HCT donors available for a given HCT recipient, a donor HCT that has some risk of inducing GVHD can be selected for the HCT recipient. Given that GVHD may be anticipated after transplant into the recipient, the recipient can be treated with an effective amount of an anti-rejection agent either prior to or following introduction of HCT into the recipient. Depending on the risk of inducing GVHD, the recipient may be a treated more or less aggressively based upon the anticipated risk, or it may be determined that the recipient can be treated according to a standard protocol. An HCT recipient so treated, can have complications associated with transplantation such as GVHD reduced or prevented. Accordingly, the invention provides methods in which risk of GVHD is anticipated in a HCT recipient, and such recipients can be treated with an anti-GVHD rejection-amelioration therapy, either prior to or following introduction of HCT into the recipient.

[0135] The invention provides kits, which kits include, for example, analytes, nucleic acid sequences, primers, probes, antibodies and arrays packaged into a suitable packaging material. Kit components can be used to detect, measure or analyze expression of positive and/or negative GVHD predictor genes (e.g., in Tables 1 (RNA 1538), 2, 2A, 2B (RNA 192) and/or 3), for example, a probe, primer pair or antibody that specifically binds to a positive or negative predictor gene (e.g., nucleic acid or expression product) of interest (e.g., a gene whose expression level correlates with risk of donor HCT inducing GVHD). Accordingly, in one embodiment, a kit includes an analyte, nucleic acid sequence, primer, probe, antibody or an array that allows detection, measurement or analysis of expression of one or more positive and/or negative GVHD predictor gene(s) set forth, for example, in Tables 1 (RNA 1538), 2, 2A, 2B (RNA 192) and/or 3, or an expression product encoded by any of such sequences.

[0136] The term “packaging material” refers to a physical structure housing one or more components of the kit. The packaging material can maintain the components sterilely, and can be made of material commonly used for such purposes (e.g., paper, corrugated fiber, glass, plastic, foil, ampules, vials, tubes, etc.). A kit can contain a plurality of components, e.g., two or more analytes alone or in combination.

[0137] A kit optionally includes a label or insert including a description of the components (type, amounts, doses, etc.), instructions for use in solid phase, in solution, in vitro, in situ, or in vivo, and any other components therein. Labels or inserts can include instructions for practicing any of the methods described herein. For example, instructions for measuring and/or analyzing gene expression to determine or predict risk of an actual or candidate donor HCT to induce or to not induce GVHD in a HCT recipient. The instructions can additionally indicate that a gene expression level greater than a predefined reference expression value (e.g., relative to a standard or a control), indicates a higher or lower risk of donor HCT inducing GVHD in a HCT recipient.

[0138] Labels or inserts can include information identifying manufacturer, lot numbers, manufacturer location and date, expiration dates. Labels or inserts include “printed matter,” e.g., paper or cardboard, or separate or affixed to a component, a kit or packing material (e.g., a box), or attached to an ampule, tube or vial containing a kit component. Labels or inserts can additionally include a computer readable medium, such as a bar-coded printed label, a disk, optical disk such as CD- or DVD-ROM/RAM, DVD, MP3, magnetic tape, or an electrical storage media such as RAM and ROM or hybrids of these such as magnetic/optical storage media, FLASH media or memory type cards.

[0139] Invention kits can additionally include a buffering agent, or a preservative or a stabilizing agent in a formulation containing an analyte (e.g., a nucleic acid sequence, primer, probe or antibody that allows detection, measurement or analysis of expression of a positive or negative GVHD predictor gene as set forth, for example, in Tables 1 (RNA 1538), 2, 2A, 2B (RNA 192) and/or 3, or an expression product encoded by any such sequences). Each component of the kit can be enclosed within an individual container and all of the various containers can be within a single package.

[0140] Kits of the invention can include nucleic acid(s) (e.g., oligonucleotides, primers, or probes) with 100% identity or 100% complementary to all or a portion of any gene sequence in Tables 1 (RNA 1538, SEQ ID NOs:1-1546), 2, 2A (RNA143), 2B (RNA192), 3, 13 (SG175), 15 (SG128), and 18 (SG64), as well as nucleic acid(s) (e.g., oligonucleotides, primers, or probes) having less than 100% identity or less than 100% complementary to all or a portion of a gene sequence in Tables 1 (RNA 1538), 2, 2A, 2B (RNA 192) and/or 3 (e.g., 60%, 70%, 80%, 85%, 90%, or 95% identity or complementary to all or a portion of any gene sequence in Tables 1 (RNA 1538, SEQ ID NOs:1-1546), 2, 2A (RNA143), 2B (RNA192), 3, 13 (SG175), 15 (SG128), and 18 (SG64)). Kits therefore include sense and/or anti-sense nucleic acid sequences that hybridize to all or a portion of positive or negative GVHD predictor gene sequences (or a polymorphism thereof) set forth in Tables 1 (RNA 1538, SEQ ID NOs:1-1546), 2, 2A (RNA143), 2B (RNA192), 3, 13 (SG175), 15 (SG128), and 18 (SG64), or a complementary sequence of all or a portion of gene sequences set forth in Tables 1 (RNA 1538, SEQ ID NOs:1-1546), 2, 2A (RNA143), 2B (RNA192), 3, 13 (SG175), 15 (SG128), and 18 (SG64). Such nucleic acid can be identical or complementary to all or a portion of a nucleic acid sequence in Tables 1 (RNA 1538, SEQ ID NOs:1-1546), 2, 2A (RNA143), 2B (RNA192), 3, 13 (SG175), 15 (SG128), and 18 (SG64).

[0141] In one embodiment, a kit includes two or more primer pairs (e.g., 3, 4, 5, 6, 7, 8, 9, 10, 11, 12, 13, 14, 15, 16, 17, 18, 19, 20, etc., or more, e.g., 21, 22, 23, 24, 25, 26, 27, 28, 29, 30, 31, 32, 33, 34, 35, 36, 37, 38, 39, 40, 41, 42, 43, 44, 45, 46, 47, 48, 49, 50, etc., or more), each primer pair oppositely oriented to each other, and the primer pairs hybridize to RNA or cDNA produced from one of the positive or negative GVHD predictor genes listed in Tables 1 (RNA 1538, SEQ ID NOs:1-1546), 2, 2A (RNA143), 2B (RNA192), 3, 13 (SG175), 15 (SG128), or 18 (SG64), or to all or a portion of positive or negative GVHD predictor gene sequences (or a polymorphism thereof) set forth in Tables 1 (RNA 1538, SEQ ID NOs:1-1546), 2, 2A (RNA143), 2B (RNA192), 3, 13 (SG175), 15 (SG128), or 18 (SG64) or a complementary sequence of all or a portion of gene sequences set forth in Tables 1 (RNA 1538, SEQ ID NOs:1-1546), 2, 2A (RNA143), 2B (RNA192), 3, 13 (SG175), 15 (SG128), or 18 (SG64)

[0142] Kits of the invention can include other analytes. In one embodiment, a kit includes a probe that hybridizes to a nucleic acid sequence amplified by one of the primer pairs that hybridizes to all or a portion of positive or negative GVHD predictor gene sequences (or a polymorphism thereof) set forth in Tables 1 (RNA 1538, SEQ ID NOs:1-1546), 2, 2A (RNA143), 2B (RNA192), 3, 13 (SG175), 15 (SG128), or 18 (SG64), or a complementary sequence of all or a portion of gene sequences set forth in Tables 1 (RNA 1538, SEQ ID NOs:1-1546), 2, 2A (RNA143), 2B (RNA192), 3, 13 (SG175), 15 (SG128), or 18 (SG64), for example, RNA or cDNA of one or more of the positive or negative GVHD predictor genes (or a polymorphism thereof) listed in Tables 1 (RNA 1538, SEQ ID NOs:1-1546), 2, 2A (RNA143), 2B (RNA192), 3, 13 (SG175), 15 (SG128), or 18 (SG64). In particular aspects, a plurality of probes (e.g., 2, 3, 4, 5, 6, 7, 8, 9, 10, 11, 12, 13, 14, 15, 16, 17, 18, 19, 20, etc., or more, e.g., 21, 22, 23, 24, 25, 26, 27, 28, 29, 30, 31, 32, 33, 34, 35, 36, 37, 38, 39, 40, 41, 42, 43, 44, 45, 46, 47, 48, 49, 50, etc., or more) that hybridize to all or a portion of positive or negative GVHD predictor gene sequences (or a polymorphism thereof) set forth in Tables 1 (RNA 1538, SEQ ID NOs:1-1546), 2, 2A (RNA143), 2B (RNA192), 3, 13 (SG175), 15 (SG128), or 18 (SG64), or a complementary sequence of all or a portion of such gene sequences, for example, RNA or cDNA of the positive or negative predictor genes listed in Tables 1 (RNA 1538, SEQ ID NOs:1-1546), 2, 2A (RNA143), 2B (RNA192), 3, 13 (SG175), 15 (SG128), or 18 (SG64).

[0143] Kits of the invention that include analytes need not have all or a portion of the analytes attached or affixed to a support or substrate. In one embodiment, a kit that includes primer pairs or probes, the primer pairs and/or probes are not attached or affixed to a support or substrate.

[0144] Kits of the invention can further include other reagents useful in assessing levels of expression of a nucleic acid (e.g., buffers and other reagents for performing PCR reactions, or for detecting binding of a probe to a nucleic acid). For example, a kit can also include additional useful materials and substances, such as a standard (e.g., a sample containing a known quantity of a nucleic acid to which expression results can be compared). Kits can additionally include a computer readable media (comprising, for example, a data analysis program, a reference gene expression profile, etc.), control samples, and other reagents for obtaining and/or processing sample and analysis, and analyzing gene expression data so obtained.

[0145] The invention provides arrays, which arrays include, for example, one or more analytes, nucleic acid sequences, polynucleotides, oligonucleotides, primers, probes or antibodies affixed to or contained in a support or substrate (e.g., such as a multi-well format, or a multi-well plate or dish). An “array” or “microarray,” which can also be referred to as a “bio-chip,” refers to an arrangement of binding (e.g., hybridizable) analytes, such as polynucleotides, oligonucleotides, primers, probes or antibodies, on a substrate. Such arrays are suitable for quantifying variations in gene expression levels, and are therefore useful for the methods described herein, for example, detecting, measuring or analyzing expression of one or more positive and/or negative predictor genes.

[0146] Typically, in an array an analyte (e.g, nucleic acid sequence, oligonucleotide, probe or antibody) that is a portion of a known gene (single strand, sense or anti-sense, e.g., of a positive or negative predictor gene) or that binds to a gene expression product (e.g., of a positive or negative predictor gene), occupies a defined or known address or location on a substrate or support. Accordingly, analytes, such as nucleic acid sequences, polynucleotides, oligonucleotides, primers, probes or antibodies can have a defined or known location, position or address on the support or substrate.

[0147] Analytes are typically arranged within two or more dimensions of the array. An array can assume different shapes. For example, the array can be regular (such as arranged in uniform rows and columns) or irregular. Thus, in ordered arrays the position/location of each sample is assigned to the sample at the time when it is applied to the array, and a key can correlate each position/location with the appropriate target. An ordered array can be arranged in a symmetrical grid pattern, but samples could be arranged in other patterns (such as in radially distributed lines, spiral lines, or ordered clusters). Arrays usually are computer readable, in that a computer can be programmed to correlate a particular address on the array with sample identity at that position (such as hybridization or binding data, including for instance signal intensity). In non-limiting examples of computer readable formats, the individual samples in the array are arranged regularly, for instance in a Cartesian grid pattern, which can be correlated to address information by a computer.

[0148] An array “format” includes any format in which an analyte can be affixed to or contained in the support or substrate, such as microtiter or multi-well plates or dishes, test tubes, inorganic sheets, dipsticks, etc. The particular format is unimportant. All that is necessary is that an analyte can be affixed to or contained in the support or substrate without affecting the functional behavior of the analyte absorbed thereon.

[0149] The support or substrate can be an inert material such as glass or plastic. One such material is an organic polymer such as polypropylene, which is chemically inert and hydrophobic, and has good chemical resistance to a variety of organic acids, organic agents, bases, salts, oxidizing agents, and mineral acids. Additional non-limiting examples include polyethylene, polybutylene, polyisobutylene, polybutadiene, polyisoprene, polyvinylpyrrolidine, polytetrafluroethylene, polyvinylidene difluoride, polyfluoroethylene-propylene, polyethylenevinyl alcohol, polymethylpentene, polycholorotrifluoroethylene, polysulfonones, hydroxylated biaxially oriented polypropylene, aminated biaxially oriented polypropylene, thiolated biaxially oriented polypropylene, etyleneacrylic acid, thylene methacrylic acid, nylons, and blends or copolymers thereof (e.g., blends of, alternating blocks of, or alternating components of, polypropylene, polyethylene, polybutylene, polyisobutylene, etc.).

[0150] In one embodiment, an array includes two or more primer pairs, wherein each primer pair is oppositely oriented to each other, and each of the primer pairs hybridize to all or a portion of any gene sequence (or a polymorphism thereof) in Tables 1 (RNA 1538, SEQ ID NOs:1-1546), 2, 2A (RNA143), 2B (RNA192), 3, 13 (SG175), 15 (SG128), or 18 (SG64), or a complementary sequence of all or a portion of any gene sequence set forth in Tables 1 (RNA 1538, SEQ ID NOs:1-1546), 2, 2A (RNA143), 2B (RNA192), 3, 13 (SG175), 15 (SG128), or 18 (SG64), and wherein each primer pair is affixed to or contained in a support or substrate. In particular aspects, one or more primers of a primer pair have 100% identity or 100% complementary to all or a portion of any gene sequence in Tables 1 (RNA 1538, SEQ ID NOs:1-1546), 2, 2A (RNA143), 2B (RNA192), 3, 13 (SG175), 15 (SG128), or 18 (SG64), or have less than 100% identity or less than 100% complementary to all or a portion of any gene sequence in Tables 1 (RNA 1538, SEQ ID NOs:1-1546), 2, 2A (RNA143), 2B (RNA192), 3, 13 (SG175), 15 (SG128), or 18 (SG64) (e.g., 60%, 70%, 80%, 85%, 90%, or 95% identity or complementary to all or a portion of any gene sequence in Tables 1 (RNA 1538, SEQ ID NOs:1-1546), 2, 2A (RNA143), 2B (RNA192), 3, 13 (SG175), 15 (SG128), or 18 (SG64)). In further particular aspects, the array further includes a probe (or a plurality of probes) that hybridizes to a nucleic acid sequence amplified by one of the primer pairs (e.g., all or a portion of any sequence in Tables 1 (RNA 1538, SEQ ID NOs:1-1546), 2, 2A (RNA143), 2B (RNA192), 3, 13 (SG175), 15 (SG128), or 18 (SG64), or a sequence complementary to all or a portion of any sequence in Tables 1 (RNA 1538, SEQ ID NOs:1-1546), 2, 2A (RNA143), 2B (RNA192), 3, 13 (SG175), 15 (SG128), or 18 (SG64).

[0151] In another embodiment, an array includes two or more probes, wherein each probe hybridizes to all or a portion of a gene sequence (or a polymorphism thereof) in Tables 1 (RNA 1538, SEQ ID NOs:1-1546), 2, 2A (RNA143), 2B (RNA192), 3, 13 (SG175), 15 (SG128), or 18 (SG64), or a complementary sequence of all or a portion of gene sequences set forth in Tables 1 (RNA 1538, SEQ ID NOs:1-1546), 2, 2A (RNA143), 2B (RNA192), 3, 13 (SG175), 15 (SG128), or 18 (SG64), and wherein each probe is affixed to or contained in a support or substrate. In particular aspects, one or more probes have 100% identity or is 100% complementary to all or a portion of a gene sequence in Tables 1 (RNA 1538, SEQ ID NOs:1-1546), 2, 2A (RNA143), 2B (RNA192), 3, 13 (SG175), 15 (SG128), or 18 (SG64), or has less than 100% identity or is less than 100% complementary to all or a portion of a gene sequence in Tables 1 (RNA 1538, SEQ ID NOs:1-1546), 2, 2A (RNA143), 2B (RNA192), 3, 13 (SG175), 15 (SG128), or 18 (SG64) (e.g., 60%, 70%, 80%, 85%, 90%, or 95% identity or complementary to all or a portion of a gene sequence in Tables 1 (RNA 1538), 2, 2A, 2B (RNA 192) and/or 3).

[0152] The hybridizing probe and/or primer sequence and sequence of the positive and negative predictor genes described herein are provided in sequence in Tables 1 (RNA 1538, SEQ ID NOs:1-1546), 2, 2A (RNA143), 2B (RNA192), 3, 13 (SG175), 15 (SG128), or 18 (SG64). Thus, knowing the sequence and identity of the genes set forth herein, nucleic acid and other analyte arrays can be fabricated either by de novo synthesis on a substrate or by spotting or transporting nucleic acid sequences onto specific locations of substrate. For example, nucleic acid purified and/or isolated from a biological material, such as a sample that includes CD4+ T cells or CD8+ T cells is hybridized with an array of such oligonucleotides or probes, and then the amount of target nucleic acid that hybridizes to each oligonucleotide or probe in the array can be determined. It is noted that all of the genes described herein have been previously sequenced, at least in part, such that oligonucleotides suitable for the detection, measurement and analysis of such genes can be produced.

[0153] In further embodiments, an array includes primers and/or probes that hybridize to 5, 10, 20, 30 or more of the positive or negative predictor genes (or a polymorphism thereof), or a complementary sequence of all or a portion of gene sequences (or a polymorphism thereof) set forth in Tables 1 (RNA 1538, SEQ ID NOs:1-1546), 2, 2A (RNA143), 2B (RNA192), 3, 13 (SG175), 15 (SG128), or 18 (SG64). In further embodiments, an array includes primers and/or probes all of which hybridize to all or a portion of a gene (or a polymorphism thereof) sequence in Tables 1 (RNA 1538, SEQ ID NOs:1-1546), 2, 2A (RNA143), 2B (RNA192), 3, 13 (SG175), 15 (SG128), or 18 (SG64), or a complementary sequence of all or a portion of gene sequences in Tables 1 (RNA 1538, SEQ ID NOs:1-1546), 2, 2A (RNA143), 2B (RNA192), 3, 13 (SG175), 15 (SG128), or 18 (SG64).

[0154] In still further embodiments, an array includes a total number of primer pairs and/or probes less than 30,000, less than 20,000, less than 15,000, less than 10,000, less than 5,000, less than 2,500, less than 2,000, less than 1,500, less than 1,000, less than 500, less than 400, less than 300, less than 200, less than 100, less than 50, or less than 25 primer pairs and/or probes.

[0155] By way of illustrative example only, an array of nucleic acids, polynucleotides, oligonucleotides, primers or probes, immobilized on the microchip, are suitable for hybridization to a nucleic acid sample. Fluorescently labeled cDNA probes (e.g., generated through incorporation of fluorescent nucleotides by reverse transcription of RNA extracted from CD4+ T cells or CD8+ T cells) are contacted or applied to the array, and allowed to hybridize with specificity to each spot of nucleic acid on the array. After washing to remove non-specifically bound cDNA probes, the array is scanned by a detection method (e.g., by confocal laser microscopy or a CCD camera). Quantitation of hybridization of each array element allows for assessment of mRNA abundance. With dual color fluorescence, separately labeled cDNA probes generated from two sources of RNA are hybridized pairwise to the array. The relative abundance of the transcripts from the two sources corresponding to each specified gene is thus determined. Such methods have been shown to have the sensitivity required to detect rare transcripts, expressed at a few copies per cell, and to reproducibly detect at least approximately two-fold differences in the expression levels (Schena et al., Proc. Natl. Acad. Sci. USA 93:106-149 (1996)).

[0156] Arrays can be prepared by a variety of approaches. In one example, oligonucleotide or protein sequences are synthesized separately and then attached to a solid support (see U.S. Pat. No. 6,013,789). In another example, sequences are synthesized directly onto the support to provide the desired array (see U.S. Pat. No. 5,554,501). Suitable methods for covalently coupling oligonucleotides and proteins to a solid support and for directly synthesizing the oligonucleotides or proteins onto the support are known (a summary of suitable methods can be found in Matson et al., Anal. Biochem. 217:306-10 (1994)). In one example, oligonucleotides are synthesized onto the support using conventional chemical techniques for preparing oligonucleotides on solid supports (WO 85/01051, WO 89/10977, and U.S. Pat. No. 5,554,501).

[0157] The invention provides databases and organizational constructs. Databases and or organizational constructs can be operatively linked to a processor, such as a processor that includes a data entry module or a query module.

[0158] In one embodiment, a database or organizational construct includes gene expression profiles of two or more positive and/or negative predictor genes (e.g., from a biological sample of CD4+ T cells or CD8+ T cells) or a polymorphism thereof listed in Tables 1 (RNA 1538, SEQ ID NOs:1-1546), 2, 2A (RNA143), 2B (RNA192), 3, 13 (SG175), 15 (SG128), or 18 (SG64), from a plurality of actual or candidate HCT donors, and in which the gene expression profile is associated with each of the actual or candidate HCT donors in the database or organizational construct. In another embodiment, a database or organizational construct includes scores assigned based upon the probability or risk of actual or candidate donor HCTs to induce or to not induce GVHD in a HCT recipient, each of which score is based upon a gene expression profile of two or more positive and/or negative predictor genes or a polymorphism thereof listed in Tables 1 (RNA 1538), 2, 2A, 2B (RNA 192) and/or 3, for each actual or candidate HCT donor, and in which each score is associated with each of the actual or candidate HCT donors in the database or organizational construct. In particular aspects, the database or organizational construct includes expression information for 3, 4, 5, 6, 7, 8, 9, 10, 11, 12, 13, 14, 15, 16, 17, 18, 19, 20 or more, e.g., 21, 22, 23, 24, 25, 26, 27, 28, 29, 30, 31, 32, 33, 34, 35, 36, 37, 38, 39, 40, 41, 42, 43, 44, 45, 46, 47, 48, 49, 50, etc., or more positive or negative predictor genes or a polymorphism thereof listed in Tables 1 (RNA 1538, SEQ ID NOs:1-1546), 2, 2A (RNA143), 2B (RNA192), 3, 13 (SG175), 15 (SG128), or 18 (SG64), for each actual or candidate HCT donor. In further particular aspects, the HCT from the actual or candidate donors at lower or higher risk of inducing graft vs. host disease (GVHD) in a HCT recipient are identified.

TABLE 1
1538 Positive and Negative Predictor Genes of GVHD Outcome, a Housekeeping “HSK” gene, and Exemplary Probes

| RNA1538 | RNA1546 Index | | | Accession No. Basic | | | |
|---|---|---|---|---|---|---|---|
| Index | (SEQ ID NO: 1-1546) | ProbeID | Accession No. | (without decimal) | Gene Name | Symbol | Synonyms |
| 1 | 1196 | 6280672 | NM_030938.2 | NM_030938 | transmembrane protein | TMEM49 | VMP1; |
| | | | | | 49 (TMEM49), mRNA. | | DKFZP566I133 |
| 2 | 12 | 4200575 | NM_014232.1 | NM_014232 | vesicle-associated | VAMP2 | SYB2; VAMP-2; |
| | | | | | membrane protein 2 | | FLJ11460 |
| | | | | | (synaptobrevin 2) | | |
| | | | | | (VAMP2), mRNA. | | |
| 3 | 461 | 830553 | NM_017455.2 | NM_017455 | neuroplastin (NPTN), | NPTN | SDFR1; GP55; |
| | | | | | transcript variant alpha, | | DKFZp686L2477; |
| | | | | | mRNA. | | np65; np55; GP65; |
| | | | | | | | SDR1; MGC102805 |
| 4 | 1256 | 6580711 | NM_001129.3 | NM_001129 | AE binding protein 1 | AEBP1 | FLJ33612; ACLP |
| | | | | | (AEBP1), mRNA. | | |
| 5 | 1309 | 6960594 | NM_145869.1 | NM_145869 | annexin A11 | ANXA11 | ANX11; CAP50 |
| | | | | | (ANXA11), transcript | | |
| | | | | | variant c, mRNA. | | |
| 6 | 224 | 6480095 | NM_030918.5 | NM_030918 | sorting nexin family | SNX27 | MGC126873; |
| | | | | | member 27 (SNX27), | | MGC20471; |
| | | | | | mRNA. | | MGC126871; MY014; |
| | | | | | | | KIAA0488 |
| 7 | 220 | 6400148 | NM_080430.2 | NM_080430 | selenoprotein M | SELM | MGC40146; SEPM |
| | | | | | (SELM), mRNA | | |
| 8 | 254 | 7610537 | NM_002129.2 | NM_002129 | high-mobility group box | HMGB2 | HMG2 |
| | | | | | 2 (HMGB2), mRNA. | | |
| 9 | 1535 | 6960278 | NM_178552.2 | NM_178552 | chromosome 22 open | C22orf33 | EAN57; MGC35206; |
| | | | | | reading frame 33 | | cE81G9.2 |
| | | | | | (C22orf33), mRNA. | | |
| 10 | 1067 | 5560133 | NM_152468.3 | NM_152468 | transmembrane | TMC8 | EVIN2; EVER2; EV2; |
| | | | | | channel-like 8 (TMC8), | | MGC40121; |
| | | | | | mRNA. | | MGC102701 |
| 11 | 508 | 1230017 | NM_018367.4 | NM_018367 | phytoceramidase, | PHCA | FLJ11238; APHC |
| | | | | | alkaline (PHCA), | | |
| | | | | | mRNA. | | |
| 12 | 754 | 2940075 | NM_018571.5 | NM_018571 | amyotrophic lateral | ALS2CR2 | ILPIPA; ILPIP; PAPK; |
| | | | | | sclerosis 2 (juvenile) | | MGC102916; CALS- |
| | | | | | chromosome region, | | 21; PRO1038 |
| | | | | | candidate 2 | | |
| | | | | | (ALS2CR2), mRNA. | | |
| 13 | 1197 | 6290021 | NM_002811.3 | NM_002811 | proteasome (prosome, | PSMD7 | P40; S12; MOV34 |
| | | | | | macropain) 26S | | |
| | | | | | subunit, non-ATPase, 7 | | |
| | | | | | (PSMD7), mRNA. | | |
| 14 | 406 | 540446 | NM_012459.1 | NM_012459 | translocase of inner | TIMM8B | MGC102866; TIM8B; |
| | | | | | mitochondrial | | DDP2; MGC117373; |
| | | | | | membrane 8 homolog | | FLJ21744 |
| | | | | | B (yeast) (TIMM8B), | | |
| | | | | | nuclear gene encoding | | |
| | | | | | mitochondrial protein, | | |
| | | | | | mRNA. | | |
| 15 | 658 | 2260296 | NR_003654.1 | NR_003654 | SCAN domain | SCAND2 | — |
| | | | | | containing 2 (SCAND2) | | |
| | | | | | on chromosome 15. | | |
| 16 | 172 | 4830113 | NM_016619.1 | NM_016619 | placenta-specific 8 | PLAC8 | C15; onzin |
| | | | | | (PLAC8), mRNA. | | |
| 17 | 1357 | 7380601 | NM_024896.2 | NM_024896 | endoplasmic reticulum | ERMP1 | FXNA; KIAA1815; |
| | | | | | metallopeptidase 1 | | bA207C16.3 |
| | | | | | (ERMP1), mRNA. | | |
| 18 | 757 | 2970397 | NM_145288.1 | NM_145288 | zinc finger protein 342 | ZNF342 | ZNF296 |
| | | | | | (ZNF342), mRNA. | | |
| 19 | 237 | 6960593 | NM_004439.4 | NM_004439 | EPH receptor A5 | EPHA5 | EHK1; TYRO4; |
| | | | | | (EPHA5), transcript | | HEK7; CEK7 |
| | | | | | variant 1, mRNA. | | |
| 20 | 1330 | 7150685 | NM_012117.1 | NM_012117 | chromobox homolog 5 | CBX5 | HP1-ALPHA; HP1; |
| | | | | | (HP1 alpha homolog, | | HP1Hs-alpha |
| | | | | | Drosophila) (CBX5), | | |
| | | | | | mRNA. | | |
| 21 | 570 | 1660072 | NM_130787.2 | NM_130787 | adaptor-related protein | AP2A1 | CLAPA1; AP2- |
| | | | | | complex 2, alpha 1 | | ALPHA; ADTAA |
| | | | | | subunit (AP2A1), | | |
| | | | | | transcript variant 2, | | |
| | | | | | mRNA. | | |
| 22 | 207 | 6060196 | NM_145912.5 | NM_145912 | NFAT activating protein | NFAM1 | FLJ40652; CNAIP; |
| | | | | | with ITAM motif 1 | | bK126B4.4 |
| | | | | | (NFAM1), mRNA. | | |
| 23 | 14 | 5220196 | NM_006565.2 | NM_006565 | CCCTC-binding factor | CTCF | — |
| | | | | | (zinc finger protein) | | |
| | | | | | (CTCF), mRNA. | | |
| 24 | 1329 | 7150278 | NM_000201.1 | NM_000201 | intercellular adhesion | ICAM1 | P3.58; BB2; CD54 |
| | | | | | molecule 1 (CD54), | | |
| | | | | | human rhinovirus | | |
| | | | | | receptor (ICAM1), | | |
| | | | | | mRNA. | | |
| 25 | 271 | 2510253 | NM_145306.2 | NM_145306 | chromosome 10 open | C10orf35 | — |
| | | | | | reading frame 35 | | |
| | | | | | (C10orf35), mRNA. | | |
| 26 | 457 | 830324 | NM_001459.2 | NM_001459 | fms-related tyrosine | FLT3LG | — |
| | | | | | kinase 3 ligand | | |
| | | | | | (FLT3LG), mRNA. | | |
| 27 | 1042 | 5290008 | NM_015112.2 | NM_015112 | microtubule associated | MAST2 | FLJ39200; RP4- |
| | | | | | serine/threonine kinase | | 533D7.1; KIAA0807; |
| | | | | | 2 (MAST2), mRNA. | | MAST205; MTSSK |
| 28 | 231 | 6650451 | NM_015057.3 | NM_015057 | MYC binding protein 2 | MYCBP2 | FLJ21597; PAM; |
| | | | | | (MYCBP2), mRNA. | | FLJ13826; FLJ10106; |
| | | | | | | | FLJ21646; |
| | | | | | | | DKFZp686M08244; |
| | | | | | | | KIAA0916 |
| 29 | 774 | 3140095 | NM_177543.1 | NM_177543 | phosphatidic acid | PPAP2C | PAP-2c; PAP2-g; |
| | | | | | phosphatase type 2C | | LPP2 |
| | | | | | (PPAP2C), transcript | | |
| | | | | | variant 3, mRNA. | | |
| 30 | 351 | 130241 | NM_001007468.1 | NM_001007468 | SWI/SNF related, | SMARCB1 | Sfh1p; RDT; hSNFS; |
| | | | | | matrix associated, actin | | SNF5; Snr1; SNF5L1; |
| | | | | | dependent regulator of | | INI1; BAF47 |
| | | | | | chromatin, subfamily b, | | |
| | | | | | member 1 | | |
| | | | | | (SMARCB1), transcript | | |
| | | | | | variant 2, mRNA. | | |
| 31 | 181 | 5090288 | NM_171999.2 | NM_171999 | sal-like 3 (Drosophila) | SALL3 | ZNF796 |
| | | | | | (SALL3), mRNA. | | |
| 32 | 272 | 2810082 | NM_016470.6 | NM_016470 | chromosome 20 open | C20orf111 | dJ1183I21.1; |
| | | | | | reading frame 111 | | HSPC207; Perit1 |
| | | | | | (C20orf111), mRNA. | | |
| 33 | 1084 | 5690333 | NM_003400.3 | NM_003400 | exportin 1 (CRM1 | XPO1 | DKFZp686B1823; |
| | | | | | homolog, yeast) | | CRM1 |
| | | | | | (XPO1), mRNA. | | |
| 34 | 1316 | 7000735 | NM_002882.2 | NM_002882 | RAN binding protein 1 | RANBP1 | MGC88701 |
| | | | | | (RANBP1), mRNA. | | |
| 35 | 1369 | 7510687 | NM_006662.2 | NM_006662 | Snf2-related CREBBP | SRCAP | EAF1; SWR1; |
| | | | | | activator protein | | DOMO1; KIAA0309; |
| | | | | | (SRCAP), mRNA. | | FLJ44499 |
| 36 | 1085 | 5690358 | NM_014254.1 | NM_014254 | transmembrane protein | TMEM5 | HP10481 |
| | | | | | 5 (TMEM5), mRNA. | | |
| 37 | 1187 | 6270020 | NM_145799.2 | NM_145799 | septin 6 (SEPT6), | SEPT6 | SEP2; RP5- |
| | | | | | transcript variant I, | | 876A24.2; |
| | | | | | mRNA. | | MGC16619; SEPT2; |
| | | | | | | | MGC20339; |
| | | | | | | | KIAA0128 |
| 38 | 59 | 1170332 | NM_014911.3 | NM_014911 | AP2 associated kinase | AAK1 | DKFZp686K16132; |
| | | | | | 1 (AAK1), mRNA. | | MGC164568; |
| | | | | | | | FLJ45252; FLJ23712; |
| | | | | | | | FLJ25931; KIAA1048; |
| | | | | | | | FLJ42882; |
| | | | | | | | DKFZp686F03202; |
| | | | | | | | MGC164570; |
| | | | | | | | FLJ31060; |
| | | | | | | | MGC138170 |
| 39 | 736 | 2750184 | NM_005184.2 | NM_005184 | calmodulin 3 | CALM3 | PHKD; PHKD3 |
| | | | | | (phosphorylase kinase, | | |
| | | | | | delta) (CALM3), mRNA. | | |
| 40 | 1078 | 5570601 | NM_020216.3 | NM_020216 | arginylaminopeptidase | RNPEP | DKFZP547H084 |
| | | | | | (aminopeptidase B) | | |
| | | | | | (RNPEP), mRNA. | | |
| 41 | 374 | 360280 | NM_017761.2 | NM_017761 | proline-rich nuclear | PNRC2 | MGC99541; |
| | | | | | receptor coactivator 2 | | FLJ20312 |
| | | | | | (PNRC2), mRNA. | | |
| 42 | 1281 | 6760347 | NM_178009.2 | NM_178009 | diacylglycerol kinase, | DGKH | DKFZp761I1510; |
| | | | | | eta (DGKH), transcript | | DGKeta |
| | | | | | variant 2, mRNA. | | |
| 43 | 160 | 4230619 | NM_012198.2 | NM_012198 | grancalcin, EF-hand | GCA | GCL |
| | | | | | calcium binding protein | | |
| | | | | | (GCA), mRNA. | | |
| 44 | 459 | 830463 | NM_002735.1 | NM_002735 | protein kinase, cAMP- | PRKAR1B | PRKAR1 |
| | | | | | dependent, regulatory, | | |
| | | | | | type I, beta | | |
| | | | | | (PRKAR1B), mRNA. | | |
| 45 | 353 | 130364 | NM_032947.3 | NM_032947 | MSTP150 (MST150), | MST150 | NID67; MGC126887; |
| | | | | | mRNA. | | MGC126889; |
| | | | | | | | MGC117221 |
| 46 | 52 | 1050408 | NM_005678.3 | NM_005678 | SNRPN upstream | SNURF | — |
| | | | | | reading frame | | |
| | | | | | (SNURF), transcript | | |
| | | | | | variant 1, mRNA. | | |
| 47 | 58 | 1170300 | NM_005950.1 | NM_005950 | metallothionein 1G | MT1G | MT1; MT1K; |
| | | | | | (MT1G), mRNA. | | MGC12386 |
| 48 | 23 | 20056 | NM_003295.1 | NM_003295 | tumor protein, | TPT1 | TCTP; p02; HRF; |
| | | | | | translationally- | | FLJ27337 |
| | | | | | controlled 1 (TPT1), | | |
| | | | | | mRNA. | | |
| 49 | 850 | 3800309 | NM_022170.1 | NM_022170 | eukaryotic translation | EIF4H | KIAA0038; WSCR1; |
| | | | | | initiation factor 4H | | WBSCR1 |
| | | | | | (EIF4H), transcript | | |
| | | | | | variant 1, mRNA. | | |
| 50 | 1 | 380575 | NM_000978.3 | NM_000978 | ribosomal protein L23 | RPL23 | MGC117346; rpL17; |
| | | | | | (RPL23), mRNA. | | MGC111167; |
| | | | | | | | MGC72008 |
| 51 | 2 | 940398 | NM_006360.3 | NM_006360 | eukaryotic translation | EIF3M | FLJ29030; GA17; hfl- |
| | | | | | initiation factor 3, | | B5; eIF3m; PCID1; B5 |
| | | | | | subunit M (EIF3M), | | |
| | | | | | mRNA. | | |
| 52 | 3 | 990315 | NM_030752.2 | NM_030752 | t-complex 1 (TCP1), | TCP1 | TCP-1-alpha; CCT- |
| | | | | | transcript variant 1, | | alpha; CCT1; |
| | | | | | mRNA. | | D6S230E; CCTa |
| 53 | 4 | 1240136 | NM_199345.3 | NM_199345 | phosphatidylinositol 4- | PI4KAP2 | FLJ44912; |
| | | | | | kinase, catalytic, alpha | | MGC31920 |
| | | | | | polypeptide | | |
| | | | | | pseudogene 2 | | |
| | | | | | (PI4KAP2), mRNA. | | |
| 54 | 5 | 1820482 | NM_004548.1 | NM_004548 | NADH dehydrogenase | NDUFB10 | PDSW |
| | | | | | (ubiquinone) 1 beta | | |
| | | | | | subcomplex, 10, 22 kDa | | |
| | | | | | (NDUFB10), mRNA. | | |
| 55 | 6 | 1850288 | NM_014153.2 | NM_014153 | zinc finger CCCH-type | ZC3H7A | HSPC055; |
| | | | | | containing 7A | | ZC3HDC7; ZC3H7; |
| | | | | | (ZC3H7A), mRNA. | | FLJ20318; FLJ10027 |
| 56 | 7 | 2940022 | NM_000712.3 | NM_000712 | biliverdin reductase A | BLVRA | BVRA; BLVR |
| | | | | | (BLVRA), mRNA. | | |
| 57 | 8 | 3370164 | NM_000701.6 | NM_000701 | ATPase, Na+/K+ | ATP1A1 | MGC3285; |
| | | | | | transporting, alpha 1 | | MGC51750 |
| | | | | | polypeptide (ATP1A1), | | |
| | | | | | transcript variant 1, | | |
| | | | | | mRNA. | | |
| 58 | 9 | 3440400 | NM_020698.1 | NM_020698 | transmembrane and | TMCC3 | KIAA1145 |
| | | | | | coiled-coil domain | | |
| | | | | | family 3 (TMCC3), | | |
| | | | | | mRNA. | | |
| 59 | 10 | 3450148 | NM_170734.2 | NM_170734 | brain-derived | BDNF | MGC34632 |
| | | | | | neurotrophic factor | | |
| | | | | | (BDNF), transcript | | |
| | | | | | variant 6, mRNA. | | |
| 60 | 11 | 3780450 | NM_079837.2 | NM_079837 | BTG3 associated | BANP | DKFZp761H172; |
| | | | | | nuclear protein (BANP), | | FLJ10177; SMAR1; |
| | | | | | transcript variant 2, | | SMARBP1; FLJ20538 |
| | | | | | mRNA. | | |
| 61 | 13 | 4640689 | NM_001967.3 | NM_001967 | eukaryotic translation | EIF4A2 | DDX2B; BM-010; |
| | | | | | initiation factor 4A, | | EIF4A; EIF4F |
| | | | | | isoform 2 (EIF4A2), | | |
| | | | | | mRNA. | | |
| 62 | 15 | 5870632 | NM_004800.1 | NM_004800 | transmembrane 9 | TM9SF2 | P76; MGC117391; |
| | | | | | superfamily member 2 | | FLJ26287 |
| | | | | | (TM9SF2), mRNA. | | |
| 63 | 16 | 6290392 | NM_005839.3 | NM_005839 | serine/arginine | SRRM1 | SRM160; 160-KD; |
| | | | | | repetitive matrix 1 | | POP101; MGC39488 |
| | | | | | (SRRM1), mRNA. | | |
| 64 | 17 | 6380008 | NM_025209.2 | NM_025209 | enhancer of polycomb | EPC1 | Epl1; |
| | | | | | homolog 1 (Drosophila) | | DKFZp781P2312 |
| | | | | | (EPC1), mRNA. | | |
| 65 | 18 | 6380427 | NM_202468.1 | NM_202468 | GIPC PDZ domain | GIPC1 | IIP-1; TIP-2; |
| | | | | | containing family, | | GLUT1CBP; C19orf3; |
| | | | | | member 1 (GIPC1), | | RGS19IP1; Hs.6454; |
| | | | | | transcript variant 3, | | SYNECTIIN; |
| | | | | | mRNA. | | MGC15889; NIP; |
| | | | | | | | MGC3774; SEMCAP; |
| | | | | | | | GIPC |
| 66 | 19 | 6580553 | NM_005688.2 | NM_005688 | ATP-binding cassette, | ABCC5 | MOAT-C; pABC11; |
| | | | | | sub-family C | | ABC33; MRP5; |
| | | | | | (CFTR/MRP), member | | SMRP; EST277145; |
| | | | | | 5 (ABCC5), transcript | | DKFZp686C1782; |
| | | | | | variant 1, mRNA. | | MOATC |
| 67 | 20 | 7210128 | NM_024408.2 | NM_024408 | Notch homolog 2 | NOTCH2 | hN2; AGS2 |
| | | | | | (Drosophila) | | |
| | | | | | (NOTCH2), mRNA. | | |
| 68 | 21 | 10504 | NM_031950.2 | NM_031950 | fibroblast growth factor | FGFBP2 | KSP37 |
| | | | | | binding protein 2 | | |
| | | | | | (FGFBP2), mRNA. | | |
| 69 | 22 | 20010 | NM_001014438.1 | NM_001014438 | cysteinyl- | CARS | CARS1; CYSRS; |
| | | | | | tRNAsynthetase | | MGC: 11246 |
| | | | | | (CARS), transcript | | |
| | | | | | variant 4, mRNA. | | |
| 70 | 24 | 60053 | NM_000975.2 | NM_000975 | ribosomal protein L11 | RPL11 | GIG34 |
| | | | | | (RPL11), mRNA. | | |
| 71 | 25 | 60397 | NR_001449.1 | NR_001449 | tRNA lysine 1 (TRK1) | TRK1 | — |
| | | | | | on chromosome 17. | | |
| 72 | 26 | 70008 | NM_000433.2 | NM_000433 | neutrophil cytosolic | NCF2 | p67phox; NOXA2; |
| | | | | | factor 2 (65 kDa, chronic | | P67-PHOX |
| | | | | | granulomatous | | |
| | | | | | disease, autosomal 2) | | |
| | | | | | (NCF2), mRNA. | | |
| 73 | 27 | 270544 | NM_003297.1 | NM_003297 | nuclear receptor | NR2C1 | TR2-11; TR2 |
| | | | | | subfamily 2, group C, | | |
| | | | | | member 1 (NR2C1), | | |
| | | | | | transcript variant 1, | | |
| | | | | | mRNA. | | |
| 74 | 28 | 450195 | NM_001788.4 | NM_001788 | septin 7 (SEPT7), | SEPT7 | Nbla02942; CDC10; |
| | | | | | transcript variant 1, | | SEPT7A; CDC3 |
| | | | | | mRNA. | | |
| 75 | 29 | 450431 | NM_199424.1 | NM_199424 | WW domain containing | WWP2 | WWp2-like; AIP2 |
| | | | | | E3 ubiquitin protein | | |
| | | | | | ligase 2 (WWP2), | | |
| | | | | | transcript variant 2, | | |
| | | | | | mRNA. | | |
| 76 | 30 | 450615 | NM_005953.2 | NM_005953 | metallothionein 2A | MT2A | MT2 |
| | | | | | (MT2A), mRNA. | | |
| 77 | 31 | 450762 | NM_021642.2 | NM_021642 | Fc fragment of IgG, low | FCGR2A | FCGR2A1; CDw32; |
| | | | | | affinity IIa, receptor | | CD32A; CD32; FcGR; |
| | | | | | (CD32) (FCGR2A), | | FCG2; IGFR2; |
| | | | | | mRNA. | | FCGR2; MGC30032; |
| | | | | | | | MGC23887 |
| 78 | 32 | 460411 | NM_006390.2 | NM_006390 | importin 8 (IPO8), | IPO8 | FLJ26580; RANBP8 |
| | | | | | mRNA. | | |
| 79 | 33 | 460750 | NM_024065.3 | NM_024065 | phosducin-like 3 | PDCL3 | VIAF1; HTPHLP; |
| | | | | | (PDCL3), mRNA. | | MGC3062 |
| 80 | 34 | 520133 | NM_001005849.1 | NM_001005849 | SMT3 suppressor of | SUMO2 | SMT3H2; HSMT3; |
| | | | | | mif two 3 homolog 2 (S. cerevisiae) | | MGC117191; SMT3B |
| | | | | | (SUMO2), | | |
| | | | | | transcript variant 2, | | |
| | | | | | mRNA. | | |
| 81 | 35 | 520392 | NM_023914.2 | NM_023914 | purinergic receptor | P2RY13 | P2Y13; FKSG77; |
| | | | | | P2Y, G-protein | | SP174; GPR94; |
| | | | | | coupled, 13 (P2RY13), | | GPCR1; GPR86 |
| | | | | | transcript variant 1, | | |
| | | | | | mRNA. | | |
| 82 | 36 | 580255 | NM_001624.2 | NM_001624 | absent in melanoma 1 | AIM1 | ST4 |
| | | | | | (AIM1), mRNA. | | |
| 83 | 37 | 610014 | NM_003541.2 | NM_003541 | histone cluster 1, H4k | HIST1H4K | dJ160A22.1; H4/d; |
| | | | | | (HIST1H4K), mRNA. | | H4FD; H4F2iii |
| 84 | 38 | 610309 | NM_207115.1 | NM_207115 | zinc finger protein 580 | ZNF580 | — |
| | | | | | (ZNF580), transcript | | |
| | | | | | variant 2, mRNA. | | |
| 85 | 39 | 610670 | NM_145805.1 | NM_145805 | ISL LIM homeobox 2 | ISL2 | FLJ10160 |
| | | | | | (ISL2), mRNA. | | |
| 86 | 40 | 620047 | NM_004331.2 | NM_004331 | BCL2/adenovirus E1B | BNIP3L | BNIP3a; NIX |
| | | | | | 19 kDa interacting | | |
| | | | | | protein 3-like (BNIP3L), | | |
| | | | | | mRNA. | | |
| 87 | 41 | 630403 | NM_005830.2 | NM_005830 | mitochondrial ribosomal | MRPS31 | MRP-S31; IMOGN38 |
| | | | | | protein S31 (MRPS31), | | |
| | | | | | nuclear gene encoding | | |
| | | | | | mitochondrial protein, | | |
| | | | | | mRNA. | | |
| 88 | 42 | 630706 | NM_144653.3 | NM_144653 | BTB (POZ) domain | BTBD14A | BTBD14; MGC23427 |
| | | | | | containing 14A | | |
| | | | | | (BTBD14A), mRNA. | | |
| 89 | 43 | 670255 | NM_001924.2 | NM_001924 | growth arrest and DNA- | GADD45A | GADD45; DDIT1 |
| | | | | | damage-inducible, | | |
| | | | | | alpha (GADD45A), | | |
| | | | | | mRNA. | | |
| 90 | 44 | 780603 | NR_002305.1 | NR_002305 | protein disulfide | PDIA3P | ERp60; GRP58P |
| | | | | | isomerase family A, | | |
| | | | | | member 3 pseudogene | | |
| | | | | | (PDIA3P) on | | |
| | | | | | chromosome 1. | | |
| 91 | 45 | 830041 | NM_001005193.1 | NM_001005193 | olfactory receptor, | OR7G2 | OST260; OR19-6 |
| | | | | | family 7, subfamily G, | | |
| | | | | | member 2 (OR7G2), | | |
| | | | | | mRNA. | | |
| 92 | 46 | 830619 | NM_004083.4 | NM_004083 | DNA-damage-inducible | DDIT3 | MGC4154; CEBPZ; |
| | | | | | transcript 3 (DDIT3), | | CHOP10; CHOP; |
| | | | | | mRNA. | | GADD153 |
| 93 | 47 | 870082 | NM_012402.2 | NM_012402 | ADP-ribosylation factor | ARFIP2 | POR1 |
| | | | | | interacting protein 2 | | |
| | | | | | (arfaptin 2) (ARFIP2), | | |
| | | | | | mRNA. | | |
| 94 | 48 | 990056 | NM_020706.1 | NM_020706 | splicing factor, | SFRS15 | SCAF4; |
| | | | | | arginine/serine-rich 15 | | DKFZP434E098; |
| | | | | | (SFRS15), mRNA. | | FLJ23364; SRA4; |
| | | | | | | | KIAA1172 |
| 95 | 49 | 990273 | NM_000998.4 | NM_000998 | ribosomal protein L37a | RPL37A | MGC74786 |
| | | | | | (RPL37A), mRNA. | | |
| 96 | 50 | 990543 | NM_004768.2 | NM_004768 | splicing factor, | SFRS11 | DKFZp686M13204; |
| | | | | | arginine/serine-rich 11 | | dJ677H15.2; p54 |
| | | | | | (SFRS11), mRNA. | | |
| 97 | 51 | 1030431 | NM_001995.2 | NM_001995 | acyl-CoA synthetase | ACSL1 | FACL2; LACS; |
| | | | | | long-chain family | | FACL1; ACS1; |
| | | | | | member 1 (ACSL1), | | LACS2; LACS1 |
| | | | | | mRNA. | | |
| 98 | 53 | 1050762 | NM_003844.2 | NM_003844 | tumor necrosis factor | TNFRSF10A | TRAILR1; MGC9365; |
| | | | | | receptor superfamily, | | APO2; DR4; CD261; |
| | | | | | member 10a | | TRAILR-1 |
| | | | | | (TNFRSF10A), mRNA. | | |
| 99 | 54 | 1070373 | NM_001012994.1 | NM_001012994 | sorting nexin family | SNX30 | FLJ35589; FLJ46877; |
| | | | | | member 30 (SNX30), | | FLJ45069; FLJ26481; |
| | | | | | mRNA. | | FLJ44686; FLJ34280 |
| 100 | 55 | 1070435 | NM_201433.1 | NM_201433 | growth arrest-specific 7 | GAS7 | MGC1348; |
| | | | | | (GAS7), transcript | | MLL/GAS7; |
| | | | | | variant c, mRNA. | | KIAA0394 |
| 101 | 56 | 1070593 | NM_007246.2 | NM_007246 | kelch-like 2, Mayven | KLHL2 | ABP-KELCH; MAV; |
| | | | | | (Drosophila) (KLHL2), | | MAYVEN |
| | | | | | mRNA. | | |
| 102 | 57 | 1090474 | NM_000073.1 | NM_000073 | CD3g molecule, | CD3G | MGC138597; CD3- |
| | | | | | gamma (CD3-TCR | | GAMMA; T3G |
| | | | | | complex) (CD3G), | | |
| | | | | | mRNA. | | |
| 103 | 60 | 1230292 | NM_080651.1 | NM_080651 | mediator complex | MED30 | TRAP25; MGC9890; |
| | | | | | subunit 30 (MED30), | | MED30; THRAP6 |
| | | | | | mRNA. | | |
| 104 | 61 | 1240064 | NM_012482.3 | NM_012482 | zinc finger protein 281 | ZNF281 | FLJ12859; ZNP-99; |
| | | | | | (ZNF281), mRNA. | | ZBP-99; FLJ14378 |
| 105 | 62 | 1240142 | NM_017654.2 | NM_017654 | sterile alpha motif | SAMD9 | KIAA2004; C7orf5; |
| | | | | | domain containing 9 | | OEF1; FLJ20073; |
| | | | | | (SAMD9), mRNA. | | NFTC; OEF2 |
| 106 | 63 | 1240192 | NM_001319.5 | NM_001319 | casein kinase 1, | CSNK1G2 | CK1g2 |
| | | | | | gamma 2 (CSNK1G2), | | |
| | | | | | mRNA. | | |
| 107 | 64 | 1260136 | NM_001080497.1 | NM_001080497 | multiple EGF-like- | MEGF9 | EGFL5 |
| | | | | | domains 9 (MEGF9), | | |
| | | | | | mRNA. | | |
| 108 | 65 | 1340537 | NM_001001655.1 | NM_001001655 | alkB, alkylation repair | ALKBH2 | ABH2; MGC90512; |
| | | | | | homolog 2 (E. coli) | | hABH2 |
| | | | | | (ALKBH2), mRNA. | | |
| 109 | 66 | 1410068 | NM_019884.2 | NM_019884 | glycogen synthase | GSK3A | DKFZp686D0638 |
| | | | | | kinase 3 alpha | | |
| | | | | | (GSK3A), mRNA. | | |
| 110 | 67 | 1410168 | NM_001421.2 | NM_001421 | E74-like factor 4 (ets | ELF4 | MEF; ELFR |
| | | | | | domain transcription | | |
| | | | | | factor) (ELF4), mRNA. | | |
| 111 | 68 | 1410221 | NM_005621.1 | NM_005621 | S100 calcium binding | S100A12 | CAAF1; CAGC; |
| | | | | | protein A12 (S100A12), | | ENRAGE; p6; CGRP; |
| | | | | | mRNA. | | MRP6 |
| 112 | 69 | 1410411 | NM_182710.1 | NM_182710 | HIV-1 Tat interacting | HTATIP | ESA1; TIP60; TIP; |
| | | | | | protein, 60 kDa | | PLIP; HTATIP1; |
| | | | | | (HTATIP), transcript | | cPLA2 |
| | | | | | variant 1, mRNA. | | |
| 113 | 70 | 1430347 | NM_001076785.1 | NM_001076785 | solute carrier family 7 | SLC7A6 | DKFZp686K15246; |
| | | | | | (cationic amino acid | | KIAA0245; LAT3; |
| | | | | | transporter, y+ system), | | LAT-2; y+LAT-2 |
| | | | | | member 6 (SLC7A6), | | |
| | | | | | transcript variant 2, | | |
| | | | | | mRNA. | | |
| 114 | 71 | 1440296 | NM_005324.3 | NM_005324 | H3 histone, family 3B | H3F3B | H3F3A; H3.3B |
| | | | | | (H3.3B) (H3F3B), | | |
| | | | | | mRNA. | | |
| 115 | 72 | 1440747 | NM_003544.2 | NM_003544 | histone cluster 1, H4b | HIST1H4B | H4FI; H4/I |
| | | | | | (HIST1H4B), mRNA. | | |
| 116 | 73 | 1470209 | NM_019026.2 | NM_019026 | transmembrane and | TMCO1 | HP10122; TMCC4; |
| | | | | | coiled-coil domains 1 | | RP11-466F5.7; |
| | | | | | (TMCO1), mRNA. | | PCIA3; PNAS-136 |
| 117 | 74 | 1510538 | NM_012307.2 | NM_012307 | erythrocyte membrane | EPB41L3 | DAL-1; KIAA0987; |
| | | | | | protein band 4.1-like 3 | | 4.1B; FLJ37633; |
| | | | | | (EPB41L3), mRNA. | | DAL1 |
| 118 | 75 | 1570575 | NM_014574.3 | NM_014574 | striatin, calmodulin | STRN3 | SG2NA |
| | | | | | binding protein 3 | | |
| | | | | | (STRN3), transcript | | |
| | | | | | variant 2, mRNA. | | |
| 119 | 76 | 1660687 | NM_001018089.1 | NM_001018089 | NMDA receptor | NARG2 | BRCC1 |
| | | | | | regulated 2 (NARG2), | | |
| | | | | | transcript variant 2, | | |
| | | | | | mRNA. | | |
| 120 | 77 | 1690189 | NM_152453.2 | NM_152453 | transmembrane and | TMCO5 | MGC35118; |
| | | | | | coiled-coil domains 5 | | FLJ35807 |
| | | | | | (TMCO5), mRNA. | | |
| 121 | 78 | 1740220 | NM_004038.3 | NM_004038 | amylase, alpha 1A | AMY1A | AMY1; AMY1B |
| | | | | | (salivary) (AMY1A), | | |
| | | | | | transcript variant 1, | | |
| | | | | | mRNA. | | |
| 122 | 79 | 1770609 | NM_198486.2 | NM_198486 | ribosomal protein L7- | RPL7L1 | MGC62004; |
| | | | | | like 1 (RPL7L1), | | dJ475N16.4 |
| | | | | | mRNA. | | |
| 123 | 80 | 1780273 | XM_001127464.1 | XM_001127464 | PREDICTED: | ALOX5 | — |
| | | | | | arachidonate 5- | | |
| | | | | | lipoxygenase (ALOX5), | | |
| | | | | | mRNA. | | |
| 124 | 81 | 1780647 | NM_052853.3 | NM_052853 | aarF domain containing | ADCK2 | MGC20727; AARF |
| | | | | | kinase 2 (ADCK2), | | |
| | | | | | mRNA. | | |
| 125 | 82 | 1820544 | NM_182679.1 | NM_182679 | G patch domain | GPATCH4 | GPATC4 |
| | | | | | containing 4 | | |
| | | | | | (GPATCH4), transcript | | |
| | | | | | variant 2, mRNA. | | |
| 126 | 83 | 1940041 | NM_000631.3 | NM_000631 | neutrophil cytosolic | NCF4 | SH3PXD4; |
| | | | | | factor 4, 40 kDa (NCF4), | | P40PHOX; NCF; |
| | | | | | transcript variant 1, | | MGC3810 |
| | | | | | mRNA. | | |
| 127 | 84 | 1940053 | NM_001681.2 | NM_001681 | ATPase, Ca++ | ATP2A2 | DAR; ATP2B; |
| | | | | | transporting, cardiac | | MGC45367; DD; |
| | | | | | muscle, slow twitch 2 | | SERCA2 |
| | | | | | (ATP2A2), transcript | | |
| | | | | | variant 2, mRNA. | | |
| 128 | 85 | 1980594 | NR_002203.1 | NR_002203 | ferritin, heavy | FTHL8 | — |
| | | | | | polypeptide-like 8 | | |
| | | | | | (FTHL8) on | | |
| | | | | | chromosome X. | | |
| 129 | 86 | 1990278 | NM_021642.2 | NM_021642 | Fc fragment of IgG, low | FCGR2A | FCGR2A1; CDw32; |
| | | | | | affinity IIa, receptor | | CD32A; CD32; FcGR; |
| | | | | | (CD32) (FCGR2A), | | FCG2; IGFR2; |
| | | | | | mRNA. | | FCGR2; MGC30032; |
| | | | | | | | MGC23887 |
| 130 | 87 | 2000010 | NM_006231.2 | NM_006231 | polymerase (DNA | POLE | DKFZp434F222; |
| | | | | | directed), epsilon | | FLJ21434; POLE1 |
| | | | | | (POLE), mRNA. | | |
| 131 | 88 | 2000048 | NM_173683.3 | NM_173683 | XK, Kell blood group | XKR6 | C8orf7; XRG6; |
| | | | | | complex subunit-related | | C8orf21 |
| | | | | | family, member 6 | | |
| | | | | | (XKR6), transcript | | |
| | | | | | variant 2, mRNA. | | |
| 132 | 89 | 2030243 | NM_013393.1 | NM_013393 | FtsJ homolog 2 (E. coli) | FTSJ2 | FJH1; |
| | | | | | (FTSJ2), mRNA. | | DKFZp686J14194 |
| 133 | 90 | 2060291 | NM_004099.4 | NM_004099 | stomatin (STOM), | STOM | EPB7; EPB72; BND7 |
| | | | | | transcript variant 1, | | |
| | | | | | mRNA. | | |
| 134 | 91 | 2070288 | NM_175617.3 | NM_175617 | metallothionein 1E | MT1E | MT1; MTD |
| | | | | | (MT1E), mRNA. | | |
| 135 | 92 | 2100196 | NM_005101.1 | NM_005101 | ISG15 ubiquitin-like | ISG15 | G1P2; UCRP; IFI15 |
| | | | | | modifier (ISG15), | | |
| | | | | | mRNA. | | |
| 136 | 93 | 2100273 | NM_001402.5 | NM_001402 | eukaryotic translation | EEF1A1 | EEF1A; FLJ25721; |
| | | | | | elongation factor 1 | | CCS-3; PTI1; CCS3; |
| | | | | | alpha 1 (EEF1A1), | | MGC102687; |
| | | | | | mRNA. | | MGC16224; EF-Tu; |
| | | | | | | | eEF1A-1; EEF-1; |
| | | | | | | | MGC131894; |
| | | | | | | | HNGC: 16303; GRAF- |
| | | | | | | | 1EF; LENG7; EF1A |
| 137 | 94 | 2100292 | NM_002893.2 | NM_002893 | retinoblastoma binding | RBBP7 | RbAp46; |
| | | | | | protein 7 (RBBP7), | | MGC138867; |
| | | | | | mRNA. | | MGC138868 |
| 138 | 95 | 2140753 | NM_001034996.1 | NM_001034996 | ribosomal protein L14 | RPL14 | CAG-ISL-7; CTG- |
| | | | | | (RPL14), transcript | | B33; L14; |
| | | | | | variant 1, mRNA. | | MGC88594; RL14; |
| | | | | | | | hRL14 |
| 139 | 96 | 2230678 | NM_001093.3 | NM_001093 | acetyl-Coenzyme A | ACACB | ACC2; ACCB; |
| | | | | | carboxylase beta | | HACC275 |
| | | | | | (ACACB), mRNA. | | |
| 140 | 97 | 2320053 | NM_024632.4 | NM_024632 | SAP30-like (SAP30L), | SAP30L | FLJ11526; NS4ATP2 |
| | | | | | mRNA. | | |
| 141 | 98 | 2320139 | NM_002954.3 | NM_002954 | ribosomal protein S27a | RPS27A | UBCEP1; UBA80; |
| | | | | | (RPS27A), mRNA. | | CEP80; HUBCEP80; |
| | | | | | | | UBCEP80 |
| 142 | 99 | 2320653 | NM_018281.2 | NM_018281 | enoyl Coenzyme A | ECHDC2 | FLJ10948 |
| | | | | | hydratase domain | | |
| | | | | | containing 2 | | |
| | | | | | (ECHDC2), mRNA. | | |
| 143 | 100 | 2340626 | NM_016020.1 | NM_016020 | transcription factor B1, | TFB1M | CGI75; mtTFB; CGI- |
| | | | | | mitochondrial (TFB1M), | | 75 |
| | | | | | mRNA. | | |
| 144 | 101 | 2350192 | NM_018694.2 | NM_018694 | ADP-ribosylation-like | ARL6IP4 | MGC814; SRp25; |
| | | | | | factor 6 interacting | | SR-25 |
| | | | | | protein 4 (ARL6IP4), | | |
| | | | | | transcript variant 1, | | |
| | | | | | mRNA. | | |
| 145 | 102 | 2350563 | NM_005791.1 | NM_005791 | M-phase | MPHOSPH10 | MPP10P; MPP10 |
| | | | | | phosphoprotein 10 (U3 | | |
| | | | | | small | | |
| | | | | | nucleolarribonucleoprotein) | | |
| | | | | | (MPHOSPH10), | | |
| | | | | | mRNA. | | |
| 146 | 103 | 2360528 | NM_182776.1 | NM_182776 | minichromosome | MCM7 | MCM2; CDC47; P1.1- |
| | | | | | maintenance complex | | MCM3; P1CDC47; |
| | | | | | component 7 (MCM7), | | CDABP0042; |
| | | | | | transcript variant 2, | | P85MCM; PNAS-146 |
| | | | | | mRNA. | | |
| 147 | 104 | 2450446 | NM_015906.3 | NM_015906 | tripartite motif- | TRIM33 | FLJ32925; TIF1G; |
| | | | | | containing 33 | | RFG7; PTC7; TF1G; |
| | | | | | (TRIM33), transcript | | TIF1GAMMA; |
| | | | | | variant a, mRNA. | | TIFGAMMA |
| 148 | 105 | 2480037 | NM_178868.3 | NM_178868 | CKLF-like MARVEL | CMTM8 | CKLFSF8; CKLFSF8- |
| | | | | | transmembrane | | V2 |
| | | | | | domain containing 8 | | |
| | | | | | (CMTM8), mRNA. | | |
| 149 | 106 | 2480328 | NM_032361.1 | NM_032361 | THO complex 3 | THOC3 | TEX1; MGC5469 |
| | | | | | (THOC3), mRNA. | | |
| 150 | 107 | 2480487 | NM_005819.4 | NM_005819 | syntaxin 6 (STX6), | STX6 | — |
| | | | | | mRNA. | | |
| 151 | 108 | 2490333 | NM_207336.1 | NM_207336 | zinc finger protein 467 | ZNF467 | EZI; Zfp467 |
| | | | | | (ZNF467), mRNA. | | |
| 152 | 109 | 2570100 | NM_019112.3 | NM_019112 | ATP-binding cassette, | ABCA7 | ABCA-SSN; ABCX; |
| | | | | | sub-family A (ABC1), | | FLJ40025 |
| | | | | | member 7 (ABCA7), | | |
| | | | | | mRNA. | | |
| 153 | 110 | 2570288 | NM_015677.1 | NM_015677 | SH3 domain | SH3YL1 | FLJ39121; Ray; |
| | | | | | containing, Ysc84-like 1 | | DKFZP586F1318 |
| | | | | | (S. cerevisiae) | | |
| | | | | | (SH3YL1), mRNA. | | |
| 154 | 111 | 2570328 | NM_021643.1 | NM_021643 | tribbles homolog 2 | TRIB2 | TRB2; GS3955 |
| | | | | | (Drosophila) (TRIB2), | | |
| | | | | | mRNA. | | |
| 155 | 112 | 2600204 | NM_014016.2 | NM_014016 | SAC1 suppressor of | SACM1L | KIAA0851; SAC1; |
| | | | | | actin mutations 1-like | | DKFZp686A0231 |
| | | | | | (yeast) (SACM1L), | | |
| | | | | | mRNA. | | |
| 156 | 113 | 2640541 | NM_006364.2 | NM_006364 | Sec23 homolog A (S. cerevisiae) | SEC23A | CLSD; MGC26267 |
| | | | | | (SEC23A), | | |
| | | | | | mRNA. | | |
| 157 | 114 | 2640707 | XM_001130839.1 | XM_001130839 | PREDICTED: nuclear | NR1D2 | — |
| | | | | | receptor subfamily 1, | | |
| | | | | | group D, member 2 | | |
| | | | | | (NR1D2), mRNA. | | |
| 158 | 115 | 2680082 | NM_000971.3 | NM_000971 | ribosomal protein L7 | RPL7 | MGC117326; humL7-1 |
| | | | | | (RPL7), mRNA. | | |
| 159 | 116 | 2690224 | NM_030980.1 | NM_030980 | interferon stimulated | ISG20L2 | FLJ12671 |
| | | | | | exonuclease gene | | |
| | | | | | 20 kDa-like 2 | | |
| | | | | | (ISG20L2), mRNA. | | |
| 160 | 117 | 2710196 | NM_018428.2 | NM_018428 | UTP6, small subunit | UTP6 | HCA66; C17orf40 |
| | | | | | (SSU) processome | | |
| | | | | | component, homolog | | |
| | | | | | (yeast) (UTP6), mRNA. | | |
| 161 | 118 | 2760537 | NM_175621.2 | NM_175621 | metallothionein E | MTE | MT1I |
| | | | | | (MTE), mRNA. | | |
| 162 | 119 | 2970079 | NM_003274.3 | NM_003274 | transmembrane protein | TMEM1 | EHOC-1; |
| | | | | | 1 (TMEM1), transcript | | MGC126777; |
| | | | | | variant 1, mRNA. | | EHOC1; GT334 |
| 163 | 120 | 2970594 | NM_138373.3 | NM_138373 | myeloid-associated | MYADM | SB135 |
| | | | | | differentiation marker | | |
| | | | | | (MYADM), transcript | | |
| | | | | | variant 2, mRNA. | | |
| 164 | 121 | 3130600 | NM_007048.4 | NM_007048 | butyrophilin, subfamily | BTN3A1 | BT3.1; CD277; |
| | | | | | 3, member A1 | | MGC141880; BTF5 |
| | | | | | (BTN3A1), mRNA. | | |
| 165 | 122 | 3140041 | NM_007237.3 | NM_007237 | SP140 nuclear body | SP140 | MGC126440; |
| | | | | | protein (SP140), | | LYSP100-B; |
| | | | | | transcript variant 1, | | LYSP100-A |
| | | | | | mRNA. | | |
| 166 | 123 | 3170440 | NM_022893.2 | NM_022893 | B-cell CLL/lymphoma | BCL11A | BCL11A-L; CTIP1; |
| | | | | | 11A (zinc finger protein) | | FLJ10173; EVI9; |
| | | | | | (BCL11A), transcript | | BCL11A-XL; |
| | | | | | variant 1, mRNA. | | BCL11A-S; |
| | | | | | | | FLJ34997; KIAA1809 |
| 167 | 124 | 3170451 | NM_024815.3 | NM_024815 | nudix (nucleoside | NUDT18 | FLJ22494 |
| | | | | | diphosphate linked | | |
| | | | | | moiety X)-type motif 18 | | |
| | | | | | (NUDT18), mRNA. | | |
| 168 | 125 | 3180273 | NM_020315.4 | NM_020315 | pyridoxal (pyridoxine, | PDXP | CIN; FLJ32703; PLP; |
| | | | | | vitamin B6) | | dJ37E16.5 |
| | | | | | phosphatase (PDXP), | | |
| | | | | | mRNA. | | |
| 169 | 126 | 3190133 | NR_002205.1 | NR_002205 | ferritin, heavy | FTHL12 | — |
| | | | | | polypeptide-like 12 | | |
| | | | | | (FTHL12) on | | |
| | | | | | chromosome 9. | | |
| 170 | 127 | 3310546 | NM_001950.3 | NM_001950 | E2F transcription factor | E2F4 | E2F-4 |
| | | | | | 4, p107/p130-binding | | |
| | | | | | (E2F4), mRNA. | | |
| 171 | 128 | 3370474 | NM_013368.2 | NM_013368 | SERTA domain | SERTAD3 | RBT1 |
| | | | | | containing 3 | | |
| | | | | | (SERTAD3), transcript | | |
| | | | | | variant 1, mRNA. | | |
| 172 | 129 | 3450278 | NM_172232.1 | NM_172232 | ATP-binding cassette, | ABCA5 | FLJ16381; |
| | | | | | sub-family A (ABC1), | | DKFZp779N2435; |
| | | | | | member 5 (ABCA5), | | DKFZp451F117; |
| | | | | | transcript variant 2, | | EST90625; ABC13 |
| | | | | | mRNA. | | |
| 173 | 130 | 3450463 | NM_183376.1 | NM_183376 | arrestin domain | ARRDC4 | FLJ36045 |
| | | | | | containing 4 | | |
| | | | | | (ARRDC4), mRNA. | | |
| 174 | 131 | 3450537 | NM_032564.2 | NM_032564 | diacylglycerol O- | DGAT2 | HMFN1045; |
| | | | | | acyltransferase | | DKFZp686A15125 |
| | | | | | homolog 2 (mouse) | | |
| | | | | | (DGAT2), mRNA. | | |
| 175 | 132 | 3520093 | NM_021070.2 | NM_021070 | latent transforming | LTBP3 | FLJ44138; FLJ42533; |
| | | | | | growth factor beta | | FLJ39893; LTBP-3; |
| | | | | | binding protein 3 | | pp6425; FLJ33431; |
| | | | | | (LTBP3), mRNA. | | LTBP2; |
| | | | | | | | DKFZP586M2123 |
| 176 | 133 | 3520598 | NM_019858.1 | NM_019858 | G protein-coupled | GPR162 | GRCA; A-2 |
| | | | | | receptor 162 | | |
| | | | | | (GPR162), transcript | | |
| | | | | | variant A-2, mRNA. | | |
| 177 | 134 | 3610630 | NM_016302.2 | NM_016302 | cereblon (CRBN), | CRBN | MGC27358; |
| | | | | | mRNA. | | DKFZp781K0715; |
| | | | | | | | MRT2A |
| 178 | 135 | 3710735 | NM_153819.1 | NM_153819 | RAS guanyl releasing | RASGRP2 | CDC25L; CALDAG- |
| | | | | | protein 2 (calcium and | | GEFI |
| | | | | | DAG-regulated) | | |
| | | | | | (RASGRP2), transcript | | |
| | | | | | variant 2, mRNA. | | |
| 179 | 136 | 3780544 | NM_016047.3 | NM_016047 | splicing factor 3B, 14 kDa | SF3B14 | Ht006; SF3B14a; |
| | | | | | subunit (SF3B14), | | SAP14; CGI-110; |
| | | | | | mRNA. | | HSPC175; P14 |
| 180 | 137 | 3800576 | NM_080914.1 | NM_080914 | asialoglycoprotein | ASGR2 | L-H2; CLEC4H2; |
| | | | | | receptor 2 (ASGR2), | | Hs.1259; ASGP-R |
| | | | | | transcript variant 3, | | |
| | | | | | mRNA. | | |
| 181 | 138 | 3830273 | NM_020202.2 | NM_020202 | nitrilase family, member | NIT2 | MGC111199 |
| | | | | | 2 (NIT2), mRNA. | | |
| 182 | 139 | 3830653 | NM_006736.5 | NM_006736 | DnaJ (Hsp40) homolog, | DNAJB2 | HSPF3; HSJ1 |
| | | | | | subfamily B, member 2 | | |
| | | | | | (DNAJB2), transcript | | |
| | | | | | variant 2, mRNA. | | |
| 183 | 140 | 3850059 | NM_005574.2 | NM_005574 | LIM domain only 2 | LMO2 | TTG2; RBTN2; |
| | | | | | (rhombotin-like 1) | | RBTNL1; RHOM2 |
| | | | | | (LMO2), mRNA. | | |
| 184 | 141 | 3890689 | NM_198053.1 | NM_198053 | CD247 molecule | CD247 | CD3Q; CD3H; TCRZ; |
| | | | | | (CD247), transcript | | CD3Z; CD3-ZETA |
| | | | | | variant 1, mRNA. | | |
| 185 | 142 | 3930133 | NM_199004.1 | NM_199004 | arrestin, beta 2 | ARRB2 | ARR2; ARB2; |
| | | | | | (ARRB2), transcript | | DKFZp686L0365 |
| | | | | | variant 2, mRNA. | | |
| 186 | 143 | 3930392 | NM_001097577.1 | NM_001097577 | angiogenin, | ANG | RNASE5; |
| | | | | | ribonuclease, RNase A | | MGC22466; |
| | | | | | family, 5 (ANG), | | RNASE4; MGC71966 |
| | | | | | transcript variant 2, | | |
| | | | | | mRNA. | | |
| 187 | 144 | 3940138 | NM_001009944.1 | NM_001009944 | polycystic kidney | PKD1 | PBP |
| | | | | | disease 1 (autosomal | | |
| | | | | | dominant) (PKD1), | | |
| | | | | | transcript variant 1, | | |
| | | | | | mRNA. | | |
| 188 | 145 | 3940358 | NM_001003712.1 | NM_001003712 | oxysterol binding | OSBPL8 | MSTP120; ORP8; |
| | | | | | protein-like 8 | | MST120; |
| | | | | | (OSBPL8), transcript | | MGC126578; |
| | | | | | variant 2, mRNA. | | DKFZp686A11164; |
| | | | | | | | OSBP10; |
| | | | | | | | MGC133203 |
| 189 | 146 | 3990112 | NM_001042445.1 | NM_001042445 | calpastatin (CAST), | CAST | MGC9402; BS-17 |
| | | | | | transcript variant 11, | | |
| | | | | | mRNA. | | |
| 190 | 147 | 4010400 | NM_002480.1 | NM_002480 | protein phosphatase 1, | PPP1R12A | MGC133042; MYPT1; |
| | | | | | regulatory (inhibitor) | | MBS |
| | | | | | subunit 12A | | |
| | | | | | (PPP1R12A), mRNA. | | |
| 191 | 148 | 4040088 | NM_152772.1 | NM_152772 | t-complex 11 (mouse)- | TCP11L2 | MGC40368 |
| | | | | | like 2 (TCP11L2), | | |
| | | | | | mRNA. | | |
| 192 | 149 | 4120039 | NR_002200.1 | NR_002200 | ferritin, heavy | FTHL2 | — |
| | | | | | polypeptide-like 2 | | |
| | | | | | (FTHL2) on | | |
| | | | | | chromosome 1. | | |
| 193 | 150 | 4120341 | NM_002208.4 | NM_002208 | integrin, alpha E | ITGAE | HUMINAE; CD103; |
| | | | | | (antigen CD103, | | MGC141996 |
| | | | | | human mucosal | | |
| | | | | | lymphocyte antigen 1; | | |
| | | | | | alpha polypeptide) | | |
| | | | | | (ITGAE), mRNA. | | |
| 194 | 151 | 4150132 | NM_017514.2 | NM_017514 | plexin A3 (PLXNA3), | PLXNA3 | XAP-6; |
| | | | | | mRNA. | | HSSEXGENE; |
| | | | | | | | PLEXIN-A3; PLXN4; |
| | | | | | | | SEX; PLXN3; 6.3 |
| 195 | 152 | 4200068 | NM_016553.3 | NM_016553 | nucleoporin 62 kDa | NUP62 | FLJ43869; |
| | | | | | (NUP62), transcript | | DKFZp547L134; |
| | | | | | variant 2, mRNA. | | MGC841; p62; SNDI; |
| | | | | | | | IBSN; FLJ20822 |
| 196 | 153 | 4210465 | NM_006889.3 | NM_006889 | CD86 molecule | CD86 | B7-2; B70; LAB72; |
| | | | | | (CD86), transcript | | MGC34413; |
| | | | | | variant 2, mRNA. | | CD28LG2 |
| 197 | 154 | 4220468 | NM_001001787.1 | NM_001001787 | ATPase, Na+/K+ | ATP1B1 | MGC1798; ATP1B |
| | | | | | transporting, beta 1 | | |
| | | | | | polypeptide (ATP1B1), | | |
| | | | | | transcript variant 2, | | |
| | | | | | mRNA. | | |
| 198 | 155 | 4220632 | XM_001133534.1 | XM_001133534 | PREDICTED: ATPase, | ATP1B3 | — |
| | | | | | Na+/K+ transporting, | | |
| | | | | | beta 3 polypeptide, | | |
| | | | | | transcript variant 2 | | |
| | | | | | (ATP1B3), mRNA. | | |
| 199 | 156 | 4220672 | NM_005949.2 | NM_005949 | metallothionein 1F | MT1F | MT1; MGC32732 |
| | | | | | (MT1F), mRNA. | | |
| 200 | 157 | 4220731 | NM_000917.2 | NM_000917 | procollagen-proline, 2- | P4HA1 | P4HA; 4-PH alpha-1 |
| | | | | | oxoglutarate 4- | | |
| | | | | | dioxygenase (proline 4- | | |
| | | | | | hydroxylase), alpha | | |
| | | | | | polypeptide I (P4HA1), | | |
| | | | | | transcript variant 1, | | |
| | | | | | mRNA. | | |
| 201 | 158 | 4230093 | NM_001171.3 | NM_001171 | ATP-binding cassette, | ABCC6 | MOATE; EST349056; |
| | | | | | sub-family C | | ARA; PXE1; ABC34; |
| | | | | | (CFTR/MRP), member | | PXE; MLP1; MRP6 |
| | | | | | 6 (ABCC6), transcript | | |
| | | | | | variant 1, mRNA. | | |
| 202 | 159 | 4230097 | NM_002128.4 | NM_002128 | high-mobility group box | HMGB1 | DKFZp686A04236; |
| | | | | | 1 (HMGB1), mRNA. | | HMG3; SBP-1; HMG1 |
| 203 | 161 | 4250768 | NM_004645.2 | NM_004645 | coilin (COIL), mRNA. | COIL | p80-coilin; CLN80 |
| 204 | 162 | 4260221 | NM_145911.1 | NM_145911 | zinc finger protein 23 | ZNF23 | KOX16; Zfp612; |
| | | | | | (KOX 16) (ZNF23), | | ZNF359; ZNF612 |
| | | | | | mRNA. | | |
| 205 | 163 | 4280162 | NM_024041.2 | NM_024041 | sodium channel | SCNM1 | MGC3180 |
| | | | | | modifier 1 (SCNM1), | | |
| | | | | | mRNA. | | |
| 206 | 164 | 4390301 | NM_016113.3 | NM_016113 | transient receptor | TRPV2 | VRL; VRL-1; |
| | | | | | potential cation | | MGC12549; VRL1 |
| | | | | | channel, subfamily V, | | |
| | | | | | member 2 (TRPV2), | | |
| | | | | | mRNA. | | |
| 207 | 165 | 4490242 | NM_006256.2 | NM_006256 | protein kinase N2 | PKN2 | PRO2042; PAK2; |
| | | | | | (PKN2), mRNA. | | Pak-2; PRKCL2; |
| | | | | | | | MGC150606; |
| | | | | | | | MGC71074; PRK2 |
| 208 | 166 | 4640220 | NM_145113.1 | NM_145113 | MYC associated factor | MAX | MGC34679; |
| | | | | | X (MAX), transcript | | MGC36767; |
| | | | | | variant 3, mRNA. | | MGC11225; |
| | | | | | | | MGC10775; orf1; |
| | | | | | | | MGC18164 |
| 209 | 167 | 4670601 | NM_022804.2 | NM_022804 | SNRPN upstream | SNURF | — |
| | | | | | reading frame | | |
| | | | | | (SNURF), transcript | | |
| | | | | | variant 2, mRNA. | | |
| 210 | 168 | 4730148 | NM_004986.2 | NM_004986 | kinectin 1 (kinesin | KTN1 | KIAA0004; |
| | | | | | receptor) (KTN1), | | MGC133337; MU- |
| | | | | | transcript variant 4, | | RMS-40.19; CG1; |
| | | | | | mRNA. | | KNT |
| 211 | 169 | 4730181 | NR_002205.1 | NR_002205 | ferritin, heavy | FTHL12 | — |
| | | | | | polypeptide-like 12 | | |
| | | | | | (FTHL12) on | | |
| | | | | | chromosome 9. | | |
| 212 | 170 | 4760474 | NM_006000.1 | NM_006000 | tubulin, alpha 4a | TUBA4A | TUBA1; H2-ALPHA; |
| | | | | | (TUBA4A), mRNA. | | FLJ30169 |
| 213 | 171 | 4780678 | NM_001079.3 | NM_001079 | zeta-chain (TCR) | ZAP70 | FLJ17670; ZAP-70; |
| | | | | | associated protein | | TZK; STD; FLJ17679; |
| | | | | | kinase 70 kDa (ZAP70), | | SRK |
| | | | | | transcript variant 1, | | |
| | | | | | mRNA. | | |
| 214 | 173 | 4850091 | NM_006331.5 | NM_006331 | EMG1 nucleolar protein | EMG1 | Grcc2f; C2F; NEP1 |
| | | | | | homolog (S. cerevisiae) | | |
| | | | | | (EMG1), mRNA. | | |
| 215 | 174 | 4850327 | NM_016205.1 | NM_016205 | platelet derived growth | PDGFC | SCDGF |
| | | | | | factor C (PDGFC), | | |
| | | | | | mRNA. | | |
| 216 | 175 | 4860209 | NM_173468.2 | NM_173468 | MOB1, Mps One | MOBKL1A | MOB4A; MGC33910; |
| | | | | | Binder kinase activator- | | MATS2; Mob1B |
| | | | | | like 1A (yeast) | | |
| | | | | | (MOBKL1A), mRNA. | | |
| 217 | 176 | 4880215 | NM_001514.3 | NM_001514 | general transcription | GTF2B | TFIIB; TF2B |
| | | | | | factor IIB (GTF2B), | | |
| | | | | | mRNA. | | |
| 218 | 177 | 4890722 | NM_006139.1 | NM_006139 | CD28 molecule | CD28 | Tp44; MGC138290 |
| | | | | | (CD28), mRNA. | | |
| 219 | 178 | 4920347 | NM_016442.3 | NM_016442 | endoplasmic reticulum | ERAP1 | APPILS; ALAP; |
| | | | | | aminopeptidase 1 | | PILSAP; ERAP1; |
| | | | | | (ERAP1), transcript | | ERAAP; ARTS-1; |
| | | | | | variant 1, mRNA. | | ERAAP1; KIAA0525; |
| | | | | | | | A-LAP; PILS-AP; |
| | | | | | | | ARTS1 |
| 220 | 179 | 5050156 | NM_004050.2 | NM_004050 | BCL2-like 2 (BCL2L2), | BCL2L2 | KIAA0271; BCLW; |
| | | | | | mRNA. | | BCL-W |
| 221 | 180 | 5080246 | NM_003522.3 | NM_003522 | histone cluster 1, H2bf | HIST1H2BF | H2B/g; H2BFG |
| | | | | | (HIST1H2BF), mRNA. | | |
| 222 | 182 | 5090307 | NM_153362.1 | NM_153362 | protease, serine, 35 | PRSS35 | dJ223E3.1; |
| | | | | | (PRSS35), mRNA. | | MGC46520; C6orf158 |
| 223 | 183 | 5090397 | NM_206909.2 | NM_206909 | pleckstrin and Sec7 | PSD3 | DKFZp761K1423; |
| | | | | | domain containing 3 | | EFA6R; HCA67 |
| | | | | | (PSD3), transcript | | |
| | | | | | variant 2, mRNA. | | |
| 224 | 184 | 5090450 | NM_004818.2 | NM_004818 | DEAD (Asp-Glu-Ala- | DDX23 | U5-100K; prp28; |
| | | | | | Asp) box polypeptide | | PRPF28; MGC8416 |
| | | | | | 23 (DDX23), mRNA. | | |
| 225 | 185 | 5130750 | NM_002729.4 | NM_002729 | hematopoietically | HHEX | HEX; PRH; PRHX; |
| | | | | | expressed homeobox | | HOX11L-PEN; HMPH |
| | | | | | (HHEX), mRNA. | | |
| 226 | 186 | 5270291 | NM_017811.3 | NM_017811 | ubiquitin-conjugating | UBE2R2 | UBC3B; FLJ20419; |
| | | | | | enzyme E2R 2 | | MGC10481; CDC34B |
| | | | | | (UBE2R2), mRNA. | | |
| 227 | 187 | 5290369 | NM_032582.3 | NM_032582 | ubiquitin specific | USP32 | USP10; NY-REN-60 |
| | | | | | peptidase 32 (USP32), | | |
| | | | | | mRNA. | | |
| 228 | 188 | 5290482 | NM_031943.1 | NM_031943 | IFP38 (IFP38), mRNA. | IFP38 | — |
| 229 | 189 | 5360500 | NM_152246.1 | NM_152246 | carnitinepalmitoyltransferase | CPT1B | CPT1-M; KIAA1670; |
| | | | | | 1B (muscle) | | M-CPT1 |
| | | | | | (CPT1B), nuclear gene | | |
| | | | | | encoding mitochondrial | | |
| | | | | | protein, transcript | | |
| | | | | | variant 3, mRNA. | | |
| 230 | 190 | 5390433 | NM_030621.2 | NM_030621 | Dicer1, Dcr-1 homolog | DICER1 | Dicer; HERNA; |
| | | | | | (Drosophila) (DICER1), | | KIAA0928 |
| | | | | | transcript variant 2, | | |
| | | | | | mRNA. | | |
| 231 | 191 | 5420575 | NM_001013251.1 | NM_001013251 | solute carrier family 3 | SLC3A2 | 4F2HC; CD98; 4F2; |
| | | | | | (activators of dibasic | | CD98HC; 4T2HC; |
| | | | | | and neutral amino acid | | MDU1; NACAE |
| | | | | | transport), member 2 | | |
| | | | | | (SLC3A2), transcript | | |
| | | | | | variant 6, mRNA. | | |
| 232 | 192 | 5490753 | NM_005467.2 | NM_005467 | N-acetylated alpha- | NAALAD2 | MGC26353; |
| | | | | | linked acidic | | MGC116996; |
| | | | | | dipeptidase 2 | | NAALADASE2; |
| | | | | | (NAALAD2), mRNA. | | NAADALASE2 |
| 233 | 193 | 5550369 | NM_001125.2 | NM_001125 | ADP-ribosylarginine | ADPRH | ARH1 |
| | | | | | hydrolase (ADPRH), | | |
| | | | | | mRNA. | | |
| 234 | 194 | 5670398 | NM_025191.2 | NM_025191 | ER degradation | EDEM3 | C1orf22 |
| | | | | | enhancer, | | |
| | | | | | mannosidase alpha-like | | |
| | | | | | 3 (EDEM3), mRNA. | | |
| 235 | 195 | 5670682 | XM_943640.2 | XM_943640 | PREDICTED: | FLJ32255 | — |
| | | | | | hypothetical protein | | |
| | | | | | LOC643977, transcript | | |
| | | | | | variant 2 (FLJ32255), | | |
| | | | | | mRNA. | | |
| 236 | 196 | 5810398 | NM_001080547.1 | NM_001080547 | spleen focus forming | SPI1 | SPI-A; OF; SFPI1; |
| | | | | | virus (SFFV) | | PU.1; SPI-1 |
| | | | | | proviralintegration | | |
| | | | | | oncogene spi1 (SPI1), | | |
| | | | | | transcript variant 1, | | |
| | | | | | mRNA. | | |
| 237 | 197 | 5820068 | NM_032025.3 | NM_032025 | eukaryotic translation | EIF2A | MSTP089; MSTP004; |
| | | | | | initiation factor 2A, | | EIF-2A; CDA02; |
| | | | | | 65 kDa (EIF2A), mRNA. | | MST089 |
| 238 | 198 | 5820528 | NM_001077446.1 | NM_001077446 | tRNA splicing | TSEN34 | LENG5; SEN34; |
| | | | | | endonuclease 34 | | SEN34L |
| | | | | | homolog (S. cerevisiae) | | |
| | | | | | (TSEN34), transcript | | |
| | | | | | variant 2, mRNA. | | |
| 239 | 199 | 5860064 | NM_138782.1 | NM_138782 | FCH domain only 2 | FCHO2 | — |
| | | | | | (FCHO2), mRNA. | | |
| 240 | 200 | 5870131 | NM_000492.3 | NM_000492 | cystic fibrosis | CFTR | ABCC7; MRP7; TNR- |
| | | | | | transmembrane | | CFTR; CFTR/MRP; |
| | | | | | conductance regulator | | dJ760C5.1; CF; |
| | | | | | (ATP-binding cassette | | ABC35 |
| | | | | | sub-family C, member | | |
| | | | | | 7) (CFTR), mRNA. | | |
| 241 | 201 | 5890538 | NM_018708.2 | NM_018708 | fem-1 homolog a (C. elegans) | FEM1A | DKFZp762M136; |
| | | | | | (FEM1A), | | EPRAP |
| | | | | | mRNA. | | |
| 242 | 202 | 5900112 | NM_052857.2 | NM_052857 | coiled-coil domain | CCDC16 | MGC20398 |
| | | | | | containing 16 | | |
| | | | | | (CCDC16), mRNA. | | |
| 243 | 203 | 5910113 | NM_004385.2 | NM_004385 | versican (VCAN), | VCAN | DKFZp686K06110; |
| | | | | | mRNA. | | WGN; VERSICAN; |
| | | | | | | | PG-M; WGN1; ERVR; |
| | | | | | | | CSPG2 |
| 244 | 204 | 6020327 | NM_024901.3 | NM_024901 | DENN/MADD domain | DENND2D | FLJ22457; RP5- |
| | | | | | containing 2D | | 1180E21.2 |
| | | | | | (DENND2D), mRNA. | | |
| 245 | 205 | 6020653 | NM_014962.2 | NM_014962 | BTB (POZ) domain | BTBD3 | dJ742J24.1; |
| | | | | | containing 3 (BTBD3), | | MGC130038; |
| | | | | | transcript variant 1, | | KIAA0952; |
| | | | | | mRNA. | | MGC130039 |
| 246 | 206 | 6040487 | NM_006265.1 | NM_006265 | RAD21 homolog (S. pombe) | RAD21 | KIAA0078; hHR21; |
| | | | | | (RAD21), | | NXP1; FLJ40596; |
| | | | | | mRNA. | | HRAD21; FLJ25655; |
| | | | | | | | SCC1; HR21; MCD1 |
| 247 | 208 | 6110392 | NM_002076.2 | NM_002076 | glucosamine (N-acetyl)- | GNS | G6S; MGC21274 |
| | | | | | 6-sulfatase (Sanfilippo | | |
| | | | | | disease IIID) (GNS), | | |
| | | | | | mRNA. | | |
| 248 | 209 | 6180070 | NR_002204.1 | NR_002204 | ferritin, heavy | FTHL11 | — |
| | | | | | polypeptide-like 11 | | |
| | | | | | (FTHL11) on | | |
| | | | | | chromosome 8. | | |
| 249 | 210 | 6180154 | NM_145255.2 | NM_145255 | mitochondrial ribosomal | MRPL10 | MGC17973; MRP- |
| | | | | | protein L10 (MRPL10), | | L10; L10MT; RPML8; |
| | | | | | nuclear gene encoding | | MRPL8; MRP-L8 |
| | | | | | mitochondrial protein, | | |
| | | | | | mRNA. | | |
| 250 | 211 | 6180537 | NM_002139.2 | NM_002139 | RNA binding motif | RBMX | RBMXRT; HNRPG; |
| | | | | | protein, X-linked | | hnRNP-G; RNMX; |
| | | | | | (RBMX), mRNA. | | RBMXP1 |
| 251 | 212 | 6200402 | NM_005946.2 | NM_005946 | metallothionein 1A | MT1A | MTC; MT1; |
| | | | | | (MT1A), mRNA. | | MGC32848; MT1S |
| 252 | 213 | 6200669 | NM_138720.1 | NM_138720 | histone cluster 1, H2bd | HIST1H2BD | H2B.1B; HIRIP2; |
| | | | | | (HIST1H2BD), | | MGC90432; |
| | | | | | transcript variant 2, | | dJ221C16.6; H2B/b; |
| | | | | | mRNA. | | H2BFB |
| 253 | 214 | 6290402 | NM_198723.1 | NM_198723 | transcription elongation | TCEA2 | TFIIS |
| | | | | | factor A (SII), 2 | | |
| | | | | | (TCEA2), transcript | | |
| | | | | | variant 2, mRNA. | | |
| 254 | 215 | 6370025 | NM_013333.2 | NM_013333 | epsin 1 (EPN1), mRNA. | EPN1 | — |
| 255 | 216 | 6370241 | NM_014155.3 | NM_014155 | zinc finger and BTB | ZBTB44 | MGC57431; |
| | | | | | domain containing 44 | | MGC60348; BTBD15; |
| | | | | | (ZBTB44), mRNA. | | MGC88058; |
| | | | | | | | HSPC063; |
| | | | | | | | MGC26123 |
| 256 | 217 | 6380347 | NM_001469.3 | NM_001469 | X-ray repair | XRCC6 | TLAA; G22P1; |
| | | | | | complementing | | CTCBF; ML8; CTC75; |
| | | | | | defective repair in | | KU70 |
| | | | | | Chinese hamster cells | | |
| | | | | | 6 (Ku autoantigen, | | |
| | | | | | 70 kDa) (XRCC6), | | |
| | | | | | mRNA. | | |
| 257 | 218 | 6380524 | NM_003432.1 | NM_003432 | zinc finger protein 131 | ZNF131 | pHZ-10 |
| | | | | | (ZNF131), mRNA. | | |
| 258 | 219 | 6380639 | NM_213725.1 | NM_213725 | ribosomal protein, | RPLP1 | P1; FLJ27448; RPP1; |
| | | | | | large, P1 (RPLP1), | | MGC5215 |
| | | | | | transcript variant 2, | | |
| | | | | | mRNA. | | |
| 259 | 221 | 6400332 | NM_014184.2 | NM_014184 | cornichon homolog 4 | CNIH4 | HSPC163 |
| | | | | | (Drosophila) (CNIH4), | | |
| | | | | | mRNA. | | |
| 260 | 222 | 6400603 | NM_024070.3 | NM_024070 | poliovirus receptor | PVRIG | MGC138297; |
| | | | | | related immunoglobulin | | MGC2463; |
| | | | | | domain containing | | MGC138295; |
| | | | | | (PVRIG), mRNA. | | MGC104322; C7orf15 |
| 261 | 223 | 6420730 | NM_001024921.2 | NM_001024921 | ribosomal protein L9 | RPL9 | FLJ27456; |
| | | | | | (RPL9), transcript | | MGC15545; |
| | | | | | variant 2, mRNA. | | DKFZp313J1510; |
| | | | | | | | NPC-A-16 |
| 262 | 225 | 6550315 | NM_020424.2 | NM_020424 | LYR motif containing 1 | LYRM1 | A211C6.1 |
| | | | | | (LYRM1), mRNA. | | |
| 263 | 226 | 6560121 | NM_002647.2 | NM_002647 | phosphoinositide-3- | PIK3C3 | MGC61518; Vps34 |
| | | | | | kinase, class 3 | | |
| | | | | | (PIK3C3), mRNA. | | |
| 264 | 227 | 6560164 | NM_001006.3 | NM_001006 | ribosomal protein S3A | RPS3A | FTE1; MGC23240; |
| | | | | | (RPS3A), mRNA. | | MFTL |
| 265 | 228 | 6580121 | NM_021242.3 | NM_021242 | MID1 interacting protein | MID1IP1 | THRSPL; MIG12; |
| | | | | | 1 (gastrulation specific | | STRAIT11499; |
| | | | | | G12 homolog | | FLJ10386; G12-like |
| | | | | | (zebrafish)) (MID1IP1), | | |
| | | | | | mRNA. | | |
| 266 | 229 | 6620528 | NM_005952.2 | NM_005952 | metallothionein 1X | MT1X | MT1; MT-1I |
| | | | | | (MT1X), mRNA. | | |
| 267 | 230 | 6620544 | NM_016360.2 | NM_016360 | coiled-coil domain | CCDC44 | — |
| | | | | | containing 44 | | |
| | | | | | (CCDC44), mRNA. | | |
| 268 | 232 | 6660162 | NM_052972.2 | NM_052972 | leucine-rich alpha-2- | LRG1 | HMFT1766; LRG |
| | | | | | glycoprotein 1 (LRG1), | | |
| | | | | | mRNA. | | |
| 269 | 233 | 6760192 | NM_007236.3 | NM_007236 | calcium binding protein | CHP | SLC9A1BP |
| | | | | | P22 (CHP), mRNA. | | |
| 270 | 234 | 6770634 | NM_005154.2 | NM_005154 | ubiquitin specific | USP8 | KIAA0055; FLJ34456; |
| | | | | | peptidase 8 (USP8), | | MGC129718; UBPY; |
| | | | | | mRNA. | | HumORF8 |
| 271 | 235 | 6840020 | NM_006573.3 | NM_006573 | tumor necrosis factor | TNFSF13B | TNFSF20; CD257; |
| | | | | | (ligand) superfamily, | | TALL1; delta BAFF; |
| | | | | | member 13b | | BAFF; ZTNF4; TALL- |
| | | | | | (TNFSF13B), mRNA. | | 1; THANK; BLYS |
| 272 | 236 | 6900528 | NM_001033568.1 | NM_001033568 | ras homolog gene | RHOT1 | ARHT1; MIRO-1; |
| | | | | | family, member T1 | | FLJ12633; FLJ11040 |
| | | | | | (RHOT1), transcript | | |
| | | | | | variant 1, mRNA. | | |
| 273 | 238 | 6960735 | NM_006004.1 | NM_006004 | ubiquinol-cytochrome c | UQCRH | — |
| | | | | | reductase hinge protein | | |
| | | | | | (UQCRH), mRNA. | | |
| 274 | 239 | 6980092 | NM_024297.2 | NM_024297 | PHD finger protein 23 | PHF23 | hJUNE-1b; |
| | | | | | (PHF23), mRNA. | | MGC2941; FLJ16355; |
| | | | | | | | FLJ22884 |
| 275 | 240 | 7000369 | NM_000591.2 | NM_000591 | CD14 molecule | CD14 | — |
| | | | | | (CD14), transcript | | |
| | | | | | variant 1, mRNA. | | |
| 276 | 241 | 7000465 | NM_153615.1 | NM_153615 | ral guanine nucleotide | RGL4 | Rgr, MGC119678; |
| | | | | | dissociation stimulator- | | MGC119680 |
| | | | | | like 4 (RGL4), mRNA. | | |
| 277 | 242 | 7050670 | NM_014649.2 | NM_014649 | scaffold attachment | SAFB2 | KIAA0138 |
| | | | | | factor B2 (SAFB2), | | |
| | | | | | mRNA. | | |
| 278 | 243 | 7210035 | NR_003041.1 | NR_003041 | small nucleolar RNA, | SNORD13 | U13 |
| | | | | | C/D box 13 | | |
| | | | | | (SNORD13) on | | |
| | | | | | chromosome 8. | | |
| 279 | 244 | 7210154 | NM_001165.3 | NM_001165 | baculoviral IAP repeat- | BIRC3 | RNF49; MALT2; |
| | | | | | containing 3 (BIRC3), | | MIHC; HAIP1; API2; |
| | | | | | transcript variant 1, | | HIAP1; AIP1; CIAP2 |
| | | | | | mRNA. | | |
| 280 | 245 | 7210326 | NM_004159.4 | NM_004159 | proteasome (prosome, | PSMB8 | D6S216; LMP7; |
| | | | | | macropain) subunit, | | RING10; MGC1491; |
| | | | | | beta type, 8 (large | | D6S216E |
| | | | | | multifunctional | | |
| | | | | | peptidase 7) (PSMB8), | | |
| | | | | | transcript variant 1, | | |
| | | | | | mRNA. | | |
| 281 | 246 | 7210450 | NM_006769.2 | NM_006769 | LIM domain only 4 | LMO4 | — |
| | | | | | (LMO4), mRNA. | | |
| 282 | 247 | 7320041 | NM_015892.2 | NM_015892 | B cell RAG associated | GALNAC4S- | DKFZp781H1369; |
| | | | | | protein (GALNAC4S- | 6ST | KIAA0598; BRAG; |
| | | | | | 6ST), mRNA. | | RP11-47G11.1; |
| | | | | | | | MGC34346 |
| 283 | 248 | 7320551 | NM_002350.1 | NM_002350 | v-yes-1 Yamaguchi | LYN | FLJ26625; JTK8 |
| | | | | | sarcoma viral related | | |
| | | | | | oncogene homolog | | |
| | | | | | (LYN), mRNA. | | |
| 284 | 249 | 7380255 | NM_022481.5 | NM_022481 | centaurin, delta 3 | CENTD3 | FLJ21065; ARAP3; |
| | | | | | (CENTD3), mRNA. | | DRAG1 |
| 285 | 250 | 7400653 | NM_004567.2 | NM_004567 | 6-phosphofructo-2- | PFKFB4 | — |
| | | | | | kinase/fructose-2,6- | | |
| | | | | | biphosphatase 4 | | |
| | | | | | (PFKFB4), mRNA. | | |
| 286 | 251 | 7400673 | NM_001039457.1 | NM_001039457 | ATPase, H+ | ATP6V0B | HATPL; ATP6F; |
| | | | | | transporting, lysosomal | | VMA16 |
| | | | | | 21 kDa, V0 subunit b | | |
| | | | | | (ATP6V0B), transcript | | |
| | | | | | variant 2, mRNA. | | |
| 287 | 252 | 7550364 | NM_001077628.1 | NM_001077628 | anterior pharynx | APH1A | APH-1A; CGI-78; |
| | | | | | defective 1 homolog A | | 6530402N02Rik |
| | | | | | (C. elegans) (APH1A), | | |
| | | | | | transcript variant 1, | | |
| | | | | | mRNA. | | |
| 288 | 253 | 7610187 | NM_182810.1 | NM_182810 | activating transcription | ATF4 | TXREB; TAXREB67; |
| | | | | | factor 4 (tax-responsive | | CREB2; CREB-2 |
| | | | | | enhancer element B67) | | |
| | | | | | (ATF4), transcript | | |
| | | | | | variant 2, mRNA. | | |
| 289 | 255 | 7650209 | NM_001003943.1 | NM_001003943 | Bcl2 modifying factor | BMF | FLJ00065 |
| | | | | | (BMF), transcript | | |
| | | | | | variant 4, mRNA. | | |
| 290 | 256 | 510132 | XM_941861.1 | XM_941861 | PREDICTED: similar to | LOC650029 | — |
| | | | | | RNA-binding protein 4 | | |
| | | | | | (RNA-binding motif | | |
| | | | | | protein 4) (Lark | | |
| | | | | | homolog) (Hlark) (RNA- | | |
| | | | | | binding motif protein | | |
| | | | | | 4a), transcript variant 1 | | |
| | | | | | (LOC650029), mRNA. | | |
| 291 | 257 | 610280 | NM_025029.2 | NM_025029 | family with sequence | FAM128B | FLJ14346; |
| | | | | | similarity 128, member | | MGC87017 |
| | | | | | B (FAM128B), mRNA. | | |
| 292 | 258 | 650129 | BX093310 | BX093310 | BX093310 | — | — |
| | | | | | NCI_CGAP_GC4 | | |
| | | | | | cDNA clone | | |
| | | | | | IMAGp998F143166; | | |
| | | | | | IMAGE: 1257997, | | |
| | | | | | mRNA sequence | | |
| 293 | 259 | 830484 | XM_938599.2 | XM_938599 | PREDICTED: similar to | LOC441377 | — |
| | | | | | 40S ribosomal protein | | |
| | | | | | S26 (LOC441377), | | |
| | | | | | mRNA. | | |
| 294 | 260 | 830639 | XM_929667.1 | XM_929667 | PREDICTED: similar to | LOC653778 | — |
| | | | | | solute carrier family 25, | | |
| | | | | | member 37 | | |
| | | | | | (LOC653778), mRNA. | | |
| 295 | 261 | 870181 | NM_001080544.1 | NM_001080544 | similar to ribosomal | LOC653314 | — |
| | | | | | protein L19 | | |
| | | | | | (LOC653314), mRNA. | | |
| 296 | 262 | 1010039 | AI218425 | AI218425 | qh24c08.x1 | — | — |
| | | | | | Soares_NFL_T_GBC_S1 | | |
| | | | | | cDNA clone | | |
| | | | | | IMAGE: 1845614 3, | | |
| | | | | | mRNA sequence | | |
| 297 | 263 | 1260066 | AK024852 | AK024852 | cDNA: FLJ21199 fis, | — | — |
| | | | | | clone C0L00235 | | |
| 298 | 264 | 1500538 | XM_928168.1 | XM_928168 | PREDICTED: similar to | LOC645138 | — |
| | | | | | ribosomal protein S11 | | |
| | | | | | (LOC645138), mRNA. | | |
| 299 | 265 | 1940274 | NM_032036.2 | NM_032036 | family with sequence | FAM14A | TLH29; MGC44913 |
| | | | | | similarity 14, member A | | |
| | | | | | (FAM14A), mRNA. | | |
| 300 | 266 | 1980112 | NM_197956.1 | NM_197956 | chromosome 9 open | C9orf90 | KIAA1896; |
| | | | | | reading frame 90 | | DKFZp762G199; |
| | | | | | (C9orf90), mRNA. | | RP11-379C10.2; |
| | | | | | | | bA379C10.2 |
| 301 | 267 | 2000564 | NM_001042475.1 | NM_001042475 | chromosome 6 open | C6orf204 | MGC131785; RP11- |
| | | | | | reading frame 204 | | 57K17.2; bA57K17.2; |
| | | | | | (C6orf204), transcript | | NY-BR-15 |
| | | | | | variant 1, mRNA. | | |
| 302 | 268 | 2260025 | XR_015514.1 | XR_015514 | PREDICTED: similar to | LOC730746 | — |
| | | | | | Heterogeneous nuclear | | |
| | | | | | ribonucleoprotein A1 | | |
| | | | | | (Helix-destabilizing | | |
| | | | | | protein) (Single-strand | | |
| | | | | | RNA-binding protein) | | |
| | | | | | (hnRNP core protein | | |
| | | | | | A1 (HDP) | | |
| | | | | | (LOC730746), mRNA. | | |
| 303 | 269 | 2340446 | XM_942351.2 | XM_942351 | PREDICTED: similar to | LOC652726 | — |
| | | | | | ankyrin repeat domain | | |
| | | | | | 36 (LOC652726), | | |
| | | | | | mRNA. | | |
| 304 | 270 | 2470240 | NM_004848.2 | NM_004848 | chromosome 1 open | C1orf38 | ICB-1 |
| | | | | | reading frame 38 | | |
| | | | | | (C1orf38), transcript | | |
| | | | | | variant 1, mRNA. | | |
| 305 | 273 | 2940066 | XM_928429.1 | XM_928429 | PREDICTED: similar to | LOC388275 | — |
| | | | | | Heterogeneous nuclear | | |
| | | | | | ribonucleoprotein A1 | | |
| | | | | | (Helix-destabilizing | | |
| | | | | | protein) (Single-strand | | |
| | | | | | binding protein) | | |
| | | | | | (hnRNP core protein | | |
| | | | | | A1) (HDP-1) | | |
| | | | | | (Topoisomerase- | | |
| | | | | | inhibitor suppressed) | | |
| | | | | | (LOC388275), mRNA. | | |
| 306 | 274 | 2940452 | AK056642 | AK056642 | cDNA FLJ32080 fis, | — | — |
| | | | | | clone OCBBF2000015 | | |
| 307 | 275 | 3190348 | XM_944816.1 | XM_944816 | PREDICTED: similar to | LOC440927 | — |
| | | | | | 60S acidic ribosomal | | |
| | | | | | protein P1, transcript | | |
| | | | | | variant 4 (LOC440927), | | |
| | | | | | mRNA. | | |
| 308 | 276 | 3400709 | AK094914 | AK094914 | cDNA FLJ37595 fis, | — | — |
| | | | | | clone BRCOC2007864 | | |
| 309 | 277 | 3460014 | NM_016613.5 | NM_016613 | chromosome 4 open | C4orf18 | AD021; |
| | | | | | reading frame 18 | | DKFZp434L142; |
| | | | | | (C4orf18), transcript | | AD036; FLJ38155 |
| | | | | | variant 2, mRNA. | | |
| 310 | 278 | 3780148 | NM_024067.2 | NM_024067 | chromosome 7 open | C7orf26 | MGC2718 |
| | | | | | reading frame 26 | | |
| | | | | | (C7orf26), mRNA. | | |
| 311 | 279 | 3850411 | XM_933119.1 | XM_933119 | PREDICTED: similar to | LOC653316 | — |
| | | | | | NY-REN-7 antigen, | | |
| | | | | | transcript variant 4 | | |
| | | | | | (LOC653316), mRNA. | | |
| 312 | 280 | 3870470 | XR_015809.1 | XR_015809 | PREDICTED: similar to | LOC728973 | — |
| | | | | | 40S ribosomal protein | | |
| | | | | | S7 (S8) (LOC728973), | | |
| | | | | | mRNA. | | |
| 313 | 281 | 4060382 | XM_931996.1 | XM_931996 | PREDICTED: similar to | LOC643035 | — |
| | | | | | CG33096-PB, isoform | | |
| | | | | | B, transcript variant 2 | | |
| | | | | | (LOC643035), mRNA. | | |
| 314 | 282 | 4480600 | NM_080757.1 | NM_080757 | chromosome 20 open | C20orf127 | dJ614O4.6; |
| | | | | | reading frame 127 | | MGC118948 |
| | | | | | (C20orf127), mRNA. | | |
| 315 | 283 | 4610681 | XM_939687.2 | XM_939687 | PREDICTED: similar to | LOC653658 | — |
| | | | | | ribosomal protein S23 | | |
| | | | | | (LOC653658), mRNA. | | |
| 316 | 284 | 4860341 | NM_145060.3 | NM_145060 | chromosome 18 open | C18orf24 | MGC10200; Ska1 |
| | | | | | reading frame 24 | | |
| | | | | | (C18orf24), transcript | | |
| | | | | | variant 2, mRNA. | | |
| 317 | 285 | 5310681 | XM_933085.1 | XM_933085 | PREDICTED: similar to | LOC653344 | — |
| | | | | | cis-Golgi matrix protein | | |
| | | | | | GM130, transcript | | |
| | | | | | variant 2 (LOC653344), | | |
| | | | | | mRNA. | | |
| 318 | 286 | 5340278 | XM_932991.1 | XM_932991 | PREDICTED: | LOC643977 | — |
| | | | | | hypothetical protein | | |
| | | | | | LOC643977, transcript | | |
| | | | | | variant 1 (LOC643977), | | |
| | | | | | mRNA. | | |
| 319 | 287 | 5390685 | XM_928197.1 | XM_928197 | PREDICTED: similar to | LOC643433 | — |
| | | | | | 60S ribosomal protein | | |
| | | | | | L29 (Cell surface | | |
| | | | | | heparin binding protein | | |
| | | | | | HIP), transcript variant | | |
| | | | | | 1 (LOC643433), | | |
| | | | | | mRNA. | | |
| 320 | 288 | 5420438 | NM_138471.1 | NM_138471 | hypothetical protein | LOC144097 | DKFZp762N0114 |
| | | | | | BC007540 | | |
| | | | | | (LOC144097), mRNA. | | |
| 321 | 289 | 5420750 | XM_941125.1 | XM_941125 | PREDICTED: similar to | LOC649447 | — |
| | | | | | 60S ribosomal protein | | |
| | | | | | L29 (Cell surface | | |
| | | | | | heparin binding protein | | |
| | | | | | HIP) (LOC649447), | | |
| | | | | | mRNA. | | |
| 322 | 290 | 5490603 | NM_001080831.1 | NM_001080831 | hCG1783417 | LOC401019 | — |
| | | | | | (LOC401019), mRNA. | | |
| 323 | 291 | 5820202 | XR_018325.1 | XR_018325 | PREDICTED: similar to | LOC644131 | — |
| | | | | | chaperonin containing | | |
| | | | | | TCP1, subunit 8 (theta) | | |
| | | | | | (LOC644131), mRNA. | | |
| 324 | 292 | 5890615 | NM_001045478.1 | NM_001045478 | chromosome 1 open | C1orf200 | — |
| | | | | | reading frame 200 | | |
| | | | | | (C1orf200), mRNA. | | |
| 325 | 293 | 5960086 | BP873537 | BP873537 | BP873537 Sugano | — | — |
| | | | | | cDNA library, | | |
| | | | | | embryonal kidney | | |
| | | | | | cDNA clone | | |
| | | | | | HKR13896, mRNA | | |
| | | | | | sequence | | |
| 326 | 294 | 6020066 | XM_940333.2 | XM_940333 | PREDICTED: similar to | LOC651202 | — |
| | | | | | large subunit ribosomal | | |
| | | | | | protein L36a | | |
| | | | | | (LOC651202), mRNA. | | |
| 327 | 295 | 6110195 | NM_153367.2 | NM_153367 | chromosome 10 open | C10orf56 | FLJ90798 |
| | | | | | reading frame 56 | | |
| | | | | | (C10orf56), mRNA. | | |
| 328 | 296 | 6200706 | AA082988 | AA082988 | zn08b06.s1 | — | — |
| | | | | | StratagenehNT neuron | | |
| | | | | | (#937233) cDNA clone | | |
| | | | | | IMAGE: 546803 3, | | |
| | | | | | mRNA sequence | | |
| 329 | 297 | 6270307 | XM_930344.2 | XM_930344 | PREDICTED: similar to | LOC644934 | — |
| | | | | | 40S ribosomal protein | | |
| | | | | | S26, transcript variant 1 | | |
| | | | | | (LOC644934), mRNA. | | |
| 330 | 298 | 6270605 | NR_003040.1 | NR_003040 | ribosomal protein L23a | LOC649946 | — |
| | | | | | pseudogene | | |
| | | | | | (LOC649946) on | | |
| | | | | | chromosome 11. | | |
| 331 | 299 | 6280446 | XM_926370.1 | XM_926370 | PREDICTED: similar to | LOC642989 | — |
| | | | | | 40S ribosomal protein | | |
| | | | | | S25 (LOC642989), | | |
| | | | | | mRNA. | | |
| 332 | 300 | 6280706 | XM_933956.1 | XM_933956 | PREDICTED: similar to | LOC644162 | — |
| | | | | | septin 7, transcript | | |
| | | | | | variant 4 (LOC644162), | | |
| | | | | | mRNA. | | |
| 333 | 301 | 6370288 | XM_938283.2 | XM_938283 | PREDICTED: | C17orf68 | — |
| | | | | | chromosome 17 open | | |
| | | | | | reading frame 68 | | |
| | | | | | (C17orf68), mRNA. | | |
| 334 | 302 | 6480092 | NM_024519.2 | NM_024519 | family with sequence | FAM65A | FLJ13725; KIAA1930 |
| | | | | | similarity 65, member A | | |
| | | | | | (FAM65A), mRNA. | | |
| 335 | 303 | 6510753 | XM_936874.1 | XM_936874 | PREDICTED: similar to | LOC642210 | — |
| | | | | | 60S ribosomal protein | | |
| | | | | | L32 (LOC642210), | | |
| | | | | | mRNA. | | |
| 336 | 304 | 6660753 | NM_017822.3 | NM_017822 | chromosome 12 open | C12orf41 | FLJ20436; FLJ12670 |
| | | | | | reading frame 41 | | |
| | | | | | (C12orf41), mRNA. | | |
| 337 | 305 | 6760202 | NM_001014812.1 | NM_001014812 | family with sequence | FAM96A | FLJ22875 |
| | | | | | similarity 96, member A | | |
| | | | | | (FAM96A), transcript | | |
| | | | | | variant 2, mRNA. | | |
| 338 | 306 | 6840477 | CD640673 | CD640673 | AGENCOURT_14535501 | — | — |
| | | | | | NIH_MGC_191 | | |
| | | | | | cDNA clone | | |
| | | | | | IMAGE: 30415823 5, | | |
| | | | | | mRNA sequence | | |
| 339 | 307 | 6860162 | XM_498969.2 | XM_498969 | PREDICTED: | LOC441019 | — |
| | | | | | hypothetical | | |
| | | | | | LOC441019 | | |
| | | | | | (LOC441019), mRNA. | | |
| 340 | 308 | 7160079 | NM_016623.3 | NM_016623 | family with sequence | FAM49B | L1; |
| | | | | | similarity 49, member B | | DKFZp686B04128; |
| | | | | | (FAM49B), mRNA. | | BM-009 |
| 341 | 309 | 7320707 | XM_939368.1 | XM_939368 | PREDICTED: similar to | LOC654103 | — |
| | | | | | solute carrier family 25, | | |
| | | | | | member 37 | | |
| | | | | | (LOC654103), mRNA. | | |
| 342 | 310 | 7400689 | NM_017896.2 | NM_017896 | chromosome 20 open | C20orf11 | TWA1 |
| | | | | | reading frame 11 | | |
| | | | | | (C20orf11), mRNA. | | |
| 343 | 311 | 7510543 | NM_017924.2 | NM_017924 | chromosome 14 open | C14orf119 | MGC74723; |
| | | | | | reading frame 119 | | FLJ20671 |
| | | | | | (C14orf119), mRNA. | | |
| 344 | 312 | 7610608 | NM_001093763.1 | NM_001093763 | hCG31916 | LOC653702 | — |
| | | | | | (LOC653702), mRNA. | | |
| 345 | 313 | 10201 | NM_017920.3 | NM_017920 | up-regulated gene 4 | URG4 | DKFZp666G166; |
| | | | | | (URG4), nuclear gene | | DKFZp686O0457 |
| | | | | | encoding mitochondrial | | |
| | | | | | protein, transcript | | |
| | | | | | variant 1, mRNA. | | |
| 346 | 314 | 10224 | XM_941466.2 | XM_941466 | PREDICTED: meteorin, | METRNL | — |
| | | | | | glial cell differentiation | | |
| | | | | | regulator-like | | |
| | | | | | (METRNL), mRNA. | | |
| 347 | 315 | 10240 | NM_002558.2 | NM_002558 | purinergic receptor | P2RX1 | P2X1 |
| | | | | | P2X, ligand-gated ion | | |
| | | | | | channel, 1 (P2RX1), | | |
| | | | | | mRNA. | | |
| 348 | 316 | 10286 | NM_025008.3 | NM_025008 | ADAMTS-like 4 | ADAMTSL4 | TSRC1 |
| | | | | | (ADAMTSL4), | | |
| | | | | | transcript variant 2, | | |
| | | | | | mRNA. | | |
| 349 | 317 | 10356 | NR_000016.1 | NR_000016 | small nucleolar RNA, | SNORD36C | RNU36C; U36c |
| | | | | | C/D box 36C | | |
| | | | | | (SNORD36C) on | | |
| | | | | | chromosome 9. | | |
| 350 | 318 | 10594 | NM_006117.2 | NM_006117 | peroxisomal D3,D2- | PECI | DRS1; KIAA0536; |
| | | | | | enoyl-CoA isomerase | | HCA88; |
| | | | | | (PECI), transcript | | dJ1013A10.3; ACBD2 |
| | | | | | variant 1, mRNA. | | |
| 351 | 319 | 10673 | NM_012401.2 | NM_012401 | plexin B2 (PLXNB2), | PLXNB2 | PLEXB2; Nbla00445; |
| | | | | | mRNA. | | MM1; dJ402G11.3; |
| | | | | | | | KIAA0315 |
| 352 | 320 | 20129 | NM_001803.2 | NM_001803 | CD52 molecule | CD52 | CDW52 |
| | | | | | (CD52), mRNA. | | |
| 353 | 321 | 20170 | NM_015481.1 | NM_015481 | zinc finger protein 385A | ZNF385A | DKFZP586G1122; |
| | | | | | (ZNF385A), mRNA. | | RZF; HZF; ZFP385; |
| | | | | | | | ZNF385 |
| 354 | 322 | 20403 | NM_015602.2 | NM_015602 | torsin A interacting | TOR1AIP1 | MGC3413; LAP1B; |
| | | | | | protein 1 (TOR1AIP1), | | DKFZP586G011; |
| | | | | | mRNA. | | RP11-533E19.1; |
| | | | | | | | FLJ13142 |
| 355 | 323 | 20521 | NM_032844.1 | NM_032844 | microtubule associated | MASTL | RP11-85G18.2; |
| | | | | | serine/threonine | | FLJ14813; THC2 |
| | | | | | kinase-like (MASTL), | | |
| | | | | | mRNA. | | |
| 356 | 324 | 50224 | NM_004401.2 | NM_004401 | DNA fragmentation | DFFA | DFF-45; ICAD; DFF1 |
| | | | | | factor, 45 kDa, alpha | | |
| | | | | | polypeptide (DFFA), | | |
| | | | | | transcript variant 1, | | |
| | | | | | mRNA. | | |
| 357 | 325 | 50240 | NM_004542.2 | NM_004542 | NADH dehydrogenase | NDUFA3 | B9 |
| | | | | | (ubiquinone) 1 alpha | | |
| | | | | | subcomplex, 3, 9 kDa | | |
| | | | | | (NDUFA3), mRNA. | | |
| 358 | 326 | 50402 | NM_001975.2 | NM_001975 | enolase 2 (gamma, | ENO2 | NSE |
| | | | | | neuronal) (ENO2), | | |
| | | | | | mRNA. | | |
| 359 | 327 | 50440 | NM_020861.1 | NM_020861 | zinc finger and BTB | ZBTB2 | ZNF437 |
| | | | | | domain containing 2 | | |
| | | | | | (ZBTB2), mRNA. | | |
| 360 | 328 | 50487 | NM_032725.2 | NM_032725 | BUD13 homolog (S. cerevisiae) | BUD13 | MGC13125 |
| | | | | | (BUD13), | | |
| | | | | | mRNA. | | |
| 361 | 329 | 60136 | NM_031311.3 | NM_031311 | carboxypeptidase, | CPVL | HVLP; MGC10029 |
| | | | | | vitellogenic-like (CPVL), | | |
| | | | | | transcript variant 1, | | |
| | | | | | mRNA. | | |
| 362 | 330 | 60148 | NM_001031827.1 | NM_001031827 | bolA homolog 2 (E. coli) | BOLA2 | BOLA2A; My016 |
| | | | | | (BOLA2), mRNA. | | |
| 363 | 331 | 60400 | NM_002887.3 | NM_002887 | arginyl-tRNAsynthetase | RARS | ArgRS; DALRD1; |
| | | | | | (RARS), mRNA. | | MGC8641 |
| 364 | 332 | 60437 | NM_000302.2 | NM_000302 | procollagen-lysine 1,2- | PLOD1 | LLH; PLOD; LH |
| | | | | | oxoglutarate 5- | | |
| | | | | | dioxygenase 1 | | |
| | | | | | (PLOD1), mRNA. | | |
| 365 | 333 | 60647 | NM_201397.1 | NM_201397 | glutathione peroxidase | GPX1 | MGC14399; |
| | | | | | 1 (GPX1), transcript | | GSHPX1; MGC88245 |
| | | | | | variant 2, mRNA. | | |
| 366 | 334 | 70070 | NM_000837.1 | NM_000837 | glutamate receptor, | GRINA | HNRGW; NMDARA1; |
| | | | | | ionotropic, N-methyl D- | | TMBIM3; MGC99687 |
| | | | | | aspartate-associated | | |
| | | | | | protein 1 (glutamate | | |
| | | | | | binding) (GRINA), | | |
| | | | | | transcript variant 1, | | |
| | | | | | mRNA. | | |
| 367 | 335 | 70092 | NR_003655.1 | NR_003655 | polymerase (RNA) II | POLR2J4 | RPB11-phi; |
| | | | | | (DNA directed) | | MGC13098 |
| | | | | | polypeptide J, 13.3 kDa | | |
| | | | | | pseudogene | | |
| | | | | | (POLR2J4) on | | |
| | | | | | chromosome 7. | | |
| 368 | 336 | 70364 | NM_012097.3 | NM_012097 | ADP-ribosylation factor- | ARL5A | ARFLP5; ARL5 |
| | | | | | like 5A (ARL5A), | | |
| | | | | | transcript variant 1, | | |
| | | | | | mRNA. | | |
| 369 | 337 | 70451 | NM_000377.1 | NM_000377 | Wiskott-Aldrich | WAS | WASP; IMD2; THC |
| | | | | | syndrome (eczema- | | |
| | | | | | thrombocytopenia) | | |
| | | | | | (WAS), mRNA. | | |
| 370 | 338 | 70458 | NM_006995.3 | NM_006995 | butyrophilin, subfamily | BTN2A2 | BTF2; BT2.2; |
| | | | | | 2, member A2 | | FLJ41908 |
| | | | | | (BTN2A2), transcript | | |
| | | | | | variant 1, mRNA. | | |
| 371 | 339 | 70541 | NM_005132.2 | NM_005132 | REC8 homolog (yeast) | REC8 | HR21spB; REC8; |
| | | | | | (REC8), transcript | | MGC950; REC8L1; |
| | | | | | variant 1, mRNA. | | Rec8p |
| 372 | 340 | 70630 | NM_182757.2 | NM_182757 | ring finger 144B | RNF144B | KIAA0161; |
| | | | | | (RNF144B), mRNA. | | MGC71786; IBRDC2; |
| | | | | | | | p53RFP; bA528A10.3 |
| 373 | 341 | 110139 | NM_019063.2 | NM_019063 | echinoderm | EML4 | FLJ10942; C2orf2; |
| | | | | | microtubule associated | | ELP120; |
| | | | | | protein like 4 (EML4), | | DKFZp686P18118; |
| | | | | | mRNA. | | ROPP120; FLJ32318 |
| 374 | 342 | 110180 | NM_001080157.1 | NM_001080157 | Rho GTPase activating | ARHGAP9 | 10C; RGL1; |
| | | | | | protein 9 (ARHGAP9), | | FLJ16525; MGC1295 |
| | | | | | transcript variant 2, | | |
| | | | | | mRNA. | | |
| 375 | 343 | 110279 | NM_001037442.1 | NM_001037442 | RUN and FYVE | RUFY3 | SINGAR1; KIAA0871; |
| | | | | | domain containing 3 | | RIPX |
| | | | | | (RUFY3), transcript | | |
| | | | | | variant 1, mRNA. | | |
| 376 | 344 | 110280 | NM_033503.3 | NM_033503 | Bcl2 modifying factor | BMF | FLJ00065 |
| | | | | | (BMF), transcript | | |
| | | | | | variant 2, mRNA. | | |
| 377 | 345 | 110382 | NM_002872.3 | NM_002872 | ras-related C3 | RAC2 | Gx; EN-7; HSPC022 |
| | | | | | botulinum toxin | | |
| | | | | | substrate 2 (rho family, | | |
| | | | | | small GTP binding | | |
| | | | | | protein Rac2) (RAC2), | | |
| | | | | | mRNA. | | |
| 378 | 346 | 110445 | NM_001005744.1 | NM_001005744 | numb homolog | NUMB | S171 |
| | | | | | (Drosophila) (NUMB), | | |
| | | | | | transcript variant 2, | | |
| | | | | | mRNA. | | |
| 379 | 347 | 110661 | NM_001025235.1 | NM_001025235 | tetraspanin 4 | TSPAN4 | NAG-2; NAG2; |
| | | | | | (TSPAN4), transcript | | TETRASPAN; |
| | | | | | variant 3, mRNA. | | TM4SF7; TSPAN-4 |
| 380 | 348 | 110682 | NM_005620.1 | NM_005620 | S100 calcium binding | S100A11 | S100C; MLN70 |
| | | | | | protein A11 (S100A11), | | |
| | | | | | mRNA. | | |
| 381 | 349 | 110685 | NM_003177.3 | NM_003177 | spleen tyrosine kinase | SYK | — |
| | | | | | (SYK), mRNA. | | |
| 382 | 350 | 110739 | NM_032164.2 | NM_032164 | zinc finger protein 394 | ZNF394 | FLJ12298; |
| | | | | | (ZNF394), mRNA. | | ZKSCAN14 |
| 383 | 352 | 130338 | NM_000331.3 | NM_000331 | serum amyloid A1 | SAA1 | MGC111216; SAA; |
| | | | | | (SAA1), transcript | | PIG4; TP53I4 |
| | | | | | variant 1, mRNA. | | |
| 384 | 354 | 130382 | NM_018957.3 | NM_018957 | SH3-domain binding | SH3BP1 | — |
| | | | | | protein 1 (SH3BP1), | | |
| | | | | | mRNA. | | |
| 385 | 355 | 130593 | NM_024787.2 | NM_024787 | ring finger protein 122 | RNF122 | MGC126622; |
| | | | | | (RNF122), mRNA. | | FLJ12526 |
| 386 | 356 | 130603 | NM_014183.2 | NM_014183 | dynein, light chain, | DYNLRB1 | BLP; ROBLD1; BITH; |
| | | | | | roadblock-type 1 | | DNLC2A; DNCL2A |
| | | | | | (DYNLRB1), mRNA. | | |
| 387 | 357 | 130669 | NM_004873.2 | NM_004873 | BCL2-associated | BAG5 | BAG-5 |
| | | | | | athanogene 5 (BAG5), | | |
| | | | | | transcript variant 2, | | |
| | | | | | mRNA. | | |
| 388 | 358 | 150048 | NM_001042734.1 | NM_001042734 | SEC24 related gene | SEC24B | MGC48822; SEC24 |
| | | | | | family, member B (S. cerevisiae) | | |
| | | | | | (SEC24B), | | |
| | | | | | transcript variant 2, | | |
| | | | | | mRNA. | | |
| 389 | 359 | 150072 | NM_002163.2 | NM_002163 | interferon regulatory | IRF8 | H-ICSBP; ICSBP; |
| | | | | | factor 8 (IRF8), mRNA. | | IRF-8; ICSBP1 |
| 390 | 360 | 150095 | NM_001031685.2 | NM_001031685 | tumor protein p53 | TP53BP2 | 53BP2; BBP; |
| | | | | | binding protein, 2 | | p53BP2; ASPP2; |
| | | | | | (TP53BP2), transcript | | PPP1R13A |
| | | | | | variant 1, mRNA. | | |
| 391 | 361 | 160019 | NM_002959.4 | NM_002959 | sortilin 1 (SORT1), | SORT1 | NT3; Gp95 |
| | | | | | mRNA. | | |
| 392 | 362 | 160068 | NM_015621.2 | NM_015621 | coiled-coil domain | CCDC69 | DKFZP434C171; |
| | | | | | containing 69 | | FLJ13705 |
| | | | | | (CCDC69), mRNA. | | |
| 393 | 363 | 160279 | NM_145648.1 | NM_145648 | solute carrier family 15, | SLC15A4 | PHT1; FP12591; |
| | | | | | member 4 (SLC15A4), | | PTR4 |
| | | | | | mRNA. | | |
| 394 | 364 | 160368 | NM_032108.2 | NM_032108 | sema domain, | SEMA6B | SEMAN; semaZ; |
| | | | | | transmembrane | | SEM-SEMA-Y; |
| | | | | | domain (TM), and | | SEMA-VIB; SemaVIb |
| | | | | | cytoplasmic domain, | | |
| | | | | | (semaphorin) 6B | | |
| | | | | | (SEMA6B), mRNA. | | |
| 395 | 365 | 160494 | NM_020980.2 | NM_020980 | aquaporin 9 (AQP9), | AQP9 | HsT17287; SSC1 |
| | | | | | mRNA. | | |
| 396 | 366 | 160561 | NM_018054.4 | NM_018054 | Rho GTPase activating | ARHGAP17 | FLJ37567; MSTP110; |
| | | | | | protein 17 | | DKFZp564A1363; |
| | | | | | (ARHGAP17), | | MSTP066; RICH1; |
| | | | | | transcript variant 2, | | MST066; FLJ43368; |
| | | | | | mRNA. | | MGC87805; |
| | | | | | | | MSTP038; WBP15; |
| | | | | | | | NADRIN; MST110 |
| 397 | 367 | 160731 | NM_016479.3 | NM_016479 | shisa homolog 5 | SHISA5 | — |
| | | | | | (Xenopuslaevis) | | |
| | | | | | (SHISA5), mRNA. | | |
| 398 | 368 | 160746 | NM_000485.2 | NM_000485 | adenine | APRT | MGC125857; AMP; |
| | | | | | phosphoribosyltransferase | | MGC125856; |
| | | | | | (APRT), transcript | | DKFZp686D13177; |
| | | | | | variant 1, mRNA. | | MGC129961 |
| 399 | 369 | 240348 | NM_014634.2 | NM_014634 | protein phosphatase 1F | PPM1F | POPX2; CaMKPase; |
| | | | | | (PP2C domain | | FEM-2; hFEM-2; |
| | | | | | containing) (PPM1F), | | KIAA0015 |
| | | | | | mRNA. | | |
| 400 | 370 | 240435 | NM_018994.1 | NM_018994 | F-box protein 42 | FBXO42 | Fbx42; KIAA1332 |
| | | | | | (FBXO42), mRNA. | | |
| 401 | 371 | 270224 | NM_022151.4 | NM_022151 | modulator of apoptosis | MOAP1 | MAP-1; PNMA4 |
| | | | | | 1 (MOAP1), mRNA. | | |
| 402 | 372 | 270619 | NM_002097.1 | NM_002097 | general transcription | GTF3A | AP2; TFIIIA |
| | | | | | factor IIIA (GTF3A), | | |
| | | | | | mRNA. | | |
| 403 | 373 | 290750 | NM_001017373.1 | NM_001017373 | sterile alpha motif | SAMD3 | MGC35163; |
| | | | | | domain containing 3 | | FLJ34563 |
| | | | | | (SAMD3), transcript | | |
| | | | | | variant 1, mRNA. | | |
| 404 | 375 | 360482 | NM_015383.1 | NM_015383 | neuroblastoma | NBPF14 | RP3-328E19.1; |
| | | | | | breakpoint family, | | DJ328E19.C1.1; |
| | | | | | member 14 (NBPF14), | | NBPF; FLJ35032 |
| | | | | | mRNA. | | |
| 405 | 376 | 360619 | NM_005248.2 | NM_005248 | Gardner-Rasheed | FGR | p58c-fgr, SRC2; c-fgr; |
| | | | | | feline sarcoma viral (v- | | FLJ43153; |
| | | | | | fgr) oncogene homolog | | MGC75096; c-src2; |
| | | | | | (FGR), transcript | | p55c-fgr |
| | | | | | variant 1, mRNA. | | |
| 406 | 377 | 360719 | NM_000610.3 | NM_000610 | CD44 molecule (Indian | CD44 | LHR; MDU2; CDW44; |
| | | | | | blood group) (CD44), | | CSPG8; Pgp1; IN; |
| | | | | | transcript variant 1, | | MUTCH-I; MIC4; |
| | | | | | mRNA. | | MDU3; MC56; |
| | | | | | | | HCELL; ECMR-III; |
| | | | | | | | MGC10468 |
| 407 | 378 | 360753 | NM_014160.3 | NM_014160 | makorin, ring finger | MKRN2 | HSPC070; RNF62 |
| | | | | | protein, 2 (MKRN2), | | |
| | | | | | mRNA. | | |
| 408 | 379 | 380050 | NM_024599.3 | NM_024599 | rhomboid 5 homolog 2 | RHBDF2 | RHBDL6; RHBDL5; |
| | | | | | (Drosophila) | | FLJ22341 |
| | | | | | (RHBDF2), transcript | | |
| | | | | | variant 1, mRNA. | | |
| 409 | 380 | 380056 | NM_006577.5 | NM_006577 | UDP-GlcNAc:betaGal | B3GNT2 | B3GNT-2; B3GN-T1; |
| | | | | | beta-1,3-N- | | B3GNT1; |
| | | | | | acetylglucosaminyltransferase | | BETA3GNT; B3GN- |
| | | | | | 2 (B3GNT2), | | T2; B3GNT |
| | | | | | mRNA. | | |
| 410 | 381 | 380392 | NM_001012424.1 | NM_001012424 | YY1 associated factor 2 | YAF2 | MGC41856 |
| | | | | | (YAF2), transcript | | |
| | | | | | variant 2, mRNA. | | |
| 411 | 382 | 380753 | NM_001012456.1 | NM_001012456 | Sec61 gamma subunit | SEC61G | SSS1 |
| | | | | | (SEC61G), transcript | | |
| | | | | | variant 2, mRNA. | | |
| 412 | 383 | 430044 | NM_001033858.1 | NM_001033858 | DNA cross-link repair | DCLRE1C | SCIDA; DCLREC1C; |
| | | | | | 1C (PSO2 homolog, S. cerevisiae) | | SNM1C; FLJ36438; |
| | | | | | (DCLRE1C), transcript | | RS-SCID; FLJ11360; |
| | | | | | variant c, mRNA. | | A-SCID |
| 413 | 384 | 430546 | NM_003518.3 | NM_003518 | histone cluster 1, H2bg | HIST1H2BG | H2B.1A; H2BFA; |
| | | | | | (HIST1H2BG), mRNA. | | dJ221C16.8; |
| | | | | | | | HIST1H2BI; H2B/a; |
| | | | | | | | HIST1H2BF |
| 414 | 385 | 430672 | NM_153201.1 | NM_153201 | heat shock 70 kDa | HSPA8 | MGC131511; HSC54; |
| | | | | | protein 8 (HSPA8), | | HSPA10; MGC29929; |
| | | | | | transcript variant 2, | | HSC70; HSP71; |
| | | | | | mRNA. | | HSP73; LAP1; |
| | | | | | | | HSC71; NIP71 |
| 415 | 386 | 450204 | NM_001077692.1 | NM_001077692 | asparagine-linked | ALG9 | DKFZp586M2420; |
| | | | | | glycosylation 9 | | FLJ21845; DIBD1 |
| | | | | | homolog (S. cerevisiae, | | |
| | | | | | alpha-1,2- | | |
| | | | | | mannosyltransferase) | | |
| | | | | | (ALG9), transcript | | |
| | | | | | variant 4, mRNA. | | |
| 416 | 387 | 460164 | NR_002204.1 | NR_002204 | ferritin, heavy | FTHL11 | — |
| | | | | | polypeptide-like 11 | | |
| | | | | | (FTHL11) on | | |
| | | | | | chromosome 8. | | |
| 417 | 388 | 460204 | NM_001122.2 | NM_001122 | adipose differentiation- | ADFP | ADRP; MGC10598 |
| | | | | | related protein (ADFP), | | |
| | | | | | mRNA. | | |
| 418 | 389 | 460333 | NM_199436.1 | NM_199436 | spastin (SPAST), | SPAST | FSP2; ADPSP; |
| | | | | | transcript variant 2, | | KIAA1083; SPG4 |
| | | | | | mRNA. | | |
| 419 | 390 | 460438 | NM_152872.1 | NM_152872 | Fas (TNF receptor | FAS | CD95; APT1; FASTM; |
| | | | | | superfamily, member 6) | | FAS1; APO-1; |
| | | | | | (FAS), transcript variant | | ALPS1A; TNFRSF6 |
| | | | | | 3, mRNA. | | |
| 420 | 391 | 460463 | NM_001003802.1 | NM_001003802 | SWI/SNF related, | SMARCD3 | Rsc6p; BAF60C; |
| | | | | | matrix associated, actin | | CRACD3; |
| | | | | | dependent regulator of | | MGC111010 |
| | | | | | chromatin, subfamily d, | | |
| | | | | | member 3 | | |
| | | | | | (SMARCD3), transcript | | |
| | | | | | variant 1, mRNA. | | |
| 421 | 392 | 460468 | NM_014169.2 | NM_014169 | chromatin modifying | CHMP4A | SNF7-1; C14orf123; |
| | | | | | protein 4A (CHMP4A), | | SNF7; MGC142095; |
| | | | | | mRNA. | | Shax2; CHMP4B; |
| | | | | | | | MGC142093; |
| | | | | | | | HSPC134 |
| 422 | 393 | 460543 | NM_014683.2 | NM_014683 | unc-51-like kinase 2 (C. elegans) | ULK2 | KIAA0623; Unc51.2 |
| | | | | | (ULK2), | | |
| | | | | | mRNA. | | |
| 423 | 394 | 510114 | NM_182851.1 | NM_182851 | cyclin B1 interacting | CCNB1IP1 | C14orf18; HEI10 |
| | | | | | protein 1 (CCNB1IP1), | | |
| | | | | | transcript variant 3, | | |
| | | | | | mRNA. | | |
| 424 | 395 | 510128 | NM_173653.1 | NM_173653 | solute carrier family 9 | SLC9A9 | NHE9; Nbla00118; |
| | | | | | (sodium/hydrogen | | FLJ35613 |
| | | | | | exchanger), member 9 | | |
| | | | | | (SLC9A9), mRNA. | | |
| 425 | 396 | 510129 | NM_006594.1 | NM_006594 | adaptor-related protein | AP4B1 | BETA-4 |
| | | | | | complex 4, beta 1 | | |
| | | | | | subunit (AP4B1), | | |
| | | | | | mRNA. | | |
| 426 | 397 | 510288 | NM_022736.1 | NM_022736 | major facilitator | MFSD1 | UG0581B09; |
| | | | | | superfamily domain | | FLJ14153 |
| | | | | | containing 1 (MFSD1), | | |
| | | | | | mRNA. | | |
| 427 | 398 | 510291 | NM_001359.1 | NM_001359 | 2,4-dienoyl CoA | DECR1 | NADPH; DECR |
| | | | | | reductase 1, | | |
| | | | | | mitochondrial (DECR1), | | |
| | | | | | nuclear gene encoding | | |
| | | | | | mitochondrial protein, | | |
| | | | | | mRNA. | | |
| 428 | 399 | 510300 | NM_001663.2 | NM_001663 | ADP-ribosylation factor | ARF6 | — |
| | | | | | 6 (ARF6), mRNA. | | |
| 429 | 400 | 510468 | NM_006163.1 | NM_006163 | nuclear factor | NFE2 | p45; NF-E2 |
| | | | | | (erythroid-derived 2), | | |
| | | | | | 45 kDa (NFE2), mRNA. | | |
| 430 | 401 | 520324 | NM_005669.4 | NM_005669 | receptor accessory | REEP5 | MGC70440; DP1; |
| | | | | | protein 5 (REEP5), | | D5S346; TB2; |
| | | | | | mRNA. | | C5orf18 |
| 431 | 402 | 520360 | NM_152851.1 | NM_152851 | membrane-spanning 4- | MS4A6A | CDA01; MSTP090; |
| | | | | | domains, subfamily A, | | MGC22650; 4SPAN3; |
| | | | | | member 6A (MS4A6A), | | 4SPAN3.2; MS4A6; |
| | | | | | transcript variant 3, | | CD20L3; MST090; |
| | | | | | mRNA. | | MGC131944 |
| 432 | 403 | 520408 | NM_001549.2 | NM_001549 | interferon-induced | IFIT3 | IRG2; RIG-G; IFI60; |
| | | | | | protein with | | ISG60; IFIT4; GARG- |
| | | | | | tetratricopeptide | | 49; CIG-49 |
| | | | | | repeats 3 (IFIT3), | | |
| | | | | | mRNA. | | |
| 433 | 404 | 540400 | NM_001048216.1 | NM_001048216 | cementum protein 1 | CEMP1 | CP-23 |
| | | | | | (CEMP1), mRNA. | | |
| 434 | 405 | 540403 | NM_182492.1 | NM_182492 | low density lipoprotein | LRP5L | DKFZp434O0213 |
| | | | | | receptor-related protein | | |
| | | | | | 5-like (LRP5L), mRNA. | | |
| 435 | 407 | 540600 | NM_153827.3 | NM_153827 | misshapen-like kinase | MINK1 | YSK2; hMINK; ZC3; |
| | | | | | 1 (zebrafish) (MINK1), | | MGC21111; MINK; |
| | | | | | transcript variant 3, | | MAP4K6; B55; |
| | | | | | mRNA. | | hMINKbeta |
| 436 | 408 | 540717 | NM_004793.2 | NM_004793 | Ion peptidase 1, | LONP1 | LonHS; hLON; LONP; |
| | | | | | mitochondrial (LONP1), | | MGC1498; PRSS15; |
| | | | | | nuclear gene encoding | | PIM1; LON |
| | | | | | mitochondrial protein, | | |
| | | | | | mRNA. | | |
| 437 | 409 | 540725 | NM_005520.1 | NM_005520 | heterogeneous nuclear | HNRPH1 | DKFZp686A15170; |
| | | | | | ribonucleoprotein H1 | | HNRPH; hnRNPH |
| | | | | | (H) (HNRPH1), mRNA. | | |
| 438 | 410 | 580114 | NM_030768.2 | NM_030768 | integrin-linked kinase- | ILKAP | PP2C-DELTA; |
| | | | | | associated | | FLJ10181; MGC4846; |
| | | | | | serine/threonine | | DKFZP434J2031 |
| | | | | | phosphatase 2C | | |
| | | | | | (ILKAP), mRNA. | | |
| 439 | 411 | 580278 | NM_175887.2 | NM_175887 | proline rich 15 | PRR15 | — |
| | | | | | (PRR15), mRNA. | | |
| 440 | 412 | 580411 | NM_017773.2 | NM_017773 | lymphocyte | LAX1 | LAX; FLJ20340 |
| | | | | | transmembrane | | |
| | | | | | adaptor 1 (LAX1), | | |
| | | | | | mRNA. | | |
| 441 | 413 | 580601 | NM_153747.1 | NM_153747 | phosphatidylinositol | PIGC | GPI2; MGC2049 |
| | | | | | glycan anchor | | |
| | | | | | biosynthesis, class C | | |
| | | | | | (PIGC), transcript | | |
| | | | | | variant 1, mRNA. | | |
| 442 | 414 | 580670 | NM_031443.3 | NM_031443 | cerebral cavernous | CCM2 | MGC4067; |
| | | | | | malformation 2 | | MGC4607; C7orf22; |
| | | | | | (CCM2), transcript | | PP10187; MGC74868 |
| | | | | | variant 2, mRNA. | | |
| 443 | 415 | 610040 | NM_002912.1 | NM_002912 | REV3-like, catalytic | REV3L | POLZ; REV3 |
| | | | | | subunit of DNA | | |
| | | | | | polymerase zeta | | |
| | | | | | (yeast) (REV3L), | | |
| | | | | | mRNA. | | |
| 444 | 416 | 610110 | NM_001989.3 | NM_001989 | even-skipped | EVX1 | — |
| | | | | | homeobox 1 (EVX1), | | |
| | | | | | mRNA. | | |
| 445 | 417 | 610221 | NM_017626.3 | NM_017626 | DnaJ (Hsp40) homolog, | DNAJB12 | DJ10; |
| | | | | | subfamily B, member | | DKFZp586B2023 |
| | | | | | 12 (DNAJB12), | | |
| | | | | | transcript variant 2, | | |
| | | | | | mRNA. | | |
| 446 | 418 | 610367 | NM_016217.2 | NM_016217 | headcase homolog | HECA | HDC; HDCL; |
| | | | | | (Drosophila) (HECA), | | dJ225E12.1; HHDC |
| | | | | | mRNA. | | |
| 447 | 419 | 610689 | NM_003977.1 | NM_003977 | aryl hydrocarbon | AIP | ARA9; FKBP16; |
| | | | | | receptor interacting | | XAP2; SMTPHN; |
| | | | | | protein (AIP), mRNA. | | FKBP37 |
| 448 | 420 | 620019 | XM_376787.4 | XM_376787 | PREDICTED: | RPS26P10 | — |
| | | | | | ribosomal protein S26 | | |
| | | | | | pseudogene 10 | | |
| | | | | | (RPS26P10), mRNA. | | |
| 449 | 421 | 620064 | NM_001037553.1 | NM_001037553 | 1-acylglycerol-3- | AGPAT3 | MGC4604; LPAAT- |
| | | | | | phosphate O- | | GAMMA1 |
| | | | | | acyltransferase 3 | | |
| | | | | | (AGPAT3), transcript | | |
| | | | | | variant 2, mRNA. | | |
| 450 | 422 | 620072 | NM_016544.1 | NM_016544 | rab and DnaJ domain | RBJ | RabJS; |
| | | | | | containing (RBJ), | | DKFZp434N211 |
| | | | | | mRNA. | | |
| 451 | 423 | 620376 | NM_021959.2 | NM_021959 | protein phosphatase 1, | PPP1R11 | TCTEX5; TCTE5; |
| | | | | | regulatory (inhibitor) | | HCGV; MGC125741; |
| | | | | | subunit 11 (PPP1R11), | | HCG-V; MGC125742; |
| | | | | | mRNA. | | MGC125743 |
| 452 | 424 | 620450 | NM_024570.1 | NM_024570 | ribonuclease H2, | RNASEH2B | DLEU8; AGS2; |
| | | | | | subunit B | | FLJ11712 |
| | | | | | (RNASEH2B), mRNA. | | |
| 453 | 425 | 620682 | NM_016612.2 | NM_016612 | solute carrier family 25, | SLC25A37 | PRO2217; PRO1278; |
| | | | | | member 37 | | MFRN; PRO1584; |
| | | | | | (SLC25A37), nuclear | | HT015; MSCP; MSC |
| | | | | | gene encoding | | |
| | | | | | mitochondrial protein, | | |
| | | | | | mRNA. | | |
| 454 | 426 | 620731 | NM_006415.2 | NM_006415 | serine | SPTLC1 | HSAN; HSAN1; |
| | | | | | palmitoyltransferase, | | SPT1; HSN1; |
| | | | | | long chain base subunit | | MGC14645; LBC1; |
| | | | | | 1 (SPTLC1), transcript | | SPTI; LCB1 |
| | | | | | variant 1, mRNA. | | |
| 455 | 427 | 620754 | NM_001009.3 | NM_001009 | ribosomal protein S5 | RPS5 | — |
| | | | | | (RPS5), mRNA. | | |
| 456 | 428 | 620767 | NM_004927.2 | NM_004927 | mitochondrial ribosomal | MRPL49 | NOF; NOF1; C11orf4; |
| | | | | | protein L49 (MRPL49), | | MGC10656; L49mt |
| | | | | | nuclear gene encoding | | |
| | | | | | mitochondrial protein, | | |
| | | | | | mRNA. | | |
| 457 | 429 | 630142 | NM_004468.3 | NM_004468 | four and a half LIM | FHL3 | MGC23614; SLIM2; |
| | | | | | domains 3 (FHL3), | | MGC8696; |
| | | | | | mRNA. | | MGC19547 |
| 458 | 430 | 630609 | NM_022166.3 | NM_022166 | xylosyltransferase I | XYLT1 | XT1; XT-I |
| | | | | | (XYLT1), mRNA. | | |
| 459 | 431 | 630709 | NM_032377.3 | NM_032377 | elongation factor 1 | ELOF1 | ELF1 |
| | | | | | homolog (S. cerevisiae) | | |
| | | | | | (ELOF1), mRNA. | | |
| 460 | 432 | 650020 | NM_203446.1 | NM_203446 | synaptojanin 1 | SYNJ1 | INPP5G |
| | | | | | (SYNJ1), transcript | | |
| | | | | | variant 2, mRNA. | | |
| 461 | 433 | 650040 | NM_178272.1 | NM_178272 | paired immunoglobin- | PILRA | FDF03 |
| | | | | | like type 2 receptor | | |
| | | | | | alpha (PILRA), | | |
| | | | | | transcript variant 2, | | |
| | | | | | mRNA. | | |
| 462 | 434 | 650678 | NM_003186.3 | NM_003186 | transgelin (TAGLN), | TAGLN | TAGLN1; WS3-10; |
| | | | | | transcript variant 2, | | SM22; |
| | | | | | mRNA. | | DKFZp686P11128; |
| | | | | | | | SMCC |
| 463 | 435 | 650692 | NM_207332.1 | NM_207332 | glutamate-rich 1 | ERICH1 | HSPC319 |
| | | | | | (ERICH1), mRNA. | | |
| 464 | 436 | 670025 | NM_014325.2 | NM_014325 | coronin, actin binding | CORO1C | HCRNN4; coronin-3 |
| | | | | | protein, 1C (CORO1C), | | |
| | | | | | transcript variant 1, | | |
| | | | | | mRNA. | | |
| 465 | 437 | 670088 | NM_015204.1 | NM_015204 | thrombospondin, type I, | THSD7A | KIAA0960 |
| | | | | | domain containing 7A | | |
| | | | | | (THSD7A), mRNA. | | |
| 466 | 438 | 670161 | NM_001042445.1 | NM_001042445 | calpastatin (CAST), | CAST | MGC9402; BS-17 |
| | | | | | transcript variant 11, | | |
| | | | | | mRNA. | | |
| 467 | 439 | 670754 | NM_001017970.2 | NM_001017970 | transmembrane protein | TMEM30B | CDC50B; |
| | | | | | 30B (TMEM30B), | | MGC126775 |
| | | | | | mRNA. | | |
| 468 | 440 | 730047 | NM_001002236.1 | NM_001002236 | serpin peptidase | SERPINA1 | PI1; MGC23330; |
| | | | | | inhibitor, clade A | | PRO2275; A1AT; |
| | | | | | (alpha-1 antiproteinase, | | AAT; MGC9222; PI; |
| | | | | | antitrypsin), member 1 | | A1A |
| | | | | | (SERPINA1), transcript | | |
| | | | | | variant 2, mRNA. | | |
| 469 | 441 | 730092 | NM_213650.1 | NM_213650 | sideroflexin 4 (SFXN4), | SFXN4 | BCRM1 |
| | | | | | transcript variant 3, | | |
| | | | | | mRNA. | | |
| 470 | 442 | 730156 | NM_001099786.1 | NM_001099786 | intercellular adhesion | ICAM2 | CD102 |
| | | | | | molecule 2 (ICAM2), | | |
| | | | | | transcript variant 1, | | |
| | | | | | mRNA. | | |
| 471 | 443 | 730288 | NM_031431.2 | NM_031431 | component of | COG3 | SEC34 |
| | | | | | oligomericgolgi | | |
| | | | | | complex 3 (COG3), | | |
| | | | | | mRNA. | | |
| 472 | 444 | 730458 | NM_002333.1 | NM_002333 | low density lipoprotein | LRP3 | — |
| | | | | | receptor-related protein | | |
| | | | | | 3 (LRP3), mRNA. | | |
| 473 | 445 | 730632 | NM_001013255.1 | NM_001013255 | lymphocyte-specific | LSP1 | WP34; pp52 |
| | | | | | protein 1 (LSP1), | | |
| | | | | | transcript variant 4, | | |
| | | | | | mRNA. | | |
| 474 | 446 | 770128 | NM_032438.1 | NM_032438 | I(3)mbt-like 3 | L3MBTL3 | MBT1; MBT-1; RP11- |
| | | | | | (Drosophila) | | 73O6.1 |
| | | | | | (L3MBTL3), transcript | | |
| | | | | | variant 1, mRNA. | | |
| 475 | 447 | 770440 | NM_003565.1 | NM_003565 | unc-51-like kinase 1 (C. elegans) | ULK1 | FLJ38455; UNC51; |
| | | | | | (ULK1), | | Unc51.1; ATG1 |
| | | | | | mRNA. | | |
| 476 | 448 | 770543 | NM_001930.2 | NM_001930 | deoxyhypusine | DHPS | MIG13 |
| | | | | | synthase (DHPS), | | |
| | | | | | transcript variant 1, | | |
| | | | | | mRNA. | | |
| 477 | 449 | 770630 | NM_001008661.1 | NM_001008661 | cysteine conjugate-beta | CCBL2 | DKFZp547N1117; |
| | | | | | lyase 2 (CCBL2), | | RBM1; RP11- |
| | | | | | transcript variant 1, | | 82K18.3; MGC9398; |
| | | | | | mRNA. | | RP4-531M19.2; |
| | | | | | | | RBMXL1; |
| | | | | | | | DKFZp667D0223; |
| | | | | | | | KAT3 |
| 478 | 450 | 770703 | NM_004840.2 | NM_004840 | Rac/Cdc42 guanine | ARHGEF6 | COOL2; PIXA; |
| | | | | | nucleotide exchange | | MRX46; KIAA0006; |
| | | | | | factor (GEF) 6 | | alpha-PIX; Cool-2; |
| | | | | | (ARHGEF6), mRNA. | | alphaPIX |
| 479 | 451 | 770754 | NM_025250.2 | NM_025250 | tweety homolog 3 | TTYH3 | KIAA1691 |
| | | | | | (Drosophila) (TTYH3), | | |
| | | | | | mRNA. | | |
| 480 | 452 | 780324 | NM_015655.2 | NM_015655 | zinc finger protein 337 | ZNF337 | — |
| | | | | | (ZNF337), mRNA. | | |
| 481 | 453 | 780376 | NM_000390.2 | NM_000390 | choroideremia (Rab | CHM | TCD; REP-1; |
| | | | | | escort protein 1) | | FLJ38564; DXS540; |
| | | | | | (CHM), transcript | | MGC102710; GGTA; |
| | | | | | variant 1, mRNA. | | HSD-32 |
| 482 | 454 | 780471 | NM_001031665.1 | NM_001031665 | zinc finger protein 816A | ZNF816A | MGC125619 |
| | | | | | (ZNF816A), mRNA. | | |
| 483 | 455 | 780519 | NM_005586.2 | NM_005586 | MyoD family inhibitor | MDFI | I-MF |
| | | | | | (MDFI), mRNA. | | |
| 484 | 456 | 830047 | NM_000852.2 | NM_000852 | glutathione S- | GSTP1 | DFN7; GST3; PI; |
| | | | | | transferase pi (GSTP1), | | FAEES3 |
| | | | | | mRNA. | | |
| 485 | 458 | 830403 | NM_002818.2 | NM_002818 | proteasome (prosome, | PSME2 | PA28beta; REGbeta; |
| | | | | | macropain) activator | | PA28B |
| | | | | | subunit 2 (PA28 beta) | | |
| | | | | | (PSME2), mRNA. | | |
| 486 | 460 | 830524 | NM_182646.1 | NM_182646 | cytoplasmic | CPEB2 | MGC119575; |
| | | | | | polyadenylation | | MGC119576; |
| | | | | | element binding protein | | MGC119577 |
| | | | | | 2 (CPEB2), transcript | | |
| | | | | | variant A, mRNA. | | |
| 487 | 462 | 830563 | NM_001001567.1 | NM_001001567 | phosphodiesterase 9A | PDE9A | HSPDE9A2 |
| | | | | | (PDE9A), transcript | | |
| | | | | | variant 2, mRNA. | | |
| 488 | 463 | 830653 | NM_001493.1 | NM_001493 | GDP dissociation | GDI1 | OPHN2; MRX48; |
| | | | | | inhibitor 1 (GDI1), | | RABGD1A; GDIL; |
| | | | | | mRNA. | | XAP-4; RABGDIA; |
| | | | | | | | MRX41; FLJ41411 |
| 489 | 464 | 830735 | NM_006869.1 | NM_006869 | centaurin, alpha 1 | CENTA1 | GCS1L; p42IP4 |
| | | | | | (CENTA1), mRNA. | | |
| 490 | 465 | 840168 | NM_000397.2 | NM_000397 | cytochrome b-245, beta | CYBB | CGD; GP91-PHOX; |
| | | | | | polypeptide (chronic | | GP91PHOX; NOX2; |
| | | | | | granulomatous | | GP91-1 |
| | | | | | disease) (CYBB), | | |
| | | | | | mRNA. | | |
| 491 | 466 | 840253 | NM_000690.2 | NM_000690 | aldehyde | ALDH2 | ALDM; ALDH-E2; |
| | | | | | dehydrogenase 2 | | ALDHI; MGC1806 |
| | | | | | family (mitochondrial) | | |
| | | | | | (ALDH2), nuclear gene | | |
| | | | | | encoding mitochondrial | | |
| | | | | | protein, mRNA. | | |
| 492 | 467 | 840358 | NM_002685.2 | NM_002685 | exosome component | EXOSC10 | PMSCL2; PM-Scl; |
| | | | | | 10 (EXOSC10), | | PM/Scl-100; PMSCL; |
| | | | | | transcript variant 2, | | RRP6; p4; Rrp6p; p2; |
| | | | | | mRNA. | | p3 |
| 493 | 468 | 840402 | NM_015001.2 | NM_015001 | spen homolog, | SPEN | RP1-134O19.1; |
| | | | | | transcriptional regulator | | MINT; KIAA0929; |
| | | | | | (Drosophila) (SPEN), | | SHARP |
| | | | | | mRNA. | | |
| 494 | 469 | 840543 | NR_001588.1 | NR_001588 | Shwachman-Bodian- | SBDSP | — |
| | | | | | Diamond syndrome | | |
| | | | | | pseudogene (SBDSP) | | |
| | | | | | on chromosome 7. | | |
| 495 | 470 | 840544 | NM_002896.2 | NM_002896 | RNA binding motif | RBM4 | ZCRB3A; ZCCHC21; |
| | | | | | protein 4 (RBM4), | | RBM4A; LARK; |
| | | | | | mRNA. | | MGC75138; |
| | | | | | | | DKFZp547K0918 |
| 496 | 471 | 840554 | NM_012234.4 | NM_012234 | RING1 and YY1 | RYBP | DEDAF; YEAF1; |
| | | | | | binding protein (RYBP), | | AAP1 |
| | | | | | mRNA. | | |
| 497 | 472 | 840647 | NM_033643.2 | NM_033643 | ribosomal protein L36 | RPL36 | DKFZP566B023 |
| | | | | | (RPL36), transcript | | |
| | | | | | variant 1, mRNA. | | |
| 498 | 473 | 870324 | NM_004706.3 | NM_004706 | Rho guanine nucleotide | ARHGEF1 | P115-RHOGEF; |
| | | | | | exchange factor (GEF) | | GEF1; LBCL2; |
| | | | | | 1 (ARHGEF1), | | SUB1.5 |
| | | | | | transcript variant 2, | | |
| | | | | | mRNA. | | |
| 499 | 474 | 870338 | NM_001964.2 | NM_001964 | early growth response | EGR1 | G0S30; AT225; TIS8; |
| | | | | | 1 (EGR1), mRNA. | | ZNF225; NGFI-A; |
| | | | | | | | KROX-24; ZIF-268 |
| 500 | 475 | 870408 | NM_000585.2 | NM_000585 | interleukin 15 (IL15), | IL15 | MGC9721; IL-15 |
| | | | | | transcript variant 3, | | |
| | | | | | mRNA. | | |
| 501 | 476 | 870500 | NM_015644.3 | NM_015644 | tubulin tyrosine ligase- | TTLL3 | MGC120532; |
| | | | | | like family, member 3 | | MGC120530; |
| | | | | | (TTLL3), transcript | | MGC120529; |
| | | | | | variant 2, mRNA. | | FLJ13898; HOTTL; |
| | | | | | | | DKFZp686D076; |
| | | | | | | | DKFZP434B103 |
| 502 | 477 | 870601 | NM_007027.2 | NM_007027 | topoisomerase (DNA) II | TOPBP1 | TOP2BP1 |
| | | | | | binding protein 1 | | |
| | | | | | (TOPBP1), mRNA. | | |
| 503 | 478 | 940020 | NM_020117.9 | NM_020117 | leucyl-tRNAsynthetase | LARS | PIG44; KIAA1352; |
| | | | | | (LARS), mRNA. | | hr025CI; FLJ10595; |
| | | | | | | | LEURS; LEUS; |
| | | | | | | | LARS1; LRS; |
| | | | | | | | FLJ21788; RNTLS; |
| | | | | | | | HSPC192 |
| 504 | 479 | 940725 | NM_172390.1 | NM_172390 | nuclear factor of | NFATC1 | NFATc; MGC138448; |
| | | | | | activated T-cells, | | NFAT2; NF-ATC |
| | | | | | cytoplasmic, | | |
| | | | | | calcineurin-dependent | | |
| | | | | | 1 (NFATC1), transcript | | |
| | | | | | variant 1, mRNA. | | |
| 505 | 480 | 990647 | NR_003367.1 | NR_003367 | Pvt1 oncogene | PVT1 | MGC21751 |
| | | | | | homolog (mouse) | | |
| | | | | | (PVT1) on | | |
| | | | | | chromosome 8. | | |
| 506 | 481 | 1010487 | NM_006763.2 | NM_006763 | BTG family, member 2 | BTG2 | PC3; TIS21; |
| | | | | | (BTG2), mRNA. | | MGC126064; |
| | | | | | | | MGC126063 |
| 507 | 482 | 1010592 | NM_001001548.1 | NM_001001548 | CD36 molecule | CD36 | GPIV; FAT; GP3B; |
| | | | | | (thrombospondin | | CHDS7; SCARB3; |
| | | | | | receptor) (CD36), | | PASIV; GP4 |
| | | | | | transcript variant 1, | | |
| | | | | | mRNA. | | |
| 508 | 483 | 1010719 | NM_004111.4 | NM_004111 | flap structure-specific | FEN1 | RAD2; FEN-1; MF1 |
| | | | | | endonuclease 1 | | |
| | | | | | (FEN1), mRNA. | | |
| 509 | 484 | 1030053 | NM_198055.1 | NM_198055 | myeloid zinc finger 1 | MZF1 | MZF1B; ZSCAN6; |
| | | | | | (MZF1), transcript | | MZF-1; ZNF42; Zfp98 |
| | | | | | variant 2, mRNA. | | |
| 510 | 485 | 1030167 | NM_001017373.2 | NM_001017373 | sterile alpha motif | SAMD3 | MGC35163; |
| | | | | | domain containing 3 | | FLJ34563 |
| | | | | | (SAMD3), transcript | | |
| | | | | | variant 1, mRNA. | | |
| 511 | 486 | 1030239 | NM_014766.3 | NM_014766 | secemin 1 (SCRN1), | SCRN1 | SES1; KIAA0193 |
| | | | | | mRNA. | | |
| 512 | 487 | 1030427 | NM_001014838.1 | NM_001014838 | cutA divalent cation | CUTA | MGC111154; |
| | | | | | tolerance homolog (E. coli) | | C6orf82; ACHAP |
| | | | | | (CUTA), transcript | | |
| | | | | | variant 4, mRNA. | | |
| 513 | 488 | 1030471 | NM_013336.3 | NM_013336 | Sec61 alpha 1 subunit | SEC61A1 | HSEC61; SEC61A; |
| | | | | | (S. cerevisiae) | | SEC61 |
| | | | | | (SEC61A1), mRNA. | | |
| 514 | 489 | 1030743 | NM_000595.2 | NM_000595 | lymphotoxin alpha | LTA | LT; TNFSF1; TNFB |
| | | | | | (TNF superfamily, | | |
| | | | | | member 1) (LTA), | | |
| | | | | | mRNA. | | |
| 515 | 490 | 1050309 | NM_021958.2 | NM_021958 | H2.0-like homeobox | HLX | HB24; HLX1 |
| | | | | | (HLX), mRNA. | | |
| 516 | 491 | 1050360 | NM_002121.4 | NM_002121 | major histocompatibility | HLA-DPB1 | HLA-DP1B; DPB1; |
| | | | | | complex, class II, DP | | MHC DPB1 |
| | | | | | beta 1 (HLA-DPB1), | | |
| | | | | | mRNA. | | |
| 517 | 492 | 1050612 | NM_177530.1 | NM_177530 | sulfotransferase family, | SULT1A1 | MGC5163; |
| | | | | | cytosolic, 1A, phenol- | | MGC131921; |
| | | | | | preferring, member 1 | | TSPST1; STP; PST; |
| | | | | | (SULT1A1), transcript | | HAST1/HAST2; P- |
| | | | | | variant 3, mRNA. | | PST; ST1A3; STP1 |
| 518 | 493 | 1050681 | NM_020652.1 | NM_020652 | zinc finger protein 286A | ZNF286A | KIAA1874; |
| | | | | | (ZNF286A), mRNA. | | MGC156181; |
| | | | | | | | ZNF286; MGC149627 |
| 519 | 494 | 1070450 | NM_080591.1 | NM_080591 | prostaglandin- | PTGS1 | PCOX1; PHS1; |
| | | | | | endoperoxide synthase | | PGHS1; COX1; |
| | | | | | 1 (prostaglandin G/H | | PGHS-1; PGG/HS; |
| | | | | | synthase and | | PTGHS; COX3 |
| | | | | | cyclooxygenase) | | |
| | | | | | (PTGS1), transcript | | |
| | | | | | variant 2, mRNA. | | |
| 520 | 495 | 1070475 | NM_000975.2 | NM_000975 | ribosomal protein L11 | RPL11 | GIG34 |
| | | | | | (RPL11), mRNA | | |
| 521 | 496 | 1070639 | NM_001293.1 | NM_001293 | chloride channel, | CLNS1A | CLNS1B; CLCI; ICIn |
| | | | | | nucleotide-sensitive, 1A | | |
| | | | | | (CLNS1A), mRNA. | | |
| 522 | 497 | 1090167 | NM_002070.2 | NM_002070 | guanine nucleotide | GNAI2 | H_LUCA16.1; GIP; |
| | | | | | binding protein (G | | GNAI2B; |
| | | | | | protein), alpha inhibiting | | H_LUCA15.1 |
| | | | | | activity polypeptide 2 | | |
| | | | | | (GNAI2), mRNA. | | |
| 523 | 498 | 1090239 | NM_012426.3 | NM_012426 | splicing factor 3b, | SF3B3 | SAP130; KIAA0017; |
| | | | | | subunit 3, 130 kDa | | RSE1; STAF130; |
| | | | | | (SF3B3), mRNA | | SF3b130 |
| 524 | 499 | 1090692 | NM_022913.1 | NM_022913 | GC-rich promoter | GPBP1 | GPBP; |
| | | | | | binding protein 1 | | DKFZp761C169; |
| | | | | | (GPBP1), mRNA. | | MGC126339 |
| 525 | 500 | 1170072 | NM_023072.1 | NM_023072 | zinc finger, SWIM-type | ZSWIM4 | — |
| | | | | | containing 4 (ZSWIM4), | | |
| | | | | | mRNA. | | |
| 526 | 501 | 1190026 | NM_021822.1 | NM_021822 | apolipoprotein B mRNA | APOBEC3G | CEM15; FLJ12740; |
| | | | | | editing enzyme, | | bK150C2.7; ARP9; |
| | | | | | catalytic polypeptide- | | dJ494G10.1; |
| | | | | | like 3G (APOBEC3G), | | MDS019 |
| | | | | | mRNA. | | |
| 527 | 502 | 1190142 | NM_032048.2 | NM_032048 | elastin | EMILIN2 | FLJ33200; FOAP-10; |
| | | | | | microfibrilinterfacer 2 | | EMILIN-2 |
| | | | | | (EMILIN2), mRNA. | | |
| 528 | 503 | 1190246 | NM_032590.3 | NM_032590 | F-box and leucine-rich | FBXL10 | CXXC2; Fbl10; |
| | | | | | repeat protein 10 | | JHDM1B; PCCX2 |
| | | | | | (FBXL10), transcript | | |
| | | | | | variant 1, mRNA. | | |
| 529 | 504 | 1190288 | NM_144599.3 | NM_144599 | non imprinted in | NIPA1 | SPG6; FSP3; |
| | | | | | Prader-Willi/Angelman | | MGC35570; |
| | | | | | syndrome 1 (NIPA1), | | MGC102724 |
| | | | | | mRNA. | | |
| 530 | 505 | 1190367 | NM_003897.3 | NM_003897 | immediate early | IER3 | IEX-1L; PRG1; IEX1; |
| | | | | | response 3 (IER3), | | GLY96; DIF-2; IEX-1; |
| | | | | | mRNA. | | DIF2 |
| 531 | 506 | 1190626 | NM_006624.3 | NM_006624 | zinc finger, MYND | ZMYND11 | RP11-486H9.1; |
| | | | | | domain containing 11 | | BRAM1; |
| | | | | | (ZMYND11), transcript | | MGC111056; BS69 |
| | | | | | variant 1, mRNA. | | |
| 532 | 507 | 1190634 | NM_001079804.1 | NM_001079804 | glucosidase, alpha; | GAA | LYAG |
| | | | | | acid (Pompe disease, | | |
| | | | | | glycogen storage | | |
| | | | | | disease type II) (GAA), | | |
| | | | | | transcript variant 3, | | |
| | | | | | mRNA. | | |
| 533 | 509 | 1230044 | NM_003143.1 | NM_003143 | single-stranded DNA | SSBP1 | SSBP |
| | | | | | binding protein 1 | | |
| | | | | | (SSBP1), mRNA. | | |
| 534 | 511 | 1230441 | NM_001005271.1 | NM_001005271 | chromodomain helicase | CHD3 | Mi2-ALPHA; Mi-2a; |
| | | | | | DNA binding protein 3 | | ZFH |
| | | | | | (CHD3), transcript | | |
| | | | | | variant 3, mRNA. | | |
| 535 | 512 | 1230450 | NM_017868.3 | NM_017868 | tetratricopeptide repeat | TTC12 | FLJ20535; FLJ13859; |
| | | | | | domain 12 (TTC12), | | TPARM |
| | | | | | mRNA. | | |
| 536 | 513 | 1230575 | NM_013986.2 | NM_013986 | Ewing sarcoma | EWSR1 | EWS |
| | | | | | breakpoint region 1 | | |
| | | | | | (EWSR1), transcript | | |
| | | | | | variant EWS-b, mRNA. | | |
| 537 | 514 | 1230630 | NM_181671.1 | NM_181671 | phosphatidylinositol | PITPNC1 | RDGBB; RDGB- |
| | | | | | transfer protein, | | BETA; RDGBB1 |
| | | | | | cytoplasmic 1 | | |
| | | | | | (PITPNC1), transcript | | |
| | | | | | variant 2, mRNA. | | |
| 538 | 515 | 1230639 | NM_016146.3 | NM_016146 | trafficking protein | TRAPPC4 | SBDN; CGI-104; |
| | | | | | particle complex 4 | | HSPC172; TRS23; |
| | | | | | (TRAPPC4), mRNA. | | PTD009 |
| 539 | 516 | 1230673 | NM_020230.4 | NM_020230 | peter pan homolog | PPAN | MGC14226; SSF2; |
| | | | | | (Drosophila) (PPAN), | | SSF1; BXDC3; SSF; |
| | | | | | mRNA. | | MGC45852 |
| 540 | 517 | 1230767 | NM_006435.2 | NM_006435 | interferon induced | IFITM2 | 1-8D |
| | | | | | transmembrane protein | | |
| | | | | | 2 (1-8D) (IFITM2), | | |
| | | | | | mRNA. | | |
| 541 | 518 | 1240050 | NM_198267.1 | NM_198267 | inhibitor of growth | ING3 | FLJ20089; p47ING3; |
| | | | | | family, member 3 | | ING2; Eaf4 |
| | | | | | (ING3), transcript | | |
| | | | | | variant 3, mRNA. | | |
| 542 | 519 | 1240152 | NM_001928.2 | NM_001928 | complement factor D | CFD | DF; ADN; PFD |
| | | | | | (adipsin) (CFD), | | |
| | | | | | mRNA. | | |
| 543 | 520 | 1240440 | NM_006472.2 | NM_006472 | thioredoxin interacting | TXNIP | EST01027; VDUP1; |
| | | | | | protein (TXNIP), | | THIF; HHCPA78 |
| | | | | | mRNA. | | |
| 544 | 521 | 1240504 | NM_018433.3 | NM_018433 | jumonji domain | JMJD1A | TSGA; JHMD2A; |
| | | | | | containing 1A | | KIAA0742; |
| | | | | | (JMJD1A), mRNA. | | DKFZp686A24246; |
| | | | | | | | JMJD1; |
| | | | | | | | DKFZp686P07111 |
| 545 | 522 | 1240553 | NM_014454.1 | NM_014454 | sestrin 1 (SESN1), | SESN1 | SEST1; MGC138241; |
| | | | | | mRNA. | | MGC142129; PA26; |
| | | | | | | | RP11-787I22.1 |
| 546 | 523 | 1240750 | NM_006750.2 | NM_006750 | syntrophin, beta 2 | SNTB2 | EST25263; |
| | | | | | (dystrophin-associated | | D16S2531E; |
| | | | | | protein A1, 59 kDa, | | SNT2B2; SNT3; |
| | | | | | basic component 2) | | SNTL |
| | | | | | (SNTB2), transcript | | |
| | | | | | variant 1, mRNA. | | |
| 547 | 524 | 1260341 | NM_001560.2 | NM_001560 | interleukin 13 receptor, | IL13RA1 | IL-13Ra; NR4; |
| | | | | | alpha 1 (IL13RA1), | | CD213A1 |
| | | | | | mRNA. | | |
| 548 | 525 | 1260524 | NM_003156.2 | NM_003156 | stromal interaction | STIM1 | GOK; D11S4896E |
| | | | | | molecule 1 (STIM1), | | |
| | | | | | mRNA. | | |
| 549 | 526 | 1300044 | NR_001545.1 | NR_001545 | testis-specific transciipt, | TTTY15 | DKFZP434I143 |
| | | | | | Y-linked 15 (TTTY15) | | |
| | | | | | on chromosome Y. | | |
| 550 | 527 | 1300228 | NM_017949.1 | NM_017949 | CUE domain containing | CUEDC1 | DKFZp547L163; |
| | | | | | 1 (CUEDC1), mRNA. | | FLJ20739 |
| 551 | 528 | 1300491 | NM_017443.3 | NM_017443 | polymerase (DNA | POLE3 | YBL1; p17; |
| | | | | | directed), epsilon 3 | | CHRAC17; |
| | | | | | (p17 subunit) (POLE3), | | CHARAC17 |
| | | | | | mRNA. | | |
| 552 | 529 | 1340291 | NM_145012.3 | NM_145012 | cyclin Y (CCNY), | CCNY | CBCP1; CFP1; |
| | | | | | transcript variant 1, | | C10orf9 |
| | | | | | mRNA. | | |
| 553 | 530 | 1340538 | NM_000199.2 | NM_000199 | N- | SGSH | HSS; MPS3A; SFMD |
| | | | | | sulfoglucosaminesulfohydrolase | | |
| | | | | | (sulfamidase) | | |
| | | | | | (SGSH), mRNA | | |
| 554 | 531 | 1400240 | NM_002300.4 | NM_002300 | lactate dehydrogenase | LDHB | LDH-H; TRG-5 |
| | | | | | B (LDHB), mRNA. | | |
| 555 | 532 | 1400446 | NM_001122.2 | NM_001122 | adipose differentiation- | ADFP | ADRP; MGC10598 |
| | | | | | related protein (ADFP), | | |
| | | | | | mRNA. | | |
| 556 | 533 | 1400703 | NM_019029.2 | NM_019029 | carboxypeptidase, | CPVL | HVLP; MGC10029 |
| | | | | | vitellogenic-like (CPVL), | | |
| | | | | | transcript variant 2, | | |
| | | | | | mRNA. | | |
| 557 | 534 | 1410161 | NM_001007075.1 | NM_001007075 | kelch-like 5 | KLHL5 | — |
| | | | | | (Drosophila) (KLHL5), | | |
| | | | | | transcript variant 2, | | |
| | | | | | mRNA. | | |
| 558 | 535 | 1410543 | NM_130469.2 | NM_130469 | Jun dimerization protein | JDP2 | JUNDM2 |
| | | | | | 2 (JDP2), mRNA. | | |
| 559 | 536 | 1410600 | NM_001007278.1 | NM_001007278 | tripartite motif- | TRIM13 | RNF77; CAR; LEU5; |
| | | | | | containing 13 | | RFP2; DLEU5 |
| | | | | | (TRIM13), transcript | | |
| | | | | | variant 4, mRNA. | | |
| 560 | 537 | 1430187 | NM_000100.2 | NM_000100 | cystatin B (stefin B) | CSTB | PME; CST6; EPM1; |
| | | | | | (CSTB), mRNA | | STFB |
| 561 | 538 | 1430280 | NM_004364.2 | NM_004364 | CCAAT/enhancer | CEBPA | CEBP; C/EBP-alpha |
| | | | | | binding protein | | |
| | | | | | (C/EBP), alpha | | |
| | | | | | (CEBPA), mRNA. | | |
| 562 | 539 | 1430360 | NM_015407.3 | NM_015407 | abhydrolase domain | ABHD14A | DORZ1; |
| | | | | | containing 14A | | DKFZP564O243 |
| | | | | | (ABHD14A), mRNA | | |
| 563 | 540 | 1440114 | NM_145902.1 | NM_145902 | high mobility group AT- | HMGA1 | MGC12816; |
| | | | | | hook 1 (HMGA1), | | MGC4854; HMG-R; |
| | | | | | transcript variant 4, | | MGC4242; HMGIY |
| | | | | | mRNA. | | |
| 564 | 541 | 1440187 | NM_016086.2 | NM_016086 | serine/threonine/tyrosine | STYXL1 | MK-STYX; DUSP24 |
| | | | | | interacting-like 1 | | |
| | | | | | (STYXL1), mRNA. | | |
| 565 | 542 | 1440243 | NM_016332.2 | NM_016332 | selenoprotein X, 1 | SEPX1 | MSRB1; SELR; |
| | | | | | (SEPX1), mRNA. | | MGC3344; HSPC270; |
| | | | | | | | SELX |
| 566 | 543 | 1440300 | NM_024330.1 | NM_024330 | solute carrier family 27 | SLC27A3 | VLCS-3; ACSVL3; |
| | | | | | (fatty acid transporter), | | MGC4365; FATP3 |
| | | | | | member 3 (SLC27A3), | | |
| | | | | | mRNA. | | |
| 567 | 544 | 1440605 | NM_033204.2 | NM_033204 | zinc finger protein 101 | ZNF101 | DKFZp570I0164; |
| | | | | | (ZNF101), mRNA. | | MGC149565; HZF12; |
| | | | | | | | MGC149566 |
| 568 | 545 | 1440612 | NM_014038.1 | NM_014038 | basic leucine zipper | BZW2 | MST017; MSTP017; |
| | | | | | and W2 domains 2 | | HSPC028 |
| | | | | | (BZW2), mRNA. | | |
| 569 | 546 | 1440750 | NM_030760.3 | NM_030760 | endothelial | EDG8 | SPPR-2; SPPR-1; |
| | | | | | differentiation, | | Edg-8; S1P5; S1PR5 |
| | | | | | sphingolipid G-protein- | | |
| | | | | | coupled receptor, 8 | | |
| | | | | | (EDG8), mRNA. | | |
| 570 | 547 | 1450273 | NM_024793.1 | NM_024793 | clusterin associated | CLUAP1 | FLJ13297; KIAA0643 |
| | | | | | protein 1 (CLUAP1), | | |
| | | | | | transcript variant 2, | | |
| | | | | | mRNA. | | |
| 571 | 548 | 1450707 | NM_002931.3 | NM_002931 | ring finger protein 1 | RING1 | RNF1 |
| | | | | | (RING1), mRNA | | |
| 572 | 549 | 1470386 | NM_153634.2 | NM_153634 | copine VIII (CPNE8), | CPNE8 | MGC129646; |
| | | | | | mRNA. | | MGC129645 |
| 573 | 550 | 1500152 | NM_007099.2 | NM_007099 | acid phosphatase 1, | ACP1 | HAAP; MGC3499; |
| | | | | | soluble (ACP1), | | MGC111030 |
| | | | | | transcript variant 2, | | |
| | | | | | mRNA. | | |
| 574 | 551 | 1500164 | NM_006196.2 | NM_006196 | poly(rC) binding protein | PCBP1 | hnRNP-E1; HNRPX; |
| | | | | | 1 (PCBP1), mRNA. | | HNRPE1; hnRNP-X |
| 575 | 552 | 1500470 | NM_030973.2 | NM_030973 | mediator complex | MED25 | TCBAP0758; ACID1; |
| | | | | | subunit 25 (MED25), | | MGC70671; ARC92; |
| | | | | | mRNA. | | DKFZp434K0512; |
| | | | | | | | P78 |
| 576 | 553 | 1500600 | NM_175738.3 | NM_175738 | RAB37, member RAS | RAB37 | FLJ32507; FLJ30284 |
| | | | | | oncogene family | | |
| | | | | | (RAB37), transcript | | |
| | | | | | variant 3, mRNA. | | |
| 577 | 554 | 1500711 | NM_014876.3 | NM_014876 | Josephin domain | JOSD1 | dJ508I15.2; |
| | | | | | containing 1 (JOSD1), | | KIAA0063 |
| | | | | | mRNA. | | |
| 578 | 555 | 1510026 | NM_017791.1 | NM_017791 | feline leukemia virus | FLVCR2 | FLVCR2; C14orf58; |
| | | | | | subgroup C cellular | | FLJ20371; CCT |
| | | | | | receptor family, | | |
| | | | | | member 2 (FLVCR2), | | |
| | | | | | mRNA. | | |
| 579 | 556 | 1510088 | XM_001133534.1 | XM_001133534 | PREDICTED: ATPase, | ATP1B3 | — |
| | | | | | Na+/K+ transporting, | | |
| | | | | | beta 3 polypeptide, | | |
| | | | | | transcript variant 2 | | |
| | | | | | (ATP1B3), mRNA. | | |
| 580 | 557 | 1510296 | NM_133436.1 | NM_133436 | asparagine synthetase | ASNS | TS11 |
| | | | | | (ASNS), transcript | | |
| | | | | | variant 1, mRNA. | | |
| 581 | 558 | 1510438 | NM_012087.2 | NM_012087 | general transcription | GTF3C5 | TFIIIC63; FLJ20857; |
| | | | | | factor IIIC, polypeptide | | TFIIICepsilon; TFiiiC2- |
| | | | | | 5, 63 kDa (GTF3C5), | | 63 |
| | | | | | mRNA. | | |
| 582 | 559 | 1510521 | NM_002573.2 | NM_002573 | platelet-activating factor | PAFAH1B3 | — |
| | | | | | acetylhydrolase, | | |
| | | | | | isoform lb, gamma | | |
| | | | | | subunit 29 kDa | | |
| | | | | | (PAFAH1B3), mRNA. | | |
| 583 | 560 | 1510630 | NM_017803.3 | NM_017803 | dihydrouridine synthase | DUS2L | SMM1; FLJ20399; |
| | | | | | 2-like, SMM1 homolog | | URLC8; DUS2 |
| | | | | | (S. cerevisiae) | | |
| | | | | | (DUS2L), mRNA. | | |
| 584 | 561 | 1510722 | NM_018434.4 | NM_018434 | ring finger protein 130 | RNF130 | G1RZFP; |
| | | | | | (RNF130), mRNA | | MGC138647; |
| | | | | | | | GOLIATH; |
| | | | | | | | MGC99542; |
| | | | | | | | MGC117241; GP |
| 585 | 562 | 1570338 | NM_198480.2 | NM_198480 | zinc finger protein 615 | ZNF615 | DKFZp686O1554; |
| | | | | | (ZNF615), mRNA. | | FLJ39372; FLJ33710 |
| 586 | 563 | 1570348 | NM_001759.2 | NM_001759 | cyclin D2 (CCND2), | CCND2 | KIAK0002; |
| | | | | | mRNA. | | MGC102758 |
| 587 | 564 | 1570725 | NM_144772.1 | NM_144772 | apolipoprotein A-I | APOA1BP | MGC119145; |
| | | | | | binding protein | | MGC119143; AIBP |
| | | | | | (APOA1BP), mRNA | | |
| 588 | 565 | 1580093 | NM_020680.3 | NM_020680 | SCY1-like 1 (S. cerevisiae) | SCYL1 | TRAP; P105; NTKL; |
| | | | | | (SCYL1), | | TEIF; GKLP; |
| | | | | | transcript variant A, | | MGC78454; NKTL; |
| | | | | | mRNA. | | TAPK; HT019 |
| 589 | 566 | 1580224 | NM_012241.2 | NM_012241 | sirtuin (silent mating | SIRT5 | SIR2L5 |
| | | | | | type information | | |
| | | | | | regulation 2 homolog) 5 | | |
| | | | | | (S. cerevisiae) (SIRT5), | | |
| | | | | | transcript variant 1, | | |
| | | | | | mRNA. | | |
| 590 | 567 | 1580309 | NM_001018108.2 | NM_001018108 | small EDRK-rich factor | SERF2 | 4F5REL; H4F5rel; |
| | | | | | 2 (SERF2), mRNA. | | FLJ37527; FLJ38557; |
| | | | | | | | FAM2C; MGC48826; |
| | | | | | | | HsT17089; FLJ20431 |
| 591 | 568 | 1580601 | NM_005800.3 | NM_005800 | ubiquitin specific | USPL1 | D135106E; C13orf22; |
| | | | | | peptidase like 1 | | DKFZp781K2286; |
| | | | | | (USPL1), mRNA. | | RP11-121O19.1; |
| | | | | | | | bA121O19.1; |
| | | | | | | | FLJ32952 |
| 592 | 569 | 1580719 | NM_022065.4 | NM_022065 | thyroid adenoma | THADA | GITA; FLJ44016; |
| | | | | | associated (THADA), | | KIAA1767; FLJ44876; |
| | | | | | transcript variant 1, | | FLJ21877; FLJ77530 |
| | | | | | mRNA. | | |
| 593 | 571 | 1660113 | NM_001079673.1 | NM_001079673 | fibronectin type III | FNDC3A | KIAA0970; |
| | | | | | domain containing 3A | | bA203I16.5; FNDC3; |
| | | | | | (FNDC3A), transcript | | RP11-203I16.5; |
| | | | | | variant 1, mRNA. | | bA203I16.1; |
| | | | | | | | FLJ31509 |
| 594 | 572 | 1660215 | NM_005177.3 | NM_005177 | ATPase, H+ | ATP6V0A1 | ATP6N1; VPP1; |
| | | | | | transporting, lysosomal | | DKFZp781J1951; |
| | | | | | V0 subunit a1 | | Stv1; a1; ATP6N1A; |
| | | | | | (ATP6V0A1), mRNA. | | Vph1 |
| 595 | 573 | 1660278 | NM_012458.2 | NM_012458 | translocase of inner | TIMM13 | ppv1; TIMM13B; |
| | | | | | mitochondrial | | TIM13B; TIM13; |
| | | | | | membrane 13 homolog | | TIMM13A |
| | | | | | (yeast) (TIMM13), | | |
| | | | | | nuclear gene encoding | | |
| | | | | | mitochondrial protein, | | |
| | | | | | mRNA. | | |
| 596 | 574 | 1660397 | NM_003153.3 | NM_003153 | signal transducer and | STAT6 | STAT6C; D1251644; |
| | | | | | activator of transcription | | STAT6B; IL-4-STAT |
| | | | | | 6, interleukin-4 induced | | |
| | | | | | (STAT6), mRNA. | | |
| 597 | 575 | 1660646 | NM_018151.3 | NM_018151 | RAP1 interacting factor | RIF1 | DKFZp781N1478; |
| | | | | | homolog (yeast) (RIF1), | | FLJ12870 |
| | | | | | mRNA. | | |
| 598 | 576 | 1660685 | NM_018460.2 | NM_018460 | Rho GTPase activating | ARHGAP15 | BM046 |
| | | | | | protein 15 | | |
| | | | | | (ARHGAP15), mRNA. | | |
| 599 | 577 | 1690209 | NM_203385.1 | NM_203385 | ribonuclease/angiogenin | RNH1 | MGC54054; RAI; |
| | | | | | inhibitor 1 (RNH1), | | MGC4569; |
| | | | | | transcript variant 4, | | MGC18200; RNH |
| | | | | | mRNA. | | |
| 600 | 578 | 1690288 | NM_006901.1 | NM_006901 | myosin IXA (MYO9A), | MYO9A | MGC71859; |
| | | | | | mRNA. | | FLJ13244; FLJ11061 |
| 601 | 579 | 1710070 | NM_000632.3 | NM_000632 | integdn, alpha M | ITGAM | MO1A; MAC1A; |
| | | | | | (complement | | CD11B; MAC-1; |
| | | | | | component 3 receptor 3 | | CR3A; MGC117044 |
| | | | | | subunit) (ITGAM), | | |
| | | | | | mRNA. | | |
| 602 | 580 | 1710369 | NM_001033853.1 | NM_001033853 | ribosomal protein L3 | RPL3 | MGC104284; |
| | | | | | (RPL3), transcript | | TARBP-B |
| | | | | | variant 2, mRNA. | | |
| 603 | 581 | 1710541 | NM_144649.1 | NM_144649 | transmembrane protein | TMEM71 | FLJ33069; |
| | | | | | 71 (TMEM71), mRNA. | | MGC111188 |
| 604 | 582 | 1710630 | NM_003032.2 | NM_003032 | ST6 beta- | ST6GAL1 | ST6Gal I; SIAT1; |
| | | | | | galactosamide alpha- | | ST6GalI; MGC48859; |
| | | | | | 2,6-sialyltranferase 1 | | CD75 |
| | | | | | (ST6GAL1), transcript | | |
| | | | | | variant 2, mRNA. | | |
| 605 | 583 | 1740050 | XM_495863.3 | XM_495863 | PREDICTED: GTPase, | GVIN1 | — |
| | | | | | very large interferon | | |
| | | | | | inducible 1 (GVIN1), | | |
| | | | | | mRNA. | | |
| 606 | 584 | 1740136 | NM_018976.3 | NM_018976 | solute carrier family 38, | SLC38A2 | PRO1068; SAT2; |
| | | | | | member 2 (SLC38A2), | | SNAT2; KIAA1382; |
| | | | | | mRNA. | | ATA2 |
| 607 | 585 | 1740373 | NM_003565.1 | NM_003565 | unc-51-like kinase 1 (C. elegans) | ULK1 | FLJ38455; UNC51; |
| | | | | | (ULK1), | | Unc51.1; ATG1 |
| | | | | | mRNA. | | |
| 608 | 586 | 1740471 | NM_012461.1 | NM_012461 | TERF1 (TRF1)- | TINF2 | TIN2 |
| | | | | | interacting nuclear | | |
| | | | | | factor 2 (TINF2), | | |
| | | | | | mRNA. | | |
| 609 | 587 | 1740646 | NM_003737.2 | NM_003737 | dachsous 1 | DCHS1 | CDH25; KIAA1773; |
| | | | | | (Drosophila) (DCHS1), | | PCDH16; FLJ11790; |
| | | | | | mRNA. | | FIB1 |
| 610 | 588 | 1770035 | NM_017851.4 | NM_017851 | poly (ADP-ribose) | PARP16 | FLJ25281; FLJ20509; |
| | | | | | polymerase family, | | C15orf30 |
| | | | | | member 16 (PARP16), | | |
| | | | | | mRNA. | | |
| 611 | 589 | 1770152 | NM_152851.1 | NM_152851 | membrane-spanning 4- | MS4A6A | CDA01; MSTP090; |
| | | | | | domains, subfamily A, | | MGC22650; 4SPAN3; |
| | | | | | member 6A (MS4A6A), | | 4SPAN3.2; MS4A6; |
| | | | | | transcript variant 3, | | CD20L3; MST090; |
| | | | | | mRNA. | | MGC131944 |
| 612 | 590 | 1770273 | NM_001029862.1 | NM_001029862 | ankyrin repeat domain | ANKRD30B | NY-BR-1.1 |
| | | | | | 30B (ANKRD30B), | | |
| | | | | | mRNA. | | |
| 613 | 591 | 1770546 | NM_004044.4 | NM_004044 | 5-aminoimidazole-4- | ATIC | PURH; IMPCHASE; |
| | | | | | carboxamide | | AICARFT; AICAR |
| | | | | | ribonucleotide | | |
| | | | | | formyltransferase/IMP | | |
| | | | | | cyclohydrolase (ATIC), | | |
| | | | | | mRNA. | | |
| 614 | 592 | 1770717 | NM_003609.2 | NM_003609 | HIRA interacting protein | HIRIP3 | — |
| | | | | | 3 (HIRIP3), mRNA. | | |
| 615 | 593 | 1770730 | NM_003971.3 | NM_003971 | sperm associated | SPAG9 | FLJ34602; |
| | | | | | antigen 9 (SPAG9), | | MGC14967; |
| | | | | | mRNA. | | MGC117291; |
| | | | | | | | FLJ26141; JLP; |
| | | | | | | | HLC4; FLJ13450; |
| | | | | | | | PHET; MGC74461; |
| | | | | | | | HSS; PIG6; |
| | | | | | | | FLJ14006; KIAA0516 |
| 616 | 594 | 1780259 | NM_017918.3 | NM_017918 | coiled-coil domain | CCDC109B | FLJ20647 |
| | | | | | containing 109B | | |
| | | | | | (CCDC109B), mRNA. | | |
| 617 | 595 | 1780411 | NM_148172.1 | NM_148172 | phosphatidylethanolamine | PEMT | PEAMT; MGC2483; |
| | | | | | N-methyltransferase | | PEMPT; PNMT; |
| | | | | | (PEMT), nuclear gene | | PEMT2 |
| | | | | | encoding mitochondrial | | |
| | | | | | protein, transcript | | |
| | | | | | variant 1, mRNA. | | |
| 618 | 596 | 1780730 | NM_014167.2 | NM_014167 | coiled-coil domain | CCDC59 | FLJ10294; HSPC128 |
| | | | | | containing 59 | | |
| | | | | | (CCDC59), mRNA. | | |
| 619 | 597 | 1820037 | NM_000617.1 | NM_000617 | solute carrier family 11 | SLC11A2 | FLJ37416; NRAMP2; |
| | | | | | (proton-coupled | | DCT1; DMT1 |
| | | | | | divalent metal ion | | |
| | | | | | transporters), member | | |
| | | | | | 2 (SLC11A2), mRNA. | | |
| 620 | 598 | 1820053 | NM_152346.1 | NM_152346 | solute carrier family 43, | SLC43A2 | FLJ23848; LAT4; |
| | | | | | member 2 (SLC43A2), | | MGC34680 |
| | | | | | mRNA. | | |
| 621 | 599 | 1820279 | NM_130783.3 | NM_130783 | tetraspanin 18 | TSPAN18 | TSPAN |
| | | | | | (TSPAN18), transcript | | |
| | | | | | variant 2, mRNA. | | |
| 622 | 600 | 1820300 | NM_001334.2 | NM_001334 | cathepsin O (CTSO), | CTSO | CTSO1 |
| | | | | | mRNA. | | |
| 623 | 601 | 1820379 | NM_000954.5 | NM_000954 | prostaglandin D2 | PTGDS | PGD2; PGDS; |
| | | | | | synthase 21 kDa (brain) | | PGDS2; PDS |
| | | | | | (PTGDS), mRNA. | | |
| 624 | 602 | 1820438 | NM_001014380.1 | NM_001014380 | katanin p60 subunit A- | KATNAL1 | MGC2599 |
| | | | | | like 1 (KATNAL1), | | |
| | | | | | transcript variant 2, | | |
| | | | | | mRNA. | | |
| 625 | 603 | 1820441 | NM_144567.3 | NM_144567 | angel homolog 2 | ANGEL2 | FLJ12793; |
| | | | | | (Drosophila) | | KIAA0759L |
| | | | | | (ANGEL2), mRNA. | | |
| 626 | 604 | 1820470 | NM_016167.3 | NM_016167 | nucleolar protein 7, | NOL7 | RARG-1; dJ223E5.2; |
| | | | | | 27 kDa (NOL7), mRNA. | | MGC71933; C6orf90 |
| 627 | 605 | 1820504 | NM_000269.2 | NM_000269 | non-metastatic cells 1, | NME1 | NDPKA; NM23-H1; |
| | | | | | protein (NM23A) | | NDPK-A; NM23; |
| | | | | | expressed in (NME1), | | AWD; GAAD |
| | | | | | transcript variant 2, | | |
| | | | | | mRNA. | | |
| 628 | 606 | 1820543 | NM_182498.2 | NM_182498 | zinc finger protein 428 | ZNF428 | MGC51082; Zfp428; |
| | | | | | (ZNF428), mRNA. | | C19orf37 |
| 629 | 607 | 1850259 | NM_205843.1 | NM_205843 | nuclear factor I/C | NFIC | CTF5; CTF; NF-I; NFI; |
| | | | | | (CCAAT-binding | | MGC20153 |
| | | | | | transcription factor) | | |
| | | | | | (NFIC), transcript | | |
| | | | | | variant 2, mRNA. | | |
| 630 | 608 | 1850338 | NM_001000.2 | NM_001000 | ribosomal protein L39 | RPL39 | — |
| | | | | | (RPL39), mRNA. | | |
| 631 | 609 | 1850523 | NM_004131.3 | NM_004131 | granzyme B (granzyme | GZMB | CCPI; CGL1; |
| | | | | | 2, cytotoxic T- | | CTSGL1; CGL-1; |
| | | | | | lymphocyte-associated | | CSP-B; CTLA1; |
| | | | | | serine esterase 1) | | CSPB; SECT; HLP |
| | | | | | (GZMB), mRNA. | | |
| 632 | 610 | 1850612 | NM_005484.2 | NM_005484 | poly (ADP-ribose) | PARP2 | ADPRTL3; ADPRTL2; |
| | | | | | polymerase family, | | PARP-2; ADPRT2; |
| | | | | | member 2 (PARP2), | | pADPRT-2 |
| | | | | | mRNA. | | |
| 633 | 611 | 1940021 | NM_002087.2 | NM_002087 | granulin (GRN), mRNA. | GRN | PEPI; PGRN; |
| | | | | | | | PCDGF; GEP; GP88 |
| 634 | 612 | 1940129 | NM_001040023.1 | NM_001040023 | signal-regulatory | SIRPA | SIRPalpha2; BIT; |
| | | | | | protein alpha (SIRPA), | | SHPS1; MFR; SIRP; |
| | | | | | transcript variant 2, | | SHPS-1; CD172A; |
| | | | | | mRNA. | | SIRP-ALPHA-1; |
| | | | | | | | SIRPalpha; PTPNS1; |
| | | | | | | | P84; MYD-1 |
| 635 | 613 | 1940187 | NM_130797.2 | NM_130797 | dipeptidyl-peptidase 6 | DPP6 | DPPX; MGC46605 |
| | | | | | (DPP6), transcript | | |
| | | | | | variant 1, mRNA. | | |
| 636 | 614 | 1940193 | NM_022055.1 | NM_022055 | potassium channel, | KCNK12 | THIK2; THIK-2 |
| | | | | | subfamily K, member | | |
| | | | | | 12 (KCNK12), mRNA. | | |
| 637 | 615 | 1940402 | NM_001013706.2 | NM_001013706 | lipid storage droplet | LSDP5 | — |
| | | | | | protein 5 (LSDP5), | | |
| | | | | | mRNA. | | |
| 638 | 616 | 1980059 | NM_170774.1 | NM_170774 | Ras association | RASSF2 | DKFZp781O1747; |
| | | | | | (RalGDS/AF-6) domain | | KIAA0168 |
| | | | | | family member 2 | | |
| | | | | | (RASSF2), transcript | | |
| | | | | | variant 2, mRNA. | | |
| 639 | 617 | 1980220 | NM_001039712.1 | NM_001039712 | death effector domain | DEDD | KE05; CASP8IP1; |
| | | | | | containing (DEDD), | | FLDED1; DEDD1; |
| | | | | | transcript variant 4, | | DEFT |
| | | | | | mRNA. | | |
| 640 | 618 | 1980242 | NM_001239.2 | NM_001239 | cyclin H (CCNH), | CCNH | p34; CAK; p37 |
| | | | | | mRNA. | | |
| 641 | 619 | 1980553 | NM_003815.3 | NM_003815 | ADAM | ADAM15 | MDC15 |
| | | | | | metallopeptidase | | |
| | | | | | domain 15 (ADAM15), | | |
| | | | | | transcript variant 2, | | |
| | | | | | mRNA. | | |
| 642 | 620 | 1980632 | NM_001539.2 | NM_001539 | DnaJ (Hsp40) homolog, | DNAJA1 | DjA1; hDJ-2; HSJ2; |
| | | | | | subfamily A, member 1 | | DJ-2; HSPF4; HSDJ; |
| | | | | | (DNAJA1), mRNA. | | HDJ2 |
| 643 | 621 | 1980762 | NM_133491.2 | NM_133491 | spermidine/spermine | SAT2 | SSAT2 |
| | | | | | N1-acetyltransferase | | |
| | | | | | family member 2 | | |
| | | | | | (SAT2), mRNA. | | |
| 644 | 622 | 1990379 | NM_152270.2 | NM_152270 | schlafen family member | SLFN11 | FLJ34922; SLFN8/9 |
| | | | | | 11 (SLFN11), mRNA. | | |
| 645 | 623 | 1990397 | NM_004510.2 | NM_004510 | SP110 nuclear body | SP110 | FLJ22835; IFI75; |
| | | | | | protein (SP110), | | VODI; IFI41 |
| | | | | | transcript variant b, | | |
| | | | | | mRNA. | | |
| 646 | 624 | 2000167 | NM_032876.4 | NM_032876 | jub, ajuba homolog | JUB | Ajuba; MGC15563 |
| | | | | | (Xenopus laevis) (JUB), | | |
| | | | | | transcript variant 1, | | |
| | | | | | mRNA. | | |
| 647 | 625 | 2000195 | NM_017599.2 | NM_017599 | vezatin, adherens | VEZT | DKFZp761C241; |
| | | | | | junctions | | VEZATIN |
| | | | | | transmembrane protein | | |
| | | | | | (VEZT), mRNA. | | |
| 648 | 626 | 2000482 | NM_000107.1 | NM_000107 | damage-specific DNA | DDB2 | FLJ34321 |
| | | | | | binding protein 2, | | |
| | | | | | 48 kDa (DDB2), mRNA. | | |
| 649 | 627 | 2000500 | NM_016047.3 | NM_016047 | splicing factor 3B, 14 kDa | SF3B14 | Ht006; SF3B14a; |
| | | | | | subunit (SF3B14), | | SAP14; CGI-110; |
| | | | | | mRNA. | | HSPC175; P14 |
| 650 | 628 | 2030088 | NM_178273.1 | NM_178273 | paired immunoglobin- | PILRA | FDF03 |
| | | | | | like type 2 receptor | | |
| | | | | | alpha (PILRA), | | |
| | | | | | transcript variant 3, | | |
| | | | | | mRNA. | | |
| 651 | 629 | 2030360 | NM_001042693.1 | NM_001042693 | hypothetical protein | MGC52498 | PRO7171; |
| | | | | | MGC52498 | | WWLS2783 |
| | | | | | (MGC52498), mRNA. | | |
| 652 | 630 | 2060047 | NM_004776.2 | NM_004776 | UDP-Gal:betaGlcNAc | B4GALT5 | beta4Gal-T5; BETA4- |
| | | | | | beta 1,4- | | GALT-IV; B4Gal-T5; |
| | | | | | galactosyltransferase, | | gt-V; beta4GalT-V |
| | | | | | polypeptide 5 | | |
| | | | | | (B4GALT5), mRNA. | | |
| 653 | 631 | 2060121 | NM_000147.3 | NM_000147 | fucosidase, alpha-L-1, | FUCA1 | — |
| | | | | | tissue (FUCA1), | | |
| | | | | | mRNA. | | |
| 654 | 632 | 2060154 | NM_024742.1 | NM_024742 | armadillo repeat | ARMC5 | FLJ00019; FLJ13063 |
| | | | | | containing 5 (ARMC5), | | |
| | | | | | mRNA. | | |
| 655 | 633 | 2060286 | NM_005134.2 | NM_005134 | protein phosphatase 4, | PPP4R1 | PP4R1; PP4(Rmeg) |
| | | | | | regulatory subunit 1 | | |
| | | | | | (PPP4R1), transcript | | |
| | | | | | variant 2, mRNA. | | |
| 656 | 634 | 2070037 | NM_012092.2 | NM_012092 | inducible T-cell co- | ICOS | CD278; MGC39850; |
| | | | | | stimulator (ICOS), | | AILIM |
| | | | | | mRNA. | | |
| 657 | 635 | 2070088 | NM_002127.3 | NM_002127 | HLA-G | HLA-G | MHC-G |
| | | | | | histocompatibility | | |
| | | | | | antigen, class I, G | | |
| | | | | | (HLA-G), mRNA. | | |
| 658 | 636 | 2070291 | NM_002633.2 | NM_002633 | phosphoglucomutase 1 | PGM1 | — |
| | | | | | (PGM1), mRNA. | | |
| 659 | 637 | 2070376 | XM_001132711.1 | XM_001132711 | PREDICTED: radical | RFNG | — |
| | | | | | fringe homolog | | |
| | | | | | (Drosophila) (RFNG), | | |
| | | | | | mRNA. | | |
| 660 | 638 | 2070736 | NM_138341.1 | NM_138341 | transmembrane protein | TMEM116 | FLJ90167 |
| | | | | | 116 (TMEM116), | | |
| | | | | | mRNA. | | |
| 661 | 639 | 2100139 | NM_005455.3 | NM_005455 | zinc finger, RAN- | ZRANB2 | DKFZp686J1831; |
| | | | | | binding domain | | DKFZp686N09117; |
| | | | | | containing 2 (ZRANB2), | | ZIS2; ZIS1; |
| | | | | | transcript variant 2, | | FLJ41119; ZIS; |
| | | | | | mRNA. | | ZNF265 |
| 662 | 640 | 2120053 | NM_000104.2 | NM_000104 | cytochrome P450, | CYP1B1 | GLC3A; CP1B |
| | | | | | family 1, subfamily B, | | |
| | | | | | polypeptide 1 | | |
| | | | | | (CYP1B1), mRNA. | | |
| 663 | 641 | 2120224 | NM_033121.1 | NM_033121 | ankyrin repeat domain | ANKRD13A | ANKRD13; NY-REN- |
| | | | | | 13A (ANKRD13A), | | 25 |
| | | | | | mRNA. | | |
| 664 | 642 | 2120360 | NM_006950.3 | NM_006950 | synapsin I (SYN1), | SYN1 | SYN1a; SYNI; SYN1b |
| | | | | | transcript variant Ia, | | |
| | | | | | mRNA. | | |
| 665 | 643 | 2120500 | NM_152233.2 | NM_152233 | sorting nexin 6 (SNX6), | SNX6 | MSTP010; MGC3157; |
| | | | | | transcript variant 2, | | TFAF2 |
| | | | | | mRNA. | | |
| 666 | 644 | 2140202 | NM_020711.1 | NM_020711 | ermin, ERM-like protein | ERMN | JN; KIAA1189; ermin |
| | | | | | (ERMN), transcript | | |
| | | | | | variant 2, mRNA. | | |
| 667 | 645 | 2140288 | NM_024829.4 | NM_024829 | hypothetical protein | FLJ22662 | — |
| | | | | | FLJ22662 (FLJ22662), | | |
| | | | | | mRNA. | | |
| 668 | 646 | 2140364 | NM_022340.2 | NM_022340 | zinc finger, FYVE | ZFYVE20 | MGC126210; |
| | | | | | domain containing 20 | | FLJ34993; |
| | | | | | (ZFYVE20), mRNA. | | Rabenosyn-5 |
| 669 | 647 | 2140382 | NM_015148.2 | NM_015148 | PAS domain containing | PASK | KIAA0135; STK37; |
| | | | | | serine/threonine kinase | | PASKIN; |
| | | | | | (PASK), mRNA | | DKFZp686P2031; |
| | | | | | | | DKFZP434O051 |
| 670 | 648 | 2140735 | NM_006266.2 | NM_006266 | ral guanine nucleotide | RALGDS | RGF; RalGEF; |
| | | | | | dissociation stimulator | | FLJ20922 |
| | | | | | (RALGDS), transcript | | |
| | | | | | variant 1, mRNA. | | |
| 671 | 649 | 2190064 | NM_003756.2 | NM_003756 | eukaryotic translation | EIF3H | EIF3S3; eIF3h; |
| | | | | | initiation factor 3, | | MGC102958; eIF3- |
| | | | | | subunit H (EIF3H), | | p40; eIF3-gamma |
| | | | | | mRNA. | | |
| 672 | 650 | 2190189 | NM_015934.3 | NM_015934 | nucleolar protein | NOP5/NOP58 | HSPC120 |
| | | | | | NOP5/NOP58 | | |
| | | | | | (NOP5/NOP58), | | |
| | | | | | mRNA. | | |
| 673 | 651 | 2190390 | NM_147223.2 | NM_147223 | nuclear receptor | NCOA1 | RIP160; NCoA-1; |
| | | | | | coactivator 1 (NCOA1), | | SRC1; MGC129719; |
| | | | | | transcript variant 2, | | MGC129720; F-SRC-1 |
| | | | | | mRNA. | | |
| 674 | 652 | 2190730 | NM_001007794.1 | NM_001007794 | choline/ethanolamine | CEPT1 | MGC45223; |
| | | | | | phosphotransferase 1 | | DKFZp313G0615 |
| | | | | | (CEPT1), transcript | | |
| | | | | | variant 2, mRNA. | | |
| 675 | 653 | 2230019 | NM_001078170.1 | NM_001078170 | RANBP2-like and GRIP | RGPD2 | RGP2; RANBP2L2; |
| | | | | | domain containing 2 | | NUP358 |
| | | | | | (RGPD2), mRNA. | | |
| | | | | | XM_001134112 | | |
| | | | | | XM_001134114 | | |
| | | | | | XM_001134116 | | |
| 676 | 654 | 2230408 | NM_006578.3 | NM_006578 | guanine nucleotide | GNB5 | FLJ37457; FLJ43714; |
| | | | | | binding protein (G | | GB5 |
| | | | | | protein), beta 5 | | |
| | | | | | (GNB5), transcript | | |
| | | | | | variant 1, mRNA. | | |
| 677 | 655 | 2230431 | NM_002200.3 | NM_002200 | interferon regulatory | IRF5 | — |
| | | | | | factor 5 (IRF5), | | |
| | | | | | transcript variant 1, | | |
| | | | | | mRNA. | | |
| 678 | 656 | 2230730 | NM_018079.3 | NM_018079 | S1 RNA binding | SRBD1 | FLJ10379 |
| | | | | | domain 1 (SRBD1), | | |
| | | | | | mRNA. | | |
| 679 | 657 | 2260129 | NM_022349.2 | NM_022349 | membrane-spanning 4- | MS4A6A | CDA01; MSTP090; |
| | | | | | domains, subfamily A, | | MGC22650; 4SPAN3; |
| | | | | | member 6A (MS4A6A), | | 4SPAN3.2; MS4A6; |
| | | | | | transcript variant 2, | | CD20L3; MST090; |
| | | | | | mRNA. | | MGC131944 |
| 680 | 659 | 2260619 | NM_080875.1 | NM_080875 | mindbomb homolog 2 | MIB2 | ZZZ5; ZZANK1; |
| | | | | | (Drosophila) (MIB2), | | FLJ20648; FLJ39787 |
| | | | | | mRNA. | | |
| 681 | 660 | 2320215 | NM_024923.2 | NM_024923 | nucleoporin 210 kDa | NUP210 | KIAA0906; FLJ22389; |
| | | | | | (NUP210), mRNA. | | GP210; POM210 |
| 682 | 661 | 2320286 | NM_004973.2 | NM_004973 | jumonji, AT rich | JARID2 | JMJ |
| | | | | | interactive domain 2 | | |
| | | | | | (JARID2), mRNA | | |
| 683 | 662 | 2320722 | NM_014957.2 | NM_014957 | DENN/MADD domain | DENND3 | KIAA0870 |
| | | | | | containing 3 | | |
| | | | | | (DENND3), mRNA. | | |
| 684 | 663 | 2340072 | NM_022750.2 | NM_022750 | poly (ADP-ribose) | PARP12 | MSTP109; FLJ22693; |
| | | | | | polymerase family, | | ZC3H1; ZC3HDC1; |
| | | | | | member 12 (PARP12), | | MST109; PARP-12 |
| | | | | | mRNA. | | |
| 685 | 664 | 2340180 | NM_003564.1 | NM_003564 | transgelin 2 (TAGLN2), | TAGLN2 | KIAA0120; HA1756 |
| | | | | | mRNA. | | |
| 686 | 665 | 2350215 | NM_021807.3 | NM_021807 | exocyst complex | EXOC4 | SEC8L1; REC8; |
| | | | | | component 4 (EXOC4), | | Sec8p; SEC8; |
| | | | | | transcript variant 1, | | MGC27170 |
| | | | | | mRNA. | | |
| 687 | 666 | 2350468 | NM_001077203.1 | NM_001077203 | SUMO1/sentrin specific | SENP7 | KIAA1707; |
| | | | | | peptidase 7 (SENP7), | | MGC157730 |
| | | | | | transcript variant 2, | | |
| | | | | | mRNA. | | |
| 688 | 667 | 2360326 | NM_003186.3 | NM_003186 | transgelin (TAGLN), | TAGLN | TAGLN1; WS3-10; |
| | | | | | transcript variant 2, | | SM22; |
| | | | | | mRNA. | | DKFZp686P11128; |
| | | | | | | | SMCC |
| 689 | 668 | 2360711 | NM_024010.1 | NM_024010 | 5- | MTRR | MSR; MGC129643 |
| | | | | | methyltetrahydrofolate- | | |
| | | | | | homocysteine | | |
| | | | | | methyltransferasereductase | | |
| | | | | | (MTRR), transcript | | |
| | | | | | variant 2, mRNA. | | |
| 690 | 669 | 2360719 | NM_007199.1 | NM_007199 | interleukin-1 receptor- | IRAK3 | IRAKM; ASRT5; |
| | | | | | associated kinase 3 | | IRAK-M |
| | | | | | (IRAK3), mRNA. | | |
| 691 | 671 | 2370064 | NM_001671.2 | NM_001671 | asialoglycoprotein | ASGR1 | ASGPR; Hs.12056; |
| | | | | | receptor 1 (ASGR1), | | CLEC4H1 |
| | | | | | mRNA. | | |
| 692 | 672 | 2370128 | NM_032839.1 | NM_032839 | disrupted in renal | DIRC2 | FLJ14784; RCC4 |
| | | | | | carcinoma 2 (DIRC2), | | |
| | | | | | mRNA. | | |
| 693 | 673 | 2370228 | NM_033124.2 | NM_033124 | coiled-coil domain | CCDC65 | FLJ25663; NYD- |
| | | | | | containing 65 | | SP28; FLJ35732 |
| | | | | | (CCDC65), mRNA. | | |
| 694 | 674 | 2450131 | NM_020338.2 | NM_020338 | zinc finger, MIZ-type | ZMIZ1 | MIZ; Zimp10; |
| | | | | | containing 1 (ZMIZ1), | | FLJ13541; hZIMP10; |
| | | | | | mRNA. | | KIAA1224; RAI17 |
| 695 | 675 | 2450132 | NM_030573.2 | NM_030573 | THAP domain | THAP7 | MGC10963 |
| | | | | | containing 7 (THAP7), | | |
| | | | | | transcript variant 1, | | |
| | | | | | mRNA. | | |
| 696 | 676 | 2450280 | NM_016505.2 | NM_016505 | zinc finger, CCHC | ZCCHC17 | pNO40; PS1D; |
| | | | | | domain containing 17 | | HSPC251; RP11- |
| | | | | | (ZCCHC17), mRNA. | | 266K22.1 |
| 697 | 677 | 2450427 | NM_005601.3 | NM_005601 | natural killer cell group | NKG7 | GIG1 |
| | | | | | 7 sequence (NKG7), | | |
| | | | | | mRNA. | | |
| 698 | 678 | 2450554 | NM_203284.1 | NM_203284 | recombination signal | RBPJ | SUH; RBP-J; RBPJK; |
| | | | | | binding protein for | | csl; KBF2; IGKJRB1; |
| | | | | | immunoglobulin kappa | | IGKJRB; CBF1; |
| | | | | | J region (RBPJ), | | RBPSUH; |
| | | | | | transcript variant 4, | | MGC61669 |
| | | | | | mRNA. | | |
| 699 | 679 | 2450563 | NM_001008738.2 | NM_001008738 | folliculin interacting | FNIP1 | DKFZp781P0215; |
| | | | | | protein 1 (FNIP1), | | KIAA1961; MGC667; |
| | | | | | transcript variant 2, | | DKFZp686E18167 |
| | | | | | mRNA. | | |
| 700 | 680 | 2450707 | NR_002825.1 | NR_002825 | sialic acid binding Ig- | SIGLECP16 | Siglec-P16 |
| | | | | | like lectin, pseudogene | | |
| | | | | | 16 (SIGLECP16) on | | |
| | | | | | chromosome 19. | | |
| 701 | 681 | 2450762 | NM_014002.2 | NM_014002 | inhibitor of kappa light | IKBKE | MGC125295; |
| | | | | | polypeptide gene | | MGC125297; IKKI; |
| | | | | | enhancer in B-cells, | | MGC125294; IKK-i; |
| | | | | | kinase epsilon (IKBKE), | | IKKE; KIAA0151 |
| | | | | | mRNA. | | |
| 702 | 682 | 2470070 | NM_005647.2 | NM_005647 | transducin (beta)-like | TBL1X | EBI; TBL1 |
| | | | | | 1X-linked (TBL1X), | | |
| | | | | | mRNA. | | |
| 703 | 683 | 2470079 | NM_001032293.2 | NM_001032293 | zinc finger protein 207 | ZNF207 | DKFZp761N202 |
| | | | | | (ZNF207), transcript | | |
| | | | | | variant 2, mRNA. | | |
| 704 | 684 | 2470097 | NM_037370.1 | NM_037370 | cyclin D-type binding- | CCNDBP1 | DIP1; GCIP |
| | | | | | protein 1 (CCNDBP1), | | |
| | | | | | transcript variant 2, | | |
| | | | | | mRNA. | | |
| 705 | 685 | 2470634 | NM_006195.4 | NM_006195 | pre-B-cell leukemia | PBX3 | — |
| | | | | | homeobox 3 (PBX3), | | |
| | | | | | mRNA. | | |
| 706 | 686 | 2480039 | NM_015878.4 | NM_015878 | antizyme inhibitor 1 | AZIN1 | ODC1L; OAZIN; |
| | | | | | (AZIN1), transcript | | OAZI; MGC3832; |
| | | | | | variant 1, mRNA. | | MGC691 |
| 707 | 687 | 2480048 | NM_178124.3 | NM_178124 | chromosome X open | CXorf40A | EOLA1; CXorf40 |
| | | | | | reading frame 40A | | |
| | | | | | (CXorf40A), mRNA. | | |
| 708 | 688 | 2480075 | NM_024997.2 | NM_024997 | activating transcription | ATF7IP2 | MCAF2; FLJ12668 |
| | | | | | factor 7 interacting | | |
| | | | | | protein 2 (ATF7IP2), | | |
| | | | | | mRNA. | | |
| 709 | 689 | 2480424 | NM_002661.2 | NM_002661 | phospholipase C, | PLCG2 | — |
| | | | | | gamma 2 | | |
| | | | | | (phosphatidylinositol- | | |
| | | | | | specific) (PLCG2), | | |
| | | | | | mRNA. | | |
| 710 | 690 | 2480576 | NM_001033566.1 | NM_001033566 | ras homolog gene | RHOT1 | ARHT1; MIRO-1; |
| | | | | | family, member T1 | | FLJ12633; FLJ11040 |
| | | | | | (RHOT1), transcript | | |
| | | | | | variant 2, mRNA. | | |
| 711 | 691 | 2490072 | NM_032152.3 | NM_032152 | PML-RARA regulated | PRAM1 | MGC39864; PRAM-1 |
| | | | | | adaptor molecule 1 | | |
| | | | | | (PRAM1), mRNA. | | |
| 712 | 692 | 2490240 | NM_130435.2 | NM_130435 | protein tyrosine | PTPRE | DKFZp313F1310; |
| | | | | | phosphatase, receptor | | PTPE; HPTPE; R- |
| | | | | | type, E (PTPRE), | | PTP-EPSILON |
| | | | | | transcript variant 2, | | |
| | | | | | mRNA. | | |
| 713 | 693 | 2490452 | NM_000152.3 | NM_000152 | glucosidase, alpha; | GAA | LYAG |
| | | | | | acid (Pompe disease, | | |
| | | | | | glycogen storage | | |
| | | | | | disease type II) (GAA), | | |
| | | | | | transcript variant 1, | | |
| | | | | | mRNA. | | |
| 714 | 694 | 2490598 | NM_001155.3 | NM_001155 | annexin A6 (ANXA6), | ANXA6 | ANX6; CBP68 |
| | | | | | transcript variant 1, | | |
| | | | | | mRNA. | | |
| 715 | 695 | 2490719 | NM_004226.2 | NM_004226 | serine/threonine kinase | STK17B | DRAK2 |
| | | | | | 17b (STK17B), mRNA. | | |
| 716 | 696 | 2510086 | NM_138473.2 | NM_138473 | Sp1 transcription factor | SP1 | — |
| | | | | | (SP1), mRNA. | | |
| 717 | 697 | 2510278 | NM_006341.2 | NM_006341 | MAD2 mitotic arrest | MAD2L2 | REV7; MAD2B |
| | | | | | deficient-like 2 (yeast) | | |
| | | | | | (MAD2L2), mRNA. | | |
| 718 | 698 | 2570112 | NM_006720.3 | NM_006720 | actin binding LIM | ABLIM1 | KIAA0059; FLJ14564; |
| | | | | | protein 1 (ABLIM1), | | MGC1224; LIMATIN; |
| | | | | | transcript variant 4, | | LIMAB1; |
| | | | | | mRNA. | | DKFZp781D0148; |
| | | | | | | | ABLIM |
| 719 | 699 | 2570253 | NM_007047.3 | NM_007047 | butyrophilin, subfamily | BTN3A2 | BT3.3; BT3.2; BTF4 |
| | | | | | 3, member A2 | | |
| | | | | | (BTN3A2), mRNA. | | |
| 720 | 700 | 2570433 | NM_145341.2 | NM_145341 | programmed cell death | PDCD4 | MGC33046; |
| | | | | | 4 (neoplastic | | MGC33047; H731 |
| | | | | | transformation inhibitor) | | |
| | | | | | (PDCD4), transcript | | |
| | | | | | variant 2, mRNA. | | |
| 721 | 701 | 2600138 | NM_006123.2 | NM_006123 | iduronate 2-sulfatase | IDS | MPS2; SIDS |
| | | | | | (Hunter syndrome) | | |
| | | | | | (IDS), transcript variant | | |
| | | | | | 2, mRNA. | | |
| 722 | 702 | 2600537 | NM_001755.2 | NM_001755 | core-binding factor, | CBFB | PEBP2B |
| | | | | | beta subunit (CBFB), | | |
| | | | | | transcript variant 2, | | |
| | | | | | mRNA. | | |
| 723 | 703 | 2600747 | NM_001547.4 | NM_001547 | interferon-induced | IFIT2 | GARG-39; G10P2; |
| | | | | | protein with | | cig42; ISG-54K; IFI- |
| | | | | | tetratricopeptide | | 54; IFI54; ISG54 |
| | | | | | repeats 2 (IFIT2), | | |
| | | | | | mRNA. | | |
| 724 | 704 | 2630008 | NM_144576.3 | NM_144576 | coenzyme Q10 | COQ10A | FLJ32452 |
| | | | | | homolog A (S. cerevisiae) | | |
| | | | | | (COQ10A), | | |
| | | | | | transcript variant 1, | | |
| | | | | | mRNA. | | |
| 725 | 705 | 2630370 | NM_001013836.1 | NM_001013836 | MAD1 mitotic arrest | MAD1L1 | PIG9; HsMAD1; |
| | | | | | deficient-like 1 (yeast) | | TXBP181; MAD1; |
| | | | | | (MAD1L1), transcript | | TP53I9 |
| | | | | | variant 2, mRNA. | | |
| 726 | 706 | 2630554 | NM_152405.2 | NM_152405 | junction-mediating and | JMY | FLJ37870; |
| | | | | | regulatory protein | | MGC163496 |
| | | | | | (JMY), mRNA. | | |
| 727 | 708 | 2640068 | NM_002934.2 | NM_002934 | ribonuclease, RNase A | RNASE2 | EDN; RNS2 |
| | | | | | family, 2 (liver, | | |
| | | | | | eosinophil-derived | | |
| | | | | | neurotoxin) (RNASE2), | | |
| | | | | | mRNA. | | |
| 728 | 709 | 2640161 | NM_206962.1 | NM_206962 | protein arginine | PRMT2 | HRMT1L1; |
| | | | | | methyltransferase 2 | | MGC111373 |
| | | | | | (PRMT2), transcript | | |
| | | | | | variant 1, mRNA. | | |
| 729 | 710 | 2640286 | NM_000517.3 | NM_000517 | hemoglobin, alpha 2 | HBA2 | HBA1 |
| | | | | | (HBA2), mRNA. | | |
| 730 | 711 | 2640471 | NM_007219.2 | NM_007219 | ring finger protein 24 | RNF24 | G1L |
| | | | | | (RNF24), mRNA. | | GCACCAGTAAGGCCCGT |
| 731 | 712 | 2640551 | NM_016308.1 | NM_016308 | cytidine | CMPK1 | RP11-511I2.1; UMK; |
| | | | | | monophosphate (UMP- | | UMP-CMPK; CMPK; |
| | | | | | CMP) kinase 1, | | CMK; UMPK |
| | | | | | cytosolic (CMPK1), | | |
| | | | | | mRNA. | | |
| 732 | 713 | 2640619 | NM_003430.2 | NM_003430 | zinc finger protein 91 | ZNF91 | HTF10; HPF7 |
| | | | | | (ZNF91), mRNA. | | |
| 733 | 714 | 2650113 | NM_033013.1 | NM_033013 | nuclear receptor | NR1I2 | PAR; PRR; SAR; |
| | | | | | subfamily 1, group I, | | PAR1; ONR1; BXR; |
| | | | | | member 2 (NR1I2), | | SXR; PXR; PAR2; |
| | | | | | transcript variant 3, | | PARq |
| | | | | | mRNA. | | |
| 734 | 715 | 2650468 | NM_001037637.1 | NM_001037637 | basic transcription | BTF3 | BETA-NAC; BTF3a; |
| | | | | | factor 3 (BTF3), | | BTF3b; NACB |
| | | | | | transcript variant 1, | | |
| | | | | | mRNA. | | |
| 735 | 716 | 2650564 | NM_004585.3 | NM_004585 | retinoic acid receptor | RARRES3 | MGC8906; |
| | | | | | responder (tazarotene | | HRASLS4; TIG3; |
| | | | | | induced) 3 | | RIG1 |
| | | | | | (RARRES3), mRNA. | | |
| 736 | 717 | 2650594 | NM_001080156.1 | NM_001080156 | Rho GTPase activating | ARHGAP9 | 10C; RGL1; |
| | | | | | protein 9 (ARHGAP9), | | FLJ16525; MGC1295 |
| | | | | | transcript variant 3, | | |
| | | | | | mRNA. | | |
| 737 | 718 | 2650619 | NM_006597.3 | NM_006597 | heat shock 70 kDa | HSPA8 | MGC131511; HSC54; |
| | | | | | protein 8 (HSPA8), | | HSPA10; MGC29929; |
| | | | | | transcript variant 1, | | HSC70; HSP71; |
| | | | | | mRNA. | | HSP73; LAP1; |
| | | | | | | | HSC71; NIP71 |
| 738 | 719 | 2680050 | NM_080816.2 | NM_080816 | signal-regulatory | SIRPG | SIRPgamma; SIRP- |
| | | | | | protein gamma | | B2; CD172g; SIRPB2; |
| | | | | | (SIRPG), transcript | | bA77C3.1 |
| | | | | | variant 2, mRNA. | | |
| 739 | 720 | 2680056 | NM_001025195.1 | NM_001025195 | carboxylesterase 1 | CES1 | HMSE1; PCE-1; |
| | | | | | (monocyte/macrophage | | CES2; TGH; SES1; |
| | | | | | serine esterase 1) | | HMSE; ACAT; |
| | | | | | (CES1), transcript | | MGC117365; CEH |
| | | | | | variant 1, mRNA. | | |
| 740 | 721 | 2680092 | NM_203416.1 | NM_203416 | CD163 molecule | CD163 | MM130; M130 |
| | | | | | (CD163), transcript | | |
| | | | | | variant 2, mRNA. | | |
| 741 | 722 | 2680446 | NM_001659.1 | NM_001659 | ADP-ribosylation factor | ARF3 | — |
| | | | | | 3 (ARF3), mRNA. | | |
| 742 | 723 | 2680639 | NM_017875.1 | NM_017875 | solute carrier family 25, | SLC25A38 | FLJ20551; FLJ22703 |
| | | | | | member 38 | | |
| | | | | | (SLC25A38), mRNA. | | |
| 743 | 724 | 2690068 | NM_145863.1 | NM_145863 | ankyrin repeat and | ASB3 | FLJ10123; ASB-3; |
| | | | | | SOCS box-containing 3 | | MGC996; |
| | | | | | (ASB3), transcript | | MGC132002; |
| | | | | | variant 2, mRNA. | | FLJ10421; |
| | | | | | | | MGC12531 |
| 744 | 725 | 2690520 | NM_021930.4 | NM_021930 | RAD50 interactor 1 | RINT1 | DKFZp667H2324; |
| | | | | | (RINT1), mRNA. | | RINT-1 |
| 745 | 726 | 2690524 | NM_006698.2 | NM_006698 | bladder cancer | BLCAP | BC10 |
| | | | | | associated protein | | |
| | | | | | (BLCAP), mRNA. | | |
| 746 | 727 | 2690598 | NM_021626.1 | NM_021626 | serine | SCPEP1 | RISC; HSCP1 |
| | | | | | carboxypeptidase 1 | | |
| | | | | | (SCPEP1), mRNA. | | |
| 747 | 728 | 2710068 | NM_003757.2 | NM_003757 | eukaryotic translation | EIF3I | EIF3S2; TRIP-1; eIF3- |
| | | | | | initiation factor 3, | | beta; TRIP1; eIF3i; |
| | | | | | subunit I (EIF3I), | | eIF3-p36; PRO2242 |
| | | | | | mRNA. | | |
| 748 | 729 | 2710129 | NM_152783.3 | NM_152783 | D-2-hydroxyglutarate | D2HGDH | FLJ42195; |
| | | | | | dehydrogenase | | MGC25181; D2HGD |
| | | | | | (D2HGDH), nuclear | | |
| | | | | | gene encoding | | |
| | | | | | mitochondrial protein, | | |
| | | | | | mRNA. | | |
| 749 | 730 | 2710286 | NM_002332.2 | NM_002332 | low density lipoprotein- | LRP1 | A2MR; FLJ16451; |
| | | | | | related protein 1 (alpha- | | LRP; TGFBR5; CD91; |
| | | | | | 2-macroglobulin | | APR; MGC88725; |
| | | | | | receptor) (LRP1), | | APOER |
| | | | | | mRNA. | | |
| 750 | 731 | 2710400 | NM_004949.2 | NM_004949 | desmocollin 2 (DSC2), | DSC2 | DGII/III; |
| | | | | | transcript variant | | DKFZp686I11137; |
| | | | | | Dsc2b, mRNA. | | CDHF2; ARVD11; |
| | | | | | | | DG2; DSC3 |
| 751 | 732 | 2710653 | NM_030793.3 | NM_030793 | F-box protein 38 | FBXO38 | Fbx38; SP329; MOKA |
| | | | | | (FBXO38), transcript | | |
| | | | | | variant 1, mRNA. | | |
| 752 | 733 | 2710682 | NM_000904.2 | NM_000904 | NAD(P)H | NQO2 | DHQV; DIA6; |
| | | | | | dehydrogenase, | | NMOR2; QR2 |
| | | | | | quinone 2 (NQO2), | | |
| | | | | | mRNA. | | |
| 753 | 734 | 2710754 | NM_198196.2 | NM_198196 | CD96 molecule | CD96 | DKFZp667E2122; |
| | | | | | (CD96), transcript | | MGC22596; TACTILE |
| | | | | | variant 1, mRNA. | | |
| 754 | 735 | 2750154 | NM_014800.9 | NM_014800 | engulfment and cell | ELMO1 | CED-12; KIAA0281; |
| | | | | | motility 1 (ELMO1), | | ELMO-1; |
| | | | | | transcript variant 1, | | MGC126406; CED12 |
| | | | | | mRNA. | | |
| 755 | 737 | 2750750 | NM_003343.4 | NM_003343 | ubiquitin-conjugating | UBE2G2 | UBC7 |
| | | | | | enzyme E2G 2 (UBC7 | | |
| | | | | | homolog, yeast) | | |
| | | | | | (UBE2G2), transcript | | |
| | | | | | variant 1, mRNA. | | |
| 756 | 738 | 2760164 | NM_012328.1 | NM_012328 | DnaJ (Hsp40) homolog, | DNAJB9 | MSTP049; MDG1; |
| | | | | | subfamily B, member 9 | | DKFZP564F1862; |
| | | | | | (DNAJB9), mRNA. | | MST049; ERdj4 |
| 757 | 739 | 2760201 | XM_001133926.1 | XM_001133926 | PREDICTED: solute | SLC25A20 | — |
| | | | | | carrier family 25 | | |
| | | | | | (carnitine/acylcarnitinetranslocase), | | |
| | | | | | member 20 | | |
| | | | | | (SLC25A20), mRNA. | | |
| 758 | 740 | 2760255 | NM_007358.2 | NM_007358 | metal response | MTF2 | dJ976O13.2; PCL2; |
| | | | | | element binding | | M96; RP5-976013.1 |
| | | | | | transcription factor 2 | | |
| | | | | | (MTF2), mRNA. | | |
| 759 | 741 | 2760427 | NM_002863.3 | NM_002863 | phosphorylase, | PYGL | — |
| | | | | | glycogen; liver (Hers | | |
| | | | | | disease, glycogen | | |
| | | | | | storage disease type | | |
| | | | | | VI) (PYGL), mRNA. | | |
| 760 | 742 | 2810202 | NM_001009936.1 | NM_001009936 | PHD finger protein 19 | PHF19 | MGC131698; PCL3; |
| | | | | | (PHF19), transcript | | MGC23929; |
| | | | | | variant 2, mRNA. | | MGC149713; |
| | | | | | | | MGC149712 |
| 761 | 743 | 2810246 | NM_030915.1 | NM_030915 | limb bud and heart | LBH | MGC163287; |
| | | | | | development homolog | | MGC104312; |
| | | | | | (mouse) (LBH), mRNA. | | DKFZP566J091 |
| 762 | 744 | 2810296 | NM_000709.2 | NM_000709 | branched chain keto | BCKDHA | FLJ45695; MSUD1; |
| | | | | | acid dehydrogenase | | MSU |
| | | | | | E1, alpha polypeptide | | |
| | | | | | (BCKDHA), mRNA. | | |
| 763 | 745 | 2810315 | NM_014624.3 | NM_014624 | S100 calcium binding | S100A6 | PRA; CABP; 2A9; |
| | | | | | protein A6 (S100A6), | | 5B10; CACY |
| | | | | | mRNA. | | |
| 764 | 746 | 2810328 | NM_006047.4 | NM_006047 | RNA binding motif | RBM12 | KIAA0765; |
| | | | | | protein 12 (RBM12), | | HRIHFB2091; SWAN |
| | | | | | transcript variant 1, | | |
| | | | | | mRNA. | | |
| 765 | 747 | 2810364 | NM_014315.2 | NM_014315 | kelch domain | KLHDC2 | LCP; HCLP-1 |
| | | | | | containing 2 (KLHDC2), | | |
| | | | | | mRNA. | | |
| 766 | 748 | 2810601 | NM_016269.2 | NM_016269 | lymphoid enhancer- | LEF1 | TCF1ALPHA; |
| | | | | | binding factor 1 (LEF1), | | DKFZp586H0919 |
| | | | | | mRNA. | | |
| 767 | 749 | 2810661 | NM_001080435.1 | NM_001080435 | WAS protein homology | WHDC1 | KIAA1971 |
| | | | | | region 2 domain | | |
| | | | | | containing 1 (WHDC1), | | |
| | | | | | mRNA. | | |
| 768 | 750 | 2810678 | NM_176800.1 | NM_176800 | PRP4 pre-mRNA | PRPF4B | PR4H; dJ1013A10.1; |
| | | | | | processing factor 4 | | PRP4; KIAA0536; |
| | | | | | homolog B (yeast) | | PRP4H; PRP4K |
| | | | | | (PRPF4B), transcript | | |
| | | | | | variant 2, mRNA. | | |
| 769 | 751 | 2850575 | NM_001033.2 | NM_001033 | ribonucleotide | RRM1 | RR1; R1; RIR1 |
| | | | | | reductase M1 | | |
| | | | | | polypeptide (RRM1), | | |
| | | | | | mRNA. | | |
| 770 | 752 | 2850576 | NM_022367.2 | NM_022367 | sema domain, | SEMA4A | RP11-54H19.2; |
| | | | | | immunoglobulin domain | | RP35; SEMB; |
| | | | | | (Ig), transmembrane | | SEMAB; FLJ12287; |
| | | | | | domain (TM) and short | | CORD10 |
| | | | | | cytoplasmic domain, | | |
| | | | | | (semaphorin) 4A | | |
| | | | | | (SEMA4A), mRNA. | | |
| 771 | 753 | 2900768 | NM_021737.1 | NM_021737 | chloride channel 6 | CLCN6 | KIAA0046; CLC-6 |
| | | | | | (CLCN6), transcript | | |
| | | | | | variant CIC-6d, mRNA. | | |
| 772 | 755 | 2970026 | NM_033414.2 | NM_033414 | zinc finger protein 622 | ZNF622 | MGC17552; ZPR9; |
| | | | | | (ZNF622), mRNA. | | MGC2485 |
| 773 | 756 | 2970133 | NM_005049.2 | NM_005049 | PWP2 periodic | PWP2 | PWP2H; EHOC-17 |
| | | | | | tryptophan protein | | |
| | | | | | homolog (yeast) | | |
| | | | | | (PWP2), mRNA. | | |
| 774 | 758 | 3060092 | NM_022040.2 | NM_022040 | linker for activation of T | LAT2 | WBSCR5; |
| | | | | | cells family, member 2 | | WBSCR15; |
| | | | | | (LAT2), transcript | | HSPC046; NTAL; |
| | | | | | variant 1, mRNA. | | WSCR5; LAB |
| 775 | 759 | 3060278 | NM_138381.1 | NM_138381 | hypothetical protein | MGC15763 | — |
| | | | | | BC008322 | | |
| | | | | | (MGC15763), mRNA. | | |
| 776 | 760 | 3060487 | NM_002802.2 | NM_002802 | proteasome (prosome, | PSMC1 | P26S4; p56; |
| | | | | | macropain) 26S | | MGC24583; S4; |
| | | | | | subunit, ATPase, 1 | | MGC8541 |
| | | | | | (PSMC1), mRNA. | | |
| 777 | 761 | 3060494 | NM_052813.3 | NM_052813 | caspase recruitment | CARD9 | hCARD9 |
| | | | | | domain family, member | | |
| | | | | | 9 (CARD9), mRNA. | | |
| 778 | 762 | 3060612 | NM_002115.1 | NM_002115 | hexokinase 3 (white | HK3 | HXK3; HKIII |
| | | | | | cell) (HK3), nuclear | | |
| | | | | | gene encoding | | |
| | | | | | mitochondrial protein, | | |
| | | | | | mRNA. | | |
| 779 | 763 | 3060692 | NM_182661.1 | NM_182661 | ceramide kinase | CERK | KIAA1646; |
| | | | | | (CERK), transcript | | dA59H18.3; hCERK; |
| | | | | | variant 2, mRNA. | | dA59H18.2; |
| | | | | | | | FLJ23239; |
| | | | | | | | MGC131878; LK4; |
| | | | | | | | FLJ21430; |
| | | | | | | | DKFZp434E0211 |
| 780 | 764 | 3120053 | NM_015888.4 | NM_015888 | hook homolog 1 | HOOK1 | MGC10642; HK1 |
| | | | | | (Drosophila) (HOOK1), | | |
| | | | | | mRNA. | | |
| 781 | 765 | 3120228 | NM_004069.3 | NM_004069 | adaptor-related protein | AP2S1 | AP17; CLAPS2; |
| | | | | | complex 2, sigma 1 | | AP17-DELTA |
| | | | | | subunit (AP2S1), | | |
| | | | | | transcript variant AP17, | | |
| | | | | | mRNA. | | |
| 782 | 766 | 3120370 | NM_001251.1 | NM_001251 | CD68 antigen (CD68), | CD68 | SCARD1 |
| | | | | | mRNA. | | |
| 783 | 767 | 3120431 | NM_000883.2 | NM_000883 | IMP (inosine | IMPDH1 | sWSS2608; RP10; |
| | | | | | monophosphate) | | DKFZp781N0678; |
| | | | | | dehydrogenase 1 | | LCA11; IMPD; IMPD1 |
| | | | | | (IMPDH1), transcript | | |
| | | | | | variant 1, mRNA. | | |
| 784 | 768 | 3120707 | NM_001014840.1 | NM_001014840 | cutA divalent cation | CUTA | MGC111154; |
| | | | | | tolerance homolog (E. coli) | | ACHAP; C6orf82 |
| | | | | | (CUTA), transcript | | |
| | | | | | variant 5, mRNA. | | |
| 785 | 769 | 3130079 | NM_014239.2 | NM_014239 | eukaryotic translation | EIF2B2 | EIF-2Bbeta; EIF2B |
| | | | | | initiation factor 2B, | | |
| | | | | | subunit 2 beta, 39 kDa | | |
| | | | | | (EIF2B2), mRNA. | | |
| 786 | 770 | 3130136 | NM_002649.2 | NM_002649 | phosphoinositide-3- | PIK3CG | PIK3; PI3K; PI3CG; |
| | | | | | kinase, catalytic, | | PI3Kgamma |
| | | | | | gamma polypeptide | | |
| | | | | | (PIK3CG), mRNA. | | |
| 787 | 771 | 3130246 | NM_173647.2 | NM_173647 | ring finger protein 149 | RNF149 | FLJ90504; DNAPTP2 |
| | | | | | (RNF149), mRNA. | | |
| 788 | 772 | 3130301 | NM_002648.2 | NM_002648 | pim-1 oncogene | PIM1 | PIM |
| | | | | | (PIM1), mRNA. | | |
| 789 | 773 | 3130768 | NM_004487.3 | NM_004487 | golgin B1, golgi integral | GOLGB1 | GOLIM1; GCP372; |
| | | | | | membrane protein | | GCP; GIANTIN |
| | | | | | (GOLGB1), mRNA. | | |
| 790 | 775 | 3140553 | NM_020150.3 | NM_020150 | SAR1 gene homolog A | SAR1A | masra2; SARA1; |
| | | | | | (S. cerevisiae) | | SAR1; Sara |
| | | | | | (SAR1A), mRNA. | | |
| 791 | 776 | 3140670 | NM_000117.1 | NM_000117 | emerin (Emery-Dreifuss | EMD | STA; EDMD |
| | | | | | muscular dystrophy) | | |
| | | | | | (EMD), mRNA. | | |
| 792 | 777 | 3140707 | NM_031458.1 | NM_031458 | poly (ADP-ribose) | PARP9 | DKFZp666B0810; |
| | | | | | polymerase family, | | DKFZp686M15238; |
| | | | | | member 9 (PARP9), | | BAL1; FLJ26637; |
| | | | | | mRNA. | | BAL; FLJ41418; |
| | | | | | | | MGC: 7868 |
| 793 | 778 | 3170519 | NM_012208.2 | NM_012208 | histidyl-tRNAsynthetase | HARS2 | HO3; HARSL; |
| | | | | | 2, mitochondrial | | HARSR |
| | | | | | (putative) (HARS2), | | |
| | | | | | nuclear gene encoding | | |
| | | | | | mitochondrial protein, | | |
| | | | | | mRNA. | | |
| 794 | 779 | 3180215 | NM_033657.1 | NM_033657 | death associated | DAP3 | MGC126059; |
| | | | | | protein 3 (DAP3), | | MGC126058; bMRP- |
| | | | | | nuclear gene encoding | | 10; MRP-S29; |
| | | | | | mitochondrial protein, | | DKFZp686G12159; |
| | | | | | transcript variant 1, | | DAP-3; MRPS29 |
| | | | | | mRNA. | | |
| 795 | 780 | 3180289 | NM_001987.4 | NM_001987 | ets variant gene 6 (TEL | ETV6 | TEL; TEL/ABL |
| | | | | | oncogene) (ETV6), | | |
| | | | | | mRNA. | | |
| 796 | 781 | 3180438 | NM_001006.3 | NM_001006 | ribosomal protein S3A | RPS3A | FTE1; MGC23240; |
| | | | | | (RPS3A), mRNA. | | MFTL |
| 797 | 782 | 3180446 | NM_005481.2 | NM_005481 | mediator complex | MED16 | THRAP5; TRAP95; |
| | | | | | subunit 16 (MED16), | | DRIP92; MED16 |
| | | | | | mRNA. | | |
| 798 | 783 | 3180681 | NR_003187.1 | NR_003187 | neutrophil cytosolic | NCF1C | SH3PXD1C |
| | | | | | factor 1C pseudogene | | |
| | | | | | (NCF1C) on | | |
| | | | | | chromosome 7. | | |
| 799 | 784 | 3180736 | NM_199002.1 | NM_199002 | Rho guanine nucleotide | ARHGEF1 | P115-RHOGEF; |
| | | | | | exchange factor (GEF) | | GEF1; LBCL2; |
| | | | | | 1 (ARHGEF1), | | SUB1.5 |
| | | | | | transcript variant 1, | | |
| | | | | | mRNA. | | |
| 800 | 785 | 3190437 | NM_138361.3 | NM_138361 | leucine rich repeat and | LRSAM1 | FLJ31641; RIFLE; |
| | | | | | sterile alpha motif | | TAL |
| | | | | | containing 1 | | |
| | | | | | (LRSAM1), transcript | | |
| | | | | | variant 1, mRNA. | | |
| 801 | 786 | 3290019 | NM_024814.1 | NM_024814 | Cas-Br-M (murine) | CBLL1 | HAKAI; FLJ23109; |
| | | | | | ecotropic retroviral | | MGC163403; |
| | | | | | transforming sequence- | | RNF188; |
| | | | | | like 1 (CBLL1), mRNA. | | MGC163401 |
| 802 | 787 | 3290292 | NM_015907.2 | NM_015907 | leucineaminopeptidase | LAP3 | LAP; LAPEP; PEPS |
| | | | | | 3 (LAP3), mRNA. | | |
| 803 | 788 | 3290315 | NM_002525.1 | NM_002525 | nardilysin (N-arginine | NRD1 | hNRD2; hNRD1 |
| | | | | | dibasic convertase) | | |
| | | | | | (NRD1), mRNA. | | |
| 804 | 789 | 3290669 | NM_139168.2 | NM_139168 | splicing factor, | SFRS12 | DKFZp564B176; |
| | | | | | arginine/serine-rich 12 | | SRrp508; SRrp86; |
| | | | | | (SFRS12), transcript | | MGC133045 |
| | | | | | variant 2, mRNA. | | |
| 805 | 790 | 3310091 | NM_018643.2 | NM_018643 | triggering receptor | TREM1 | TREM-1 |
| | | | | | expressed on myeloid | | |
| | | | | | cells 1 (TREM1), | | |
| | | | | | mRNA. | | |
| 806 | 791 | 3310093 | NM_017861.1 | NM_017861 | phosphatidylinositol | PIGX | FLJ20522 |
| | | | | | glycan anchor | | |
| | | | | | biosynthesis, class X | | |
| | | | | | (PIGX), mRNA. | | |
| 807 | 792 | 3310358 | NM_000294.1 | NM_000294 | phosphorylase kinase, | PHKG2 | — |
| | | | | | gamma 2 (testis) | | |
| | | | | | (PHKG2), mRNA. | | |
| 808 | 793 | 3360634 | NM_013322.2 | NM_013322 | sorting nexin 10 | SNX10 | MGC33054 |
| | | | | | (SNX10), mRNA. | | |
| 809 | 794 | 3370093 | NM_013304.1 | NM_013304 | zinc finger, DHHC-type | ZDHHC1 | ZNF377; C16orf1; |
| | | | | | containing 1 | | HSU90653 |
| | | | | | (ZDHHC1), mRNA. | | |
| 810 | 795 | 3370112 | NM_002951.2 | NM_002951 | ribophorin II (RPN2), | RPN2 | RPNII; RIBIIR; RPN- |
| | | | | | mRNA. | | II; SWP1 |
| 811 | 796 | 3370202 | NR_001562.1 | NR_001562 | annexin A2 | ANXA2P1 | LPC2A; ANX2L1; |
| | | | | | pseudogene 1 | | ANX2P1 |
| | | | | | (ANXA2P1) on | | |
| | | | | | chromosome 4. | | |
| 812 | 797 | 3370300 | NM_133459.1 | NM_133459 | collagen and calcium | CCBE1 | FLJ30681; |
| | | | | | binding EGF domains 1 | | MGC50861 |
| | | | | | (CCBE1), mRNA. | | |
| 813 | 798 | 3370327 | NM_022746.2 | NM_022746 | MOCO sulphurase C- | MOSC1 | FLJ22390; RP11- |
| | | | | | terminal domain | | 295M18.1 |
| | | | | | containing 1 (MOSC1), | | |
| | | | | | mRNA. | | |
| 814 | 799 | 3370594 | NM_006866.1 | NM_006866 | leukocyte | LILRA2 | CD85H; LIR-7; LIR7; |
| | | | | | immunoglobulin-like | | ILT1 |
| | | | | | receptor, subfamily A | | |
| | | | | | (with TM domain), | | |
| | | | | | member 2 (LILRA2), | | |
| | | | | | mRNA. | | |
| 815 | 800 | 3390022 | NM_001861.2 | NM_001861 | cytochrome c oxidase | COX4I1 | MGC72016; COXIV; |
| | | | | | subunit IV isoform 1 | | COX4 |
| | | | | | (COX4I1), mRNA. | | |
| 816 | 801 | 3390093 | NM_001035505.1 | NM_001035505 | bolA homolog 3 (E. coli) | BOLA3 | — |
| | | | | | (BOLA3), transcript | | |
| | | | | | variant 2, mRNA. | | |
| 817 | 802 | 3390286 | NM_000682.5 | NM_000682 | adrenergic, alpha-2B-, | ADRA2B | ADRARL1; |
| | | | | | receptor (ADRA2B), | | ADRA2L1; |
| | | | | | mRNA. | | ALPHA2BAR; |
| | | | | | | | ADRA2RL1 |
| 818 | 803 | 3390544 | NM_001017963.2 | NM_001017963 | heat shock protein | HSP90AA1 | HSPCAL4; HSPN; |
| | | | | | 90 kDa alpha | | HSP86; Hsp89; |
| | | | | | (cytosolic), class A | | HSP90N; HSPC1; |
| | | | | | member 1 | | HSP90A; HSPCAL1; |
| | | | | | (HSP90AA1), transcript | | Hsp90; HSPCA; |
| | | | | | variant 1, mRNA. | | LAP2; FLJ31884 |
| 819 | 804 | 3390603 | NM_005917.2 | NM_005917 | malate dehydrogenase | MDH1 | MOR2; MDH-s; |
| | | | | | 1, NAD (soluble) | | MGC: 1375; MDHA |
| | | | | | (MDH1), mRNA. | | |
| 820 | 805 | 3390722 | NM_032316.3 | NM_032316 | nicolin 1 (NICN1), | NICN1 | MGC12936 |
| | | | | | mRNA. | | |
| 821 | 806 | 3400097 | NM_001098516.1 | NM_001098516 | mucin 20, cell surface | MUC20 | FLJ14408; KIAA1359 |
| | | | | | associated (MUC20), | | |
| | | | | | transcript variant S, | | |
| | | | | | mRNA. | | |
| 822 | 807 | 3400408 | NM_052935.2 | NM_052935 | 5′-nucleotidase, | NT5C3L | MGC20781; |
| | | | | | cytosolic III-like | | MGC21375 |
| | | | | | (NT5C3L), mRNA. | | |
| 823 | 808 | 3400612 | NM_020830.3 | NM_020830 | WD repeat and FYVE | WDFY1 | FENS-1; ZFYVE17; |
| | | | | | domain containing 1 | | WDF1 |
| | | | | | (WDFY1), mRNA. | | |
| 824 | 809 | 3420020 | NM_003082.2 | NM_003082 | small nuclear RNA | SNAPC1 | SNAP43; PTFgamma |
| | | | | | activating complex, | | |
| | | | | | polypeptide 1, 43 kDa | | |
| | | | | | (SNAPC1), mRNA. | | |
| 825 | 810 | 3420253 | NM_001033505.1 | NM_001033505 | cleavage stimulation | CSTF3 | MGC75122; |
| | | | | | factor, 3′ pre-RNA, | | MGC43001; |
| | | | | | subunit 3, 77 kDa | | MGC117398; CSTF- |
| | | | | | (CSTF3), transcript | | 77 |
| | | | | | variant 2, mRNA. | | |
| 826 | 811 | 3420523 | NM_001005498.2 | NM_001005498 | rhomboid 5 homolog 2 | RHBDF2 | RHBDL6; RHBDL5; |
| | | | | | (Drosophila) | | FLJ22341 |
| | | | | | (RHBDF2), transcript | | |
| | | | | | variant 2, mRNA. | | |
| 827 | 812 | 3420632 | NM_148919.3 | NM_148919 | proteasome (prosome, | PSMB8 | D6S216; LMP7; |
| | | | | | macropain) subunit, | | PSMB5i; RING10; |
| | | | | | beta type, 8 (large | | beta5i; MGC1491; |
| | | | | | multifunctional | | D6S216E |
| | | | | | peptidase 7) (PSMB8), | | |
| | | | | | transcript variant 2, | | |
| | | | | | mRNA. | | |
| 828 | 813 | 3420747 | NM_001121.2 | NM_001121 | adducin 3 (gamma) | ADD3 | ADDL |
| | | | | | (ADD3), transcript | | |
| | | | | | variant 3, mRNA. | | |
| 829 | 814 | 3440070 | NM_004890.2 | NM_004890 | sperm associated | SPAG7 | ACRP; FSA-1; |
| | | | | | antigen 7 (SPAG7), | | MGC20134 |
| | | | | | mRNA. | | |
| 830 | 815 | 3440204 | NM_001999.3 | NM_001999 | fibrillin 2 (congenital | FBN2 | CCA |
| | | | | | contracturalarachnodactyly) | | |
| | | | | | (FBN2), mRNA. | | |
| 831 | 816 | 3440452 | NM_207195.1 | NM_207195 | ADAM | ADAM15 | MDC15 |
| | | | | | metallopeptidase | | |
| | | | | | domain 15 (ADAM15), | | |
| | | | | | transcript variant 4, | | |
| | | | | | mRNA. | | |
| 832 | 817 | 3440491 | NM_000153.2 | NM_000153 | galactosylceramidase | GALC | — |
| | | | | | (GALC), transcript | | |
| | | | | | variant 1, mRNA. | | |
| 833 | 818 | 3440739 | NM_000518.4 | NM_000518 | hemoglobin, beta | HBB | HBD; CD113t-C |
| | | | | | (HBB), mRNA. | | |
| 834 | 819 | 3440754 | NM_001012633.1 | NM_001012633 | interleukin 32 (IL32), | IL32 | IL-32alpha; TAIFd; IL- |
| | | | | | transcript variant 4, | | 32beta; TAIFc; TAIF; |
| | | | | | mRNA. | | IL-32gamma; TAIFb; |
| | | | | | | | TAIFa; IL-32delta; |
| | | | | | | | NK4 |
| 835 | 820 | 3450138 | NM_001814.2 | NM_001814 | cathepsin C (CTSC), | CTSC | JPD; DPP1; JP; HMS; |
| | | | | | transcript variant 1, | | CPPI; PALS; PLS; |
| | | | | | mRNA. | | DPPI |
| 836 | 821 | 3450253 | NM_004773.2 | NM_004773 | zinc finger, HIT type 3 | ZNHIT3 | TRIP3 |
| | | | | | (ZNHIT3), mRNA. | | |
| 837 | 822 | 3450280 | NM_016274.4 | NM_016274 | pleckstrin homology | PLEKHO1 | CKIP-1; OC120; |
| | | | | | domain containing, | | RP11-458I7.3 |
| | | | | | family O member 1 | | |
| | | | | | (PLEKHO1), mRNA. | | |
| 838 | 823 | 3450427 | NM_153450.1 | NM_153450 | mediator complex | MED19 | LCMR1 |
| | | | | | subunit 19 (MED19), | | |
| | | | | | mRNA. | | |
| 839 | 824 | 3450521 | NM_022664.1 | NM_022664 | extracellular matrix | ECM1 | — |
| | | | | | protein 1 (ECM1), | | |
| | | | | | transcript variant 2, | | |
| | | | | | mRNA. | | |
| 840 | 825 | 3450719 | NM_001402.5 | NM_001402 | eukaryotic translation | EEF1A1 | EEF1A; FLJ25721; |
| | | | | | elongation factor 1 | | CCS-3; PTI1; CCS3; |
| | | | | | alpha 1 (EEF1A1), | | MGC102687; |
| | | | | | mRNA. | | MGC16224; EF-Tu; |
| | | | | | | | eEF1A-1; EEF-1; |
| | | | | | | | MGC131894; |
| | | | | | | | HNGC: 16303; GRAF- |
| | | | | | | | 1EF; LENG7; EF1A |
| 841 | 826 | 3460008 | NM_198282.1 | NM_198282 | transmembrane protein | TMEM173 | FLJ38577 |
| | | | | | 173 (TMEM173), | | |
| | | | | | mRNA. | | |
| 842 | 827 | 3460121 | NM_014765.1 | NM_014765 | translocase of outer | TOMM20 | TOM20; MOM19; |
| | | | | | mitochondrial | | KIAA0016; |
| | | | | | membrane 20 homolog | | MGC117367; MAS20 |
| | | | | | (yeast) (TOMM20), | | |
| | | | | | nuclear gene encoding | | |
| | | | | | mitochondrial protein, | | |
| | | | | | mRNA. | | |
| 843 | 828 | 3460132 | NM_152341.2 | NM_152341 | progestin and adipoQ | PAQR4 | FLJ30002 |
| | | | | | receptor family member | | |
| | | | | | IV (PAQR4), mRNA. | | |
| 844 | 829 | 3460201 | NM_015999.2 | NM_015999 | adiponectin receptor 1 | ADIPOR1 | ACDCR1; TESBP1A; |
| | | | | | (ADIPOR1), mRNA. | | CGI-45; PAQR1; |
| | | | | | | | FLJ42464; FLJ25385; |
| | | | | | | | CGI45 |
| 845 | 830 | 3460386 | NM_001497.2 | NM_001497 | UDP-Gal:betaGlcNAc | B4GALT1 | MGC50983; GT1; |
| | | | | | beta 1,4- | | beta4Gal-T1; GTB; |
| | | | | | galactosyltransferase, | | B4GAL-T1; GGTB2; |
| | | | | | polypeptide 1 | | DKFZp686N19253 |
| | | | | | (B4GALT1), mRNA. | | |
| 846 | 831 | 3460424 | NM_212469.1 | NM_212469 | choline kinase alpha | CHKA | CHK; CKI |
| | | | | | (CHKA), transcript | | |
| | | | | | variant 2, mRNA. | | |
| 847 | 832 | 3460441 | NM_003792.2 | NM_003792 | endothelial | EDF1 | EDF-1; MBF1; |
| | | | | | differentiation-related | | MGC9058 |
| | | | | | factor 1 (EDF1), | | |
| | | | | | transcript variant alpha, | | |
| | | | | | mRNA. | | |
| 848 | 833 | 3460451 | NM_014631.2 | NM_014631 | SH3 and PX domains | SH3PXD2A | SH3MD1; FISH |
| | | | | | 2A (SH3PXD2A), | | |
| | | | | | mRNA. | | |
| 849 | 834 | 3460504 | NM_014395.1 | NM_014395 | dual adaptor of | DAPP1 | DKFZp667E0716; |
| | | | | | phosphotyrosine and 3- | | BAM32 |
| | | | | | phosphoinositides | | |
| | | | | | (DAPP1), mRNA. | | |
| 850 | 835 | 3460685 | NM_003937.2 | NM_003937 | kynureninase (L- | KYNU | — |
| | | | | | kynurenine hydrolase) | | |
| | | | | | (KYNU), transcript | | |
| | | | | | variant 1, mRNA. | | |
| 851 | 836 | 3520020 | NM_001037333.1 | NM_001037333 | cytoplasmic FMR1 | CYFIP2 | PIR121 |
| | | | | | interacting protein 2 | | |
| | | | | | (CYFIP2), transcript | | |
| | | | | | variant 1, mRNA. | | |
| 852 | 837 | 3520072 | NM_018135.2 | NM_018135 | mitochondrial ribosomal | MRPS18A | S18bmt; MRPS18-3; |
| | | | | | protein S18A | | HumanS18b; |
| | | | | | (MRPS18A), nuclear | | FLJ10548; MRP-S18-3 |
| | | | | | gene encoding | | |
| | | | | | mitochondrial protein, | | |
| | | | | | mRNA. | | |
| 853 | 838 | 3520309 | NM_031417.2 | NM_031417 | MAP/microtubule | MARK4 | Nbla00650; |
| | | | | | affinity-regulating | | FLJ90097; MARKL1; |
| | | | | | kinase 4 (MARK4), | | KIAA1860 |
| | | | | | mRNA. | | |
| 854 | 839 | 3520370 | NM_138962.2 | NM_138962 | musashi homolog 2 | MSI2 | FLJ36569; MSI2H; |
| | | | | | (Drosophila) (MSI2), | | MGC3245 |
| | | | | | transcript variant 1, | | |
| | | | | | mRNA. | | |
| 855 | 840 | 3520463 | NM_175061.3 | NM_175061 | JAZF zinc finger 1 | JAZF1 | ZNF802; TIP27; |
| | | | | | (JAZF1), mRNA. | | DKFZp761K2222 |
| 856 | 841 | 3520671 | NM_006412.3 | NM_006412 | 1-acylglycerol-3- | AGPAT2 | LPAAB; BSCL1; 1- |
| | | | | | phosphate O- | | AGPAT2; LPAAT- |
| | | | | | acyltransferase 2 | | beta; BSCL |
| | | | | | (lysophosphatidic acid | | |
| | | | | | acyltransferase, beta) | | |
| | | | | | (AGPAT2), transcript | | |
| | | | | | variant 1, mRNA. | | |
| 857 | 842 | 3520689 | NM_018332.3 | NM_018332 | DEAD (Asp-Glu-Ala- | DDX19A | DDX19L; FLJ11126; |
| | | | | | As) box polypeptide | | DDX19-DDX19L; |
| | | | | | 19A (DDX19A), mRNA. | | DKFZp686C21137 |
| 858 | 843 | 3610553 | NM_000181.2 | NM_000181 | glucuronidase, beta | GUSB | MPS7; FLJ39445 |
| | | | | | (GUSB), mRNA. | | |
| 859 | 844 | 3710068 | NM_173701.1 | NM_173701 | tryptophanyl- | WARS | IFI53; IFP53; |
| | | | | | tRNAsynthetase | | GAMMA-2 |
| | | | | | (WARS), transcript | | |
| | | | | | variant 2, mRNA. | | |
| 860 | 845 | 3710243 | NM_024625.3 | NM_024625 | zinc finger CCCH-type, | ZC3HAV1 | FLJ13288; |
| | | | | | antiviral 1 (ZC3HAV1), | | ZC3HDC2; FLB6421; |
| | | | | | transcript variant 2, | | ZAP; |
| | | | | | mRNA. | | DKFZp686H1869; |
| | | | | | | | DKFZp686O19171; |
| | | | | | | | MGC48898; |
| | | | | | | | DKFZp686F2052; |
| | | | | | | | ZC3H2 |
| 861 | 846 | 3710681 | NM_006421.3 | NM_006421 | ADP-ribosylation factor | ARFGEF1 | DKFZP434L057; |
| | | | | | guanine nucleotide- | | BIG1; ARFGEP1; |
| | | | | | exchange factor | | P200; |
| | | | | | 1 (brefeldin A-inhibited) | | D730028O18Rik |
| | | | | | (ARFGEF1), mRNA. | | |
| 862 | 847 | 3780053 | NM_016081.3 | NM_016081 | palladin, cytoskeletal | PALLD | CGI-151; PNCA1; |
| | | | | | associated protein | | KIAA0992; FLJ22190; |
| | | | | | (PALLD), mRNA. | | SIH002; FLJ38193; |
| | | | | | | | FLJ39139 |
| 863 | 848 | 3780674 | NM_032772.3 | NM_032772 | zinc finger protein 503 | ZNF503 | NOLZ-1; MGC2555; |
| | | | | | (ZNF503), mRNA. | | FLJ45745 |
| 864 | 849 | 3800286 | NM_007156.3 | NM_007156 | zinc finger, X-linked, | ZXDA | — |
| | | | | | duplicated A (ZXDA), | | |
| | | | | | mRNA. | | |
| 865 | 851 | 3800392 | NM_001009184.1 | NM_001009184 | glutamate receptor, | GRINA | HNRGW; NMDARA1; |
| | | | | | ionotropic, N-methyl D- | | TMBIM3; MGC99687 |
| | | | | | aspartate-associated | | |
| | | | | | protein 1 (glutamate | | |
| | | | | | binding) (GRINA), | | |
| | | | | | transcript variant 2, | | |
| | | | | | mRNA. | | |
| 866 | 852 | 3800470 | NM_024298.2 | NM_024298 | membrane bound O- | MBOAT7 | hMBOA-7; LPIAT; |
| | | | | | acyltransferase domain | | BB1; LENG4 |
| | | | | | containing 7 | | |
| | | | | | (MBOAT7), mRNA. | | |
| 867 | 853 | 3830735 | NM_016327.2 | NM_016327 | ureidopropionase, beta | UPB1 | BUP1 |
| | | | | | (UPB1), mRNA. | | |
| 868 | 854 | 3840100 | NM_014933.2 | NM_014933 | SEC31 homolog A (S. cerevisiae) | SEC31A | KIAA0905; HSPC334; |
| | | | | | (SEC31A), | | MGC90305; ABP125; |
| | | | | | transcript variant 1, | | SEC31L1; HSPC275; |
| | | | | | mRNA. | | DKFZp686N07171; |
| | | | | | | | ABP130 |
| 869 | 855 | 3840370 | NM_173620.2 | NM_173620 | hexosaminidase | HEXDC | FLJ23825 |
| | | | | | (glycosyl hydrolase | | |
| | | | | | family 20, catalytic | | |
| | | | | | domain) containing | | |
| | | | | | (HEXDC), mRNA. | | |
| 870 | 856 | 3840593 | NM_004510.2 | NM_004510 | SP110 nuclear body | SP110 | FLJ22835; IFI75; |
| | | | | | protein (SP110), | | VODI; IFI41 |
| | | | | | transcript variant b, | | |
| | | | | | mRNA. | | |
| 871 | 857 | 3840717 | NM_016428.2 | NM_016428 | ABI gene family, | ABI3 | SSH3BP3; NESH |
| | | | | | member 3 (ABI3), | | |
| | | | | | mRNA. | | |
| 872 | 858 | 3850053 | NM_006401.2 | NM_006401 | acidic (leucine-rich) | ANP32B | PHAPI2; SSP29; |
| | | | | | nuclear phosphoprotein | | APRIL |
| | | | | | 32 family, member B | | |
| | | | | | (ANP32B), mRNA. | | |
| 873 | 859 | 3850112 | NM_052960.1 | NM_052960 | retinol binding protein 7, | RBP7 | CRBP4; MGC70641; |
| | | | | | cellular (RBP7), mRNA. | | CRBPIV |
| 874 | 860 | 3870242 | NM_018155.1 | NM_018155 | solute carrier family 25, | SLC25A36 | FLJ10618 |
| | | | | | member 36 | | |
| | | | | | (SLC25A36), mRNA. | | |
| 875 | 861 | 3870646 | NM_024065.3 | NM_024065 | phosducin-like 3 | PDCL3 | VIAF1; HTPHLP; |
| | | | | | (PDCL3), mRNA. | | MGC3062 |
| 876 | 862 | 3890017 | NM_001903.2 | NM_001903 | catenin (cadherin- | CTNNA1 | CAP102; FLJ36832 |
| | | | | | associated protein), | | |
| | | | | | alpha 1, 102 kDa | | |
| | | | | | (CTNNA1), mRNA. | | |
| 877 | 863 | 3890138 | NM_181873.2 | NM_181873 | myotubularin related | MTMR11 | CRA; RP11-212K13.1 |
| | | | | | protein 11 (MTMR11), | | |
| | | | | | mRNA. | | |
| 878 | 864 | 3890193 | NM_013943.1 | NM_013943 | chloride intracellular | CLIC4 | p64H1; CLIC4L; H1; |
| | | | | | channel 4 (CLIC4), | | FLJ38640; |
| | | | | | nuclear gene encoding | | DKFZP566G223; |
| | | | | | mitochondrial protein, | | huH1 |
| | | | | | mRNA. | | |
| 879 | 865 | 3890220 | NM_078474.2 | NM_078474 | TM2 domain containing | TM2D3 | BLP2 |
| | | | | | 3 (TM2D3), transcript | | |
| | | | | | variant 1, mRNA. | | |
| 880 | 866 | 3890349 | NM_003542.3 | NM_003542 | histone cluster 1, H4c | HIST1H4C | H4FG; dJ221C16.1; |
| | | | | | (HIST1H4C), mRNA. | | H4/g |
| 881 | 867 | 3890408 | NM_001042576.1 | NM_001042576 | ribosome binding | RRBP1 | DKFZp586A1420; |
| | | | | | protein 1 homolog | | MGC157721; ES130; |
| | | | | | 180 kDa (dog) | | FLJ36146; |
| | | | | | (RRBP1), transcript | | MGC157720; ES/130; |
| | | | | | variant 1, mRNA. | | hES |
| 882 | 868 | 3930561 | NM_002740.5 | NM_002740 | protein kinase C, iota | PRKCI | DXS1179E; |
| | | | | | (PRKCI), mRNA. | | MGC26534; PKCI; |
| | | | | | | | nPKC-iota |
| 883 | 869 | 3930594 | NM_003885.2 | NM_003885 | cyclin-dependent | CDK5R1 | p35nck5a; CDK5P35; |
| | | | | | kinase 5, regulatory | | MGC33831; NCK5A; |
| | | | | | subunit 1 (p35) | | p23; p35; p25; |
| | | | | | (CDK5R1), mRNA. | | CDK5R |
| 884 | 870 | 3940026 | NM_014320.2 | NM_014320 | heme binding protein 2 | HEBP2 | RP3-422G23.1; |
| | | | | | (HEBP2), mRNA. | | KIAA1244; |
| | | | | | | | C6ORF34B; PP23; |
| | | | | | | | SOUL; C6orf34 |
| 885 | 871 | 3940333 | NM_006631.2 | NM_006631 | zinc finger protein 266 | ZNF266 | HZF1 |
| | | | | | (ZNF266), mRNA. | | |
| 886 | 872 | 3940376 | NM_001033578.1 | NM_001033578 | serum/glucocorticoid | SGK3 | SGK2; CISK; |
| | | | | | regulated kinase family, | | DKFZp781N0293; |
| | | | | | member 3 (SGK3), | | SGKL |
| | | | | | transcript variant 3, | | |
| | | | | | mRNA. | | |
| 887 | 873 | 3940438 | NM_000265.4 | NM_000265 | neutrophil cytosolic | NCF1 | NOXO2; SH3PXD1A; |
| | | | | | factor 1, (chronic | | NCF1A; p47phox |
| | | | | | granulomatous | | |
| | | | | | disease, autosomal 1) | | |
| | | | | | (NCF1), mRNA. | | |
| 888 | 874 | 3990482 | NM_004582.2 | NM_004582 | Rabgeranylgeranyltransferase, | RABGGTB | GGTB |
| | | | | | beta subunit | | |
| | | | | | (RABGGTB), mRNA. | | |
| 889 | 875 | 3990546 | NM_025201.3 | NM_025201 | pleckstrin homology | PLEKHO2 | pp9099; PP1628; |
| | | | | | domain containing, | | DKFZp761K2312; |
| | | | | | family O member 2 | | FLJ38884 |
| | | | | | (PLEKHO2), mRNA. | | |
| 890 | 876 | 3990598 | NM_006442.2 | NM_006442 | DR1-associated protein | DRAP1 | NC2-alpha |
| | | | | | 1 (negative cofactor 2 | | |
| | | | | | alpha) (DRAP1), | | |
| | | | | | mRNA. | | |
| 891 | 877 | 4010020 | NM_172373.2 | NM_172373 | E74-like factor 1 (ets | ELF1 | — |
| | | | | | domain transcription | | |
| | | | | | factor) (ELF1), mRNA. | | |
| 892 | 878 | 4010452 | NM_153811.1 | NM_153811 | solute carrier family 38, | SLC38A6 | NAT-1; MGC102697 |
| | | | | | member 6 (SLC38A6), | | |
| | | | | | mRNA. | | |
| 893 | 879 | 4040022 | NM_175862.2 | NM_175862 | CD86 antigen (CD28 | CD86 | B7-2; B70; LAB72; |
| | | | | | antigen ligand 2, B7-2 | | MGC34413; |
| | | | | | antigen) (CD86), | | CD28LG2 |
| | | | | | transcript variant 1, | | |
| | | | | | mRNA. | | |
| 894 | 880 | 4040398 | NM_022440.1 | NM_022440 | mal, T-cell | MAL | — |
| | | | | | differentiation protein | | |
| | | | | | (MAL), transcript variant | | |
| | | | | | d, mRNA. | | |
| 895 | 881 | 4050161 | NM_005819.4 | NM_005819 | syntaxin 6 (STX6), | STX6 | — |
| | | | | | mRNA. | | |
| 896 | 882 | 4050202 | NM_194448.1 | NM_194448 | C-type lectin domain | CLEC4A | DCIR; DDB27; LLIR; |
| | | | | | family 4, member A | | HDCGC13P; |
| | | | | | (CLEC4A), transcript | | CLECSF6 |
| | | | | | variant 4, mRNA. | | |
| 897 | 883 | 4050491 | NM_003196.1 | NM_003196 | transcription elongation | TCEA3 | TFIIS.H; TFIIS |
| | | | | | factor A (SII), 3 | | |
| | | | | | (TCEA3), mRNA. | | |
| 898 | 884 | 4050600 | NM_001039935.1 | NM_001039935 | ankyrin repeat domain | ANKRD55 | FLJ11795; |
| | | | | | 55 (ANKRD55), | | MGC126014; |
| | | | | | transcript variant 2, | | MGC126013 |
| | | | | | mRNA. | | |
| 899 | 885 | 4060358 | NM_005502.2 | NM_005502 | ATP-binding cassette, | ABCA1 | CERP; ABC-1; |
| | | | | | sub-family A (ABC1), | | MGC164864; |
| | | | | | member 1 (ABCA1), | | MGC165011; |
| | | | | | mRNA. | | HDLDT1; ABC1; |
| | | | | | | | TGD; FLJ14958 |
| 900 | 886 | 4070017 | NM_002539.1 | NM_002539 | omithine decarboxylase | ODC1 | — |
| | | | | | 1 (ODC1), mRNA. | | |
| 901 | 887 | 4070300 | NM_052839.2 | NM_052839 | pannexin 2 (PANX2), | PANX2 | hPANX2; |
| | | | | | mRNA. | | MGC119432 |
| 902 | 888 | 4070367 | NM_145645.2 | NM_145645 | NOL1/NOP2/Sun | NSUN5B | WBSCR20B; |
| | | | | | domain family, member | | MGC129801 |
| | | | | | 5B (NSUN5B), | | |
| | | | | | transcript variant 2, | | |
| | | | | | mRNA. | | |
| 903 | 889 | 4070538 | NM_018319.3 | NM_018319 | tyrosyl-DNA | TDP1 | FLJ11090; |
| | | | | | phosphodiesterase 1 | | MGC104252 |
| | | | | | (TDP1), transcript | | |
| | | | | | variant 1, mRNA. | | |
| 904 | 890 | 4120411 | NM_004723.2 | NM_004723 | rho/rac guanine | ARHGEF2 | P40; GEF; LFP40; |
| | | | | | nucleotide exchange | | DKFZp547L106; |
| | | | | | factor (GEF) 2 | | GEF-H1; |
| | | | | | (ARHGEF2), mRNA. | | DKFZp547P1516; |
| | | | | | | | GEFH1; KIAA0651 |
| 905 | 891 | 4120689 | NM_002005.2 | NM_002005 | feline sarcoma | FES | FPS |
| | | | | | oncogene (FES), | | |
| | | | | | mRNA. | | |
| 906 | 892 | 4150017 | NM_178422.4 | NM_178422 | progestin and adipoQ | PAQR7 | MPRA; mSR |
| | | | | | receptor family member | | |
| | | | | | VII (PAQR7), mRNA. | | |
| 907 | 893 | 4150048 | NM_001444.1 | NM_001444 | fatty acid binding | FABP5 | PA-FABP; PAFABP; |
| | | | | | protein 5 (psoriasis- | | E-FABP; EFABP |
| | | | | | associated) (FABP5), | | |
| | | | | | mRNA. | | |
| 908 | 894 | 4150136 | NM_003952.2 | NM_003952 | ribosomal protein S6 | RPS6KB2 | p70S6Kb; P70-beta-2; |
| | | | | | kinase, 70 kDa, | | S6K-beta2; p70(S6K)- |
| | | | | | polypeptide 2 | | beta; P70-beta-1; |
| | | | | | (RPS6KB2), mRNA. | | KLS; S6K2; SRK; |
| | | | | | | | STK14B; P70-beta |
| 909 | 895 | 4150189 | NM_001912.3 | NM_001912 | cathepsin L1 (CTSL1), | CTSL1 | MEP; CATL; |
| | | | | | transcript variant 1, | | FLJ31037; CTSL |
| | | | | | mRNA. | | |
| 910 | 896 | 4150458 | NM_002947.3 | NM_002947 | replication protein A3, | RPA3 | REPA3 |
| | | | | | 14 kDa (RPA3), mRNA. | | |
| 911 | 897 | 4150500 | NM_004371.3 | NM_004371 | coatomer protein | COPA | FLJ26320; HEP-COP |
| | | | | | complex, subunit alpha | | |
| | | | | | (COPA), transcript | | |
| | | | | | variant 2, mRNA. | | |
| 912 | 898 | 4150687 | NM_004546.2 | NM_004546 | NADH dehydrogenase | NDUFB2 | AGGG; MGC70788; |
| | | | | | (ubiquinone) 1 beta | | CI-AGGG |
| | | | | | subcomplex, 2, 8 kDa | | |
| | | | | | (NDUFB2), nuclear | | |
| | | | | | gene encoding | | |
| | | | | | mitochondrial protein, | | |
| | | | | | mRNA. | | |
| 913 | 899 | 4180079 | NM_031476.2 | NM_031476 | cysteine-rich secretory | CRISPLD2 | DKFZP434B044; |
| | | | | | protein LCCL domain | | MGC74865; |
| | | | | | containing 2 | | CRISP11; LCRISP2 |
| | | | | | (CRISPLD2), mRNA. | | |
| 914 | 900 | 4180259 | NM_018921.2 | NM_018921 | protocadherin gamma | PCDHGA9 | PCDH-GAMMA-A9 |
| | | | | | subfamily A, 9 | | |
| | | | | | (PCDHGA9), transcript | | |
| | | | | | variant 1, mRNA. | | |
| 915 | 901 | 4180468 | NM_004729.3 | NM_004729 | zinc finger, BED-type | ZBED1 | KIAA0785; TRAMP; |
| | | | | | containing 1 (ZBED1), | | ALTE; DREF |
| | | | | | mRNA. | | |
| 916 | 902 | 4200019 | NM_001085458.1 | NM_001085458 | catenin (cadherin- | CTNND1 | CAS; P120CAS; |
| | | | | | associated protein), | | p120; P120CTN; |
| | | | | | delta 1 (CTNND1), | | CTNND; KIAA0384 |
| | | | | | transcript variant 1, | | |
| | | | | | mRNA. | | |
| 917 | 903 | 4200110 | NM_138408.2 | NM_138408 | general transcription | GTF3C6 | C6orf51; TFIIIC35; |
| | | | | | factor IIIC, polypeptide | | bA397G5.3 |
| | | | | | 6, alpha 35 kDa | | |
| | | | | | (GTF3C6), mRNA. | | |
| 918 | 904 | 4200176 | NM_004107.3 | NM_004107 | Fc fragment of IgG, | FCGRT | alpha-chain; FCRN |
| | | | | | receptor, transporter, | | |
| | | | | | alpha (FCGRT), | | |
| | | | | | mRNA. | | |
| 919 | 905 | 4200725 | NR_001298.1 | NR_001298 | major histocompatibility | HLA-DRB6 | — |
| | | | | | complex, class II, DR | | |
| | | | | | beta 6 (pseudogene) | | |
| | | | | | (HLA-DRB6) on | | |
| | | | | | chromosome 6. | | |
| 920 | 906 | 4200743 | NM_015175.1 | NM_015175 | neurobeachin-like 2 | NBEAL2 | KIAA0540 |
| | | | | | (NBEAL2), mRNA. | | |
| 921 | 907 | 4210044 | NR_000024.2 | NR_000024 | small nucleolar RNA, | SNORD46 | U46; RNU40; RNU46; |
| | | | | | C/D box 46 | | U40 |
| | | | | | (SNORD46) on | | |
| | | | | | chromosome 1. | | |
| 922 | 908 | 4210066 | NM_017702.2 | NM_017702 | differentially expressed | DEF8 | MGC104349; |
| | | | | | in FDCP 8 homolog | | FLJ20186 |
| | | | | | (mouse) (DEF8), | | |
| | | | | | transcript variant 2, | | |
| | | | | | mRNA. | | |
| 923 | 909 | 4210431 | NM_003135.1 | NM_003135 | signal recognition | SRP19 | — |
| | | | | | particle 19 kDa | | |
| | | | | | (SRP19), mRNA. | | |
| 924 | 910 | 4210647 | NR_000033.2 | NR_000033 | estrogen-related | ESRRAP2 | ESTRRA |
| | | | | | receptor alpha | | |
| | | | | | pseudogene 2 | | |
| | | | | | (ESRRAP2) on | | |
| | | | | | chromosome 13. | | |
| 925 | 911 | 4220168 | NM_001024074.1 | NM_001024074 | histamine N- | HNMT | HMT; HNMT-S2; |
| | | | | | methyltransferase | | HNMT-S1 |
| | | | | | (HNMT), transcript | | |
| | | | | | variant 2, mRNA. | | |
| 926 | 912 | 4220187 | NM_003494.2 | NM_003494 | dysferlin, limb girdle | DYSF | LGMD2B; FER1L1; |
| | | | | | muscular dystrophy 2B | | FLJ90168; FLJ00175 |
| | | | | | (autosomal recessive) | | |
| | | | | | (DYSF), mRNA. | | |
| 927 | 913 | 4220259 | NM_001336.2 | NM_001336 | cathepsin Z (CTSZ), | CTSZ | CTSX |
| | | | | | mRNA. | | |
| 928 | 914 | 4220603 | NM_003120.2 | NM_003120 | spleen focus forming | SPI1 | SPI-A; SFPI1; PU.1; |
| | | | | | virus (SFFV) proviral | | OF; SPI-1 |
| | | | | | integration oncogene | | |
| | | | | | spi1 (SPI1), transcript | | |
| | | | | | variant 2, mRNA. | | |
| 929 | 915 | 4230168 | NM_005908.3 | NM_005908 | mannosidase, beta A, | MANBA | MANB1 |
| | | | | | lysosomal (MANBA), | | |
| | | | | | mRNA. | | |
| 930 | 916 | 4230520 | NM_003746.1 | NM_003746 | dynein, cytoplasmic, | DNCL1 | PIN; MGC126138; |
| | | | | | light polypeptide 1 | | hdlc1; DLC1; |
| | | | | | (DNCL1), mRNA. | | MGC126137; LC8; |
| | | | | | | | DLC8 |
| 931 | 917 | 4230554 | NM_015523.2 | NM_015523 | REX2, RNA | REXO2 | CGI-114; |
| | | | | | exonuclease 2 homolog | | MGC111570; |
| | | | | | (S. cerevisiae) | | DKFZP566E144; |
| | | | | | (REXO2), mRNA. | | RFN; SFN |
| 932 | 918 | 4230626 | NM_006254.3 | NM_006254 | protein kinase C, delta | PRKCD | MAY1; MGC49908; |
| | | | | | (PRKCD), transcript | | nPKC-delta |
| | | | | | variant 1, mRNA. | | |
| 933 | 919 | 4230669 | NM_006714.2 | NM_006714 | sphingomyelinphospho | SMPDL3A | yR36GH4.1; |
| | | | | | diesterase, acid-like 3A | | FLJ20177; ASM3A; |
| | | | | | (SMPDL3A), mRNA. | | ASML3a |
| 934 | 920 | 4230671 | NM_175077.1 | NM_175077 | Src-like-adaptor 2 | SLA2 | FLJ21992; |
| | | | | | (SLA2), transcript | | MGC49845; SLAP2; |
| | | | | | variant 2, mRNA. | | C20orf156; SLAP-2 |
| 935 | 921 | 4230673 | NM_000839.2 | NM_000839 | glutamate receptor, | GRM2 | mGlu2; GPRC1B; |
| | | | | | metabotropic 2 | | MGLUR2; GLUR2 |
| | | | | | (GRM2), mRNA. | | |
| 936 | 922 | 4250082 | NM_032221.3 | NM_032221 | chromodomain helicase | CHD6 | CHD5; KIAA1335; |
| | | | | | DNA binding protein 6 | | RIGB |
| | | | | | (CHD6), mRNA. | | |
| 937 | 923 | 4250327 | NM_175744.4 | NM_175744 | ras homolog gene | RHOC | H9; ARHC; |
| | | | | | family, member C | | MGC61427; |
| | | | | | (RHOC), transcript | | MGC1448; RHOH9; |
| | | | | | variant 1, mRNA. | | ARH9 |
| 938 | 924 | 4250343 | NM_006241.3 | NM_006241 | protein phosphatase 1, | PPP1R2 | MGC87148; IPP2 |
| | | | | | regulatory (inhibitor) | | |
| | | | | | subunit 2 (PPP1R2), | | |
| | | | | | mRNA. | | |
| 939 | 925 | 4250630 | NM_016523.1 | NM_016523 | killer cell lectin-like | KLRF1 | MGC119907; |
| | | | | | receptor subfamily F, | | CLEC5C; |
| | | | | | member 1 (KLRF1), | | MGC119908; |
| | | | | | mRNA. | | MGC119909 |
| 940 | 926 | 4250735 | NM_004843.2 | NM_004843 | interleukin 27 receptor, | IL27RA | zcytor1; WSX1; |
| | | | | | alpha (IL27RA), mRNA. | | IL27R; TCCR; CRL1 |
| 941 | 927 | 4260019 | NM_016645.2 | NM_016645 | neugrin, neurite | NGRN | NEUGRIN; DSC92 |
| | | | | | outgrowth associated | | |
| | | | | | (NGRN), transcript | | |
| | | | | | variant 1, mRNA. | | |
| 942 | 928 | 4260075 | NM_014463.1 | NM_014463 | LSM3 homolog, U6 | LSM3 | USS2; YLR438C; |
| | | | | | small nuclear RNA | | SMX4 |
| | | | | | associated (S. cerevisiae) | | |
| | | | | | (LSM3), | | |
| | | | | | mRNA. | | |
| 943 | 929 | 4260152 | NM_032174.4 | NM_032174 | translocase of outer | TOMM40L | RP11-297K8.10; |
| | | | | | mitochondrial | | TOMM40B; FLJ12770 |
| | | | | | membrane 40 homolog | | |
| | | | | | (yeast)-like | | |
| | | | | | (TOMM40L), nuclear | | |
| | | | | | gene encoding | | |
| | | | | | mitochondrial protein, | | |
| | | | | | mRNA. | | |
| 944 | 930 | 4260187 | NM_181715.1 | NM_181715 | CREB regulated | CRTC2 | RP11-422P24.6; |
| | | | | | transcription coactivator | | TORC2 |
| | | | | | 2 (CRTC2), mRNA. | | |
| 945 | 931 | 4260373 | NM_001098631.1 | NM_001098631 | interferon regulatory | IRF5 | — |
| | | | | | factor 5 (IRF5), | | |
| | | | | | transcript variant 7, | | |
| | | | | | mRNA. | | |
| 946 | 932 | 4260386 | NM_145918.2 | NM_145918 | cathepsin L1 (CTSL1), | CTSL1 | MEP; CATL; |
| | | | | | transcript variant 2, | | FLJ31037; CTSL |
| | | | | | mRNA. | | |
| 947 | 933 | 4260504 | NM_020468.2 | NM_020468 | sorting nexin 14 | SNX14 | MGC13217; RP11- |
| | | | | | (SNX14), transcript | | 321N4.2; RGS-PX2 |
| | | | | | variant 2, mRNA. | | |
| 948 | 934 | 4260551 | NM_001018060.1 | NM_001018060 | apoptosis-inducing | AIFM3 | FLJ30473; AIFL |
| | | | | | factor, mitochondrion- | | |
| | | | | | associated, 3 (AIFM3), | | |
| | | | | | nuclear gene encoding | | |
| | | | | | mitochondrial protein, | | |
| | | | | | transcript variant 2, | | |
| | | | | | mRNA. | | |
| 949 | 935 | 4260593 | NM_001001560.1 | NM_001001560 | golgi associated, | GGA1 | — |
| | | | | | gamma adaptin ear | | |
| | | | | | containing, ARF binding | | |
| | | | | | protein 1 (GGA1), | | |
| | | | | | transcript variant 2, | | |
| | | | | | mRNA. | | |
| 950 | 936 | 4260735 | NM_021159.3 | NM_021159 | RAP1, GTP-GDP | RAP1GDS1 | MGC118861; |
| | | | | | dissociation stimulator 1 | | MGC118859; GDS1 |
| | | | | | (RAP1GDS1), mRNA. | | |
| 951 | 937 | 4280253 | NM_017906.2 | NM_017906 | PAK1 interacting | PAK1IP1 | hPIP1; RP11- |
| | | | | | protein 1 (PAK1IP1), | | 421M1.5; PIP1; |
| | | | | | mRNA. | | MAK11; FLJ20624; |
| | | | | | | | bA421M1.5; WDR84 |
| 952 | 938 | 4280348 | NM_178841.2 | NM_178841 | ring finger protein 166 | RNF166 | MGC14381; |
| | | | | | (RNF166), mRNA. | | MGC2647 |
| 953 | 939 | 4280435 | NM_205839.1 | NM_205839 | leukocyte specific | LST1 | D6S49E; LST-1; |
| | | | | | transcript 1 (LST1), | | B144; MGC119007; |
| | | | | | transcript variant 4, | | MGC119006 |
| | | | | | mRNA. | | |
| 954 | 940 | 4280603 | NM_006527.2 | NM_006527 | stem-loop binding | SLBP | HBP |
| | | | | | protein (SLBP), mRNA. | | |
| 955 | 941 | 4290368 | NM_024430.2 | NM_024430 | proline-serine-threonine | PSTPIP2 | MGC34175; MAYP |
| | | | | | phosphatase interacting | | |
| | | | | | protein 2 (PSTPIP2), | | |
| | | | | | mRNA. | | |
| 956 | 942 | 4390079 | NM_022136.3 | NM_022136 | SAM domain, SH3 | SAMSN1 | NASH1; HACS1; |
| | | | | | domain and nuclear | | SASH2; SH3D6B |
| | | | | | localization signals 1 | | |
| | | | | | (SAMSN1), mRNA. | | |
| 957 | 943 | 4390546 | NM_014886.3 | NM_014886 | TGF beta-inducible | TINP1 | NSA2; HCL-G1; YR- |
| | | | | | nuclear protein 1 | | 29; CDK105 |
| | | | | | (TINP1), mRNA. | | |
| 958 | 944 | 4390619 | NM_001042678.1 | NM_001042678 | ras homolog gene | RHOC | H9; ARHC; |
| | | | | | family, member C | | MGC61427; |
| | | | | | (RHOC), transcript | | MGC1448; RHOH9; |
| | | | | | variant 2, mRNA. | | ARH9 |
| 959 | 945 | 4480224 | NM_021203.2 | NM_021203 | signal recognition | SRPRB | APMCF1 |
| | | | | | particle receptor, B | | |
| | | | | | subunit (SRPRB), | | |
| | | | | | mRNA. | | |
| 960 | 946 | 4490176 | NM_002922.3 | NM_002922 | regulator of G-protein | RGS1 | BL34; IR20; IER1; |
| | | | | | signaling 1 (RGS1), | | 1R20 |
| | | | | | mRNA. | | |
| 961 | 947 | 4490500 | NM_000887.3 | NM_000887 | integrin, alpha X | ITGAX | CD11C |
| | | | | | (complement | | |
| | | | | | component 3 receptor 4 | | |
| | | | | | subunit) (ITGAX), | | |
| | | | | | mRNA. | | |
| 962 | 948 | 4540228 | NM_139018.2 | NM_139018 | CD300 molecule-like | CD300LF | IREM1; IgSF13; |
| | | | | | family member f | | NKIR; CLM1; CD300f |
| | | | | | (CD300LF), mRNA. | | |
| 963 | 949 | 4540349 | NM_021177.3 | NM_021177 | LSM2 homolog, U6 | LSM2 | G7b; snRNP; |
| | | | | | small nuclear RNA | | C6orf28; YBL026W |
| | | | | | associated (S. cerevisiae) | | |
| | | | | | (LSM2), | | |
| | | | | | mRNA. | | |
| 964 | 950 | 4560435 | NM_024028.2 | NM_024028 | prenylcysteine oxidase | PCYOX1L | MGC3265 |
| | | | | | 1 like (PCYOX1L), | | |
| | | | | | mRNA. | | |
| 965 | 951 | 4560743 | NM_005816.4 | NM_005816 | CD96 molecule | CD96 | MGC22596; |
| | | | | | (CD96), transcript | | DKFZp667E2122; |
| | | | | | variant 2, mRNA. | | TACTILE |
| 966 | 952 | 4570008 | NM_005107.2 | NM_005107 | endonuclease G-like 1 | ENDOGL1 | ENGL; MGC125945; |
| | | | | | (ENDOGL1), mRNA. | | ENDOGL2; |
| | | | | | | | MGC125944; ENGL- |
| | | | | | | | B; ENGL-a |
| 967 | 953 | 4570433 | NM_016222.2 | NM_016222 | DEAD (Asp-Glu-Ala- | DDX41 | MGC8828; ABS |
| | | | | | Asp) box polypeptide | | |
| | | | | | 41 (DDX41), mRNA. | | |
| 968 | 954 | 4570438 | NM_001251.2 | NM_001251 | CD68 molecule | CD68 | DKFZp686M18236; |
| | | | | | (CD68), transcript | | SCARD1; GP110 |
| | | | | | variant 1, mRNA. | | |
| 969 | 955 | 4570494 | NM_012227.1 | NM_012227 | GTP binding protein 6 | GTPBP6 | FLJ90047; FLJ22809; |
| | | | | | (putative) (GTPBP6), | | PGPL; FLJ20977 |
| | | | | | mRNA. | | |
| 970 | 956 | 4590026 | NM_000884.2 | NM_000884 | IMP (inosine | IMPDH2 | IMPD2; IMPDH-II |
| | | | | | monophosphate) | | |
| | | | | | dehydrogenase 2 | | |
| | | | | | (IMPDH2), mRNA. | | |
| 971 | 957 | 4590110 | NM_006640.3 | NM_006640 | septin 9 (SEPT9), | SEPT9 | AF17q25; SINT1; |
| | | | | | mRNA. | | PNUTL4; SeptD1; |
| | | | | | | | MSF; NAPB; |
| | | | | | | | KIAA0991; MSF1 |
| 972 | 958 | 4590154 | NM_013373.2 | NM_013373 | zinc finger, DHHC-type | ZDHHC8 | ZNF378; ZDHHCL1 |
| | | | | | containing 8 | | |
| | | | | | (ZDHHC8), mRNA. | | |
| 973 | 959 | 4590477 | NM_001042600.1 | NM_001042600 | mitogen-activated | MAP4K1 | HPK1 |
| | | | | | protein kinase | | |
| | | | | | kinasekinasekinase 1 | | |
| | | | | | (MAP4K1), transcript | | |
| | | | | | variant 1, mRNA. | | |
| 974 | 960 | 4590521 | NM_004541.2 | NM_004541 | NADH dehydrogenase | NDUFA1 | ZNF183; MWFE; CI- |
| | | | | | (ubiquinone) 1 alpha | | MWFE |
| | | | | | subcomplex, 1, 7.5 kDa | | |
| | | | | | (NDUFA1), nuclear | | |
| | | | | | gene encoding | | |
| | | | | | mitochondrial protein, | | |
| | | | | | mRNA. | | |
| 975 | 961 | 4610044 | NM_006411.2 | NM_006411 | 1-acylglycerol-3- | AGPAT1 | MGC5423; |
| | | | | | phosphate O- | | MGC4007; LPAAT- |
| | | | | | acyltransferase 1 | | alpha; 1-AGPAT1; |
| | | | | | (lysophosphatidic acid | | G15; LPAATA |
| | | | | | acyltransferase, alpha) | | |
| | | | | | (AGPAT1), transcript | | |
| | | | | | variant 1, mRNA. | | |
| 976 | 962 | 4610138 | NM_006135.1 | NM_006135 | capping protein (actin | CAPZA1 | CAPPA1; CAPZ; |
| | | | | | filament) muscle Z-line, | | CAZ1 |
| | | | | | alpha 1 (CAPZA1), | | |
| | | | | | mRNA. | | |
| 977 | 963 | 4610201 | NR_002327.1 | NR_002327 | small nucleolar RNA, | SNORA10 | ACA10 |
| | | | | | H/ACA box 10 | | |
| | | | | | (SNORA10) on | | |
| | | | | | chromosome 16. | | |
| 978 | 964 | 4610220 | NM_001040196.1 | NM_001040196 | angiotensin II receptor- | AGTRAP | MGC29646; ATRAP |
| | | | | | associated protein | | |
| | | | | | (AGTRAP), transcript | | |
| | | | | | variant 4, mRNA. | | |
| 979 | 965 | 4610414 | NM_032796.2 | NM_032796 | synapse associated | SYAP1 | FLJ14495; |
| | | | | | protein 1, SAP47 | | DKFZp686K221; |
| | | | | | homolog (Drosophila) | | PRO3113; FLJ44185 |
| | | | | | (SYAP1), mRNA. | | |
| 980 | 966 | 4610674 | NM_007047.3 | NM_007047 | butyrophilin, subfamily | BTN3A2 | BT3.3; BT3.2; BTF4 |
| | | | | | 3, member A2 | | |
| | | | | | (BTN3A2), mRNA. | | |
| 981 | 967 | 4610753 | NM_000118.1 | NM_000118 | endoglin (Osler-Rendu- | ENG | ORW; CD105; HHT1; |
| | | | | | Weber syndrome 1) | | END; FLJ41744; |
| | | | | | (ENG), mRNA. | | ORW1 |
| 982 | 968 | 4640064 | NM_002342.1 | NM_002342 | lymphotoxin beta | LTBR | TNF-R-III; TNFRSF3; |
| | | | | | receptor (TNFR | | TNFR-RP; LT-BETA- |
| | | | | | superfamily, member 3) | | R; TNFCR; TNFR2- |
| | | | | | (LTBR), mRNA. | | RP; CD18; D12S370 |
| 983 | 969 | 4640333 | NM_003427.3 | NM_003427 | zinc finger protein 76 | ZNF76 | D6S229E; Zfp523; |
| | | | | | (expressed in testis) | | ZNF523 |
| | | | | | (ZNF76), mRNA. | | |
| 984 | 970 | 4640343 | NM_205840.1 | NM_205840 | leukocyte specific | LST1 | D6S49E; LST-1; |
| | | | | | transcript 1 (LST1), | | B144; MGC119007; |
| | | | | | transcript variant 5, | | MGC119006 |
| | | | | | mRNA. | | |
| 985 | 971 | 4640392 | NM_005937.3 | NM_005937 | myeloid/lymphoid or | MLLT6 | AF17; FLJ23480 |
| | | | | | mixed-lineage leukemia | | |
| | | | | | (trithorax homolog, | | |
| | | | | | Drosophila); | | |
| | | | | | translocated to, 6 | | |
| | | | | | (MLLT6), mRNA. | | |
| 986 | 972 | 4670750 | NM_001065.2 | NM_001065 | tumor necrosis factor | TNFRSF1A | TNFR1; p60; |
| | | | | | receptor superfamily, | | CD120a; p55-R; |
| | | | | | member 1A | | TNFR60; TNF-R55; |
| | | | | | (TNFRSF1A), mRNA. | | TNFAR; TBP1; TNF- |
| | | | | | | | R-I; TNFR55; FPF; |
| | | | | | | | TNF-R; p55; |
| | | | | | | | MGC19588 |
| 987 | 973 | 4730086 | NM_024745.2 | NM_024745 | SHC SH2-domain | SHCBP1 | FLJ22009; |
| | | | | | binding protein 1 | | MGC26900 |
| | | | | | (SHCBP1), mRNA. | | |
| 988 | 974 | 4730349 | NM_022572.2 | NM_022572 | paroxysmal | PNKD | FKSG19; KIPP1184; |
| | | | | | nonkinesiogenic | | DKFZp564N1362; |
| | | | | | dyskinesia (PNKD), | | MR1; FPD1; |
| | | | | | transcript variant 2, | | TAHCCP2; |
| | | | | | mRNA. | | MGC31943; DYT8; |
| | | | | | | | KIAA1184; BRP17; |
| | | | | | | | MR-1; PDC |
| 989 | 975 | 4730743 | NM_007108.2 | NM_007108 | transcription elongation | TCEB2 | SIII |
| | | | | | factor B (SIII), | | |
| | | | | | polypeptide 2 (18 kDa, | | |
| | | | | | elongin B) (TCEB2), | | |
| | | | | | transcript variant 1, | | |
| | | | | | mRNA. | | |
| 990 | 976 | 4760112 | NM_001003714.1 | NM_001003714 | ATP synthase, H+ | ATP5J2 | ATP5JL |
| | | | | | transporting, | | |
| | | | | | mitochondrial F0 | | |
| | | | | | complex, subunit F2 | | |
| | | | | | (ATP5J2), nuclear gene | | |
| | | | | | encoding mitochondrial | | |
| | | | | | protein, transcript | | |
| | | | | | variant 3, mRNA. | | |
| 991 | 977 | 4760364 | NM_012276.3 | NM_012276 | leukocyte | LILRA4 | ILT7; CD85g; |
| | | | | | immunoglobulin-like | | MGC129598; |
| | | | | | receptor, subfamily A | | MGC129597 |
| | | | | | (with TM domain), | | |
| | | | | | member 4 (LILRA4), | | |
| | | | | | mRNA. | | |
| 992 | 978 | 4780136 | NM_016406.1 | NM_016406 | ubiquitin-fold modifier | UFC1 | HSPC155 |
| | | | | | conjugating enzyme 1 | | |
| | | | | | (UFC1), mRNA. | | |
| 993 | 979 | 4780524 | NM_016324.2 | NM_016324 | zinc finger protein 274 | ZNF274 | ZKSCAN19; |
| | | | | | (ZNF274), transcript | | DKFZp686K08243; |
| | | | | | variant ZNF274b, | | FLJ37843; HFB101; |
| | | | | | mRNA. | | ZF2 |
| 994 | 980 | 4780612 | NM_030930.2 | NM_030930 | unc-93 homolog B1 (C. elegans) | UNC93B1 | UNC93B; UNC93; |
| | | | | | (UNC93B1), | | MGC126617 |
| | | | | | mRNA. | | |
| 995 | 981 | 4810020 | NM_002664.1 | NM_002664 | pleckstrin (PLEK), | PLEK | P47; FLJ27168 |
| | | | | | mRNA. | | |
| 996 | 982 | 4810435 | NM_005506.2 | NM_005506 | scavenger receptor | SCARB2 | CD36L2; HLGP85; |
| | | | | | class B, member 2 | | SR-BII; LIMPII |
| | | | | | (SCARB2), mRNA. | | |
| 997 | 983 | 4810615 | NM_014655.1 | NM_014655 | solute carrier family 25, | SLC25A44 | FLJ90431; KIAA0446; |
| | | | | | member 44 | | RP11-54H19.3 |
| | | | | | (SLC25A44), mRNA. | | |
| 998 | 984 | 4810674 | NM_019006.2 | NM_019006 | zinc finger, AN1-type | ZFAND6 | ZA20D3; AWP1; |
| | | | | | domain 6 (ZFAND6), | | ZFAND5B |
| | | | | | mRNA. | | |
| 999 | 985 | 4830100 | NM_007355.2 | NM_007355 | heat shock protein | HSP90AB1 | HSP90-BETA; |
| | | | | | 90 kDa alpha | | HSPC2; FLJ26984; |
| | | | | | (cytosolic), class B | | D6S182; HSP90B; |
| | | | | | member 1 | | HSPCB |
| | | | | | (HSP90AB1), mRNA. | | |
| 1000 | 986 | 4830632 | NM_003982.2 | NM_003982 | solute carrier family 7 | SLC7A7 | LAT3; y+LAT-1; LPI; |
| | | | | | (cationic amino acid | | Y+LAT1 |
| | | | | | transporter, y+ system), | | |
| | | | | | member 7 (SLC7A7), | | |
| | | | | | mRNA. | | |
| 1001 | 987 | 4850164 | NM_005085.2 | NM_005085 | nucleoporin 214 kDa | NUP214 | N214; MGC104525; |
| | | | | | (NUP214), mRNA. | | CAIN; D9S46E; CAN |
| 1002 | 988 | 4850168 | NM_003059.2 | NM_003059 | solute carrier family 22 | SLC22A4 | OCTN1; MGC40524; |
| | | | | | (organic | | MGC34546 |
| | | | | | cation/ergothioneine | | |
| | | | | | transporter), member 4 | | |
| | | | | | (SLC22A4), mRNA. | | |
| 1003 | 989 | 4850270 | NM_003417.3 | NM_003417 | zinc finger protein 264 | ZNF264 | — |
| | | | | | (ZNF264), mRNA. | | |
| 1004 | 990 | 4850301 | NM_012232.3 | NM_012232 | polymerase I and | PTRF | FKSG13 |
| | | | | | transcript release factor | | |
| | | | | | (PTRF), mRNA. | | |
| 1005 | 991 | 4860050 | NM_153047.1 | NM_153047 | FYN oncogene related | FYN | MGC45350; SYN; |
| | | | | | to SRC, FGR, YES | | SLK |
| | | | | | (FYN), transcript variant | | |
| | | | | | 2, mRNA. | | |
| 1006 | 992 | 4860224 | NM_004184.3 | NM_004184 | tryptophanyl- | WARS | IFI53; IFP53; |
| | | | | | tRNAsynthetase | | GAMMA-2 |
| | | | | | (WARS), transcript | | |
| | | | | | variant 1, mRNA. | | |
| 1007 | 993 | 4860286 | NM_018955.2 | NM_018955 | ubiquitin B (UBB), | UBB | FLJ25987; MGC8385 |
| | | | | | mRNA. | | |
| 1008 | 994 | 4860367 | NM_032166.2 | NM_032166 | ATR interacting protein | ATRIP | MGC20625; ATRIP; |
| | | | | | (ATRIP), transcript | | DKFZp762J2115; |
| | | | | | variant 2, mRNA. | | DRN3; FLJ12343; |
| | | | | | | | MGC21482; |
| | | | | | | | DKFZp434J0310; |
| | | | | | | | MGC26740; AGS1 |
| 1009 | 995 | 4860707 | NM_182608.2 | NM_182608 | ankyrin repeat domain | ANKRD33 | DKFZp686O1689; |
| | | | | | 33 (ANKRD33), mRNA. | | C12orf7 |
| 1010 | 996 | 4860753 | NM_080914.1 | NM_080914 | asialoglycoprotein | ASGR2 | L-H2; CLEC4H2; |
| | | | | | receptor 2 (ASGR2), | | Hs.1259; ASGP-R |
| | | | | | transcript variant 3, | | |
| | | | | | mRNA. | | |
| 1011 | 997 | 4860762 | NM_003866.1 | NM_003866 | inositol polyphosphate- | INPP4B | MGC132014 |
| | | | | | 4-phosphatase, type II, | | |
| | | | | | 105 kDa (INPP4B), | | |
| | | | | | mRNA. | | |
| 1012 | 998 | 4880168 | NM_004339.2 | NM_004339 | pituitary tumor- | PTTG1IP | C21orf3; C21orf1; |
| | | | | | transforming 1 | | PBF |
| | | | | | interacting protein | | |
| | | | | | (PTTG1IP), mRNA. | | |
| 1013 | 999 | 4880288 | NM_024527.4 | NM_024527 | abhydrolase domain | ABHD8 | FLJ11743; |
| | | | | | containing 8 (ABHD8), | | MGC14280; |
| | | | | | mRNA. | | MGC2512 |
| 1014 | 1000 | 4880563 | NM_015134.2 | NM_015134 | myosin phosphatase- | M-RIP | p116Rip; RHOIP3; |
| | | | | | Rho interacting protein | | KIAA0864 |
| | | | | | (M-RIP), transcript | | |
| | | | | | variant 1, mRNA. | | |
| 1015 | 1001 | 4880689 | NM_020243.4 | NM_020243 | translocase of outer | TOMM22 | T0M22; MSTP065; |
| | | | | | mitochondrial | | MST065; 1C9-2 |
| | | | | | membrane 22 homolog | | |
| | | | | | (yeast) (TOMM22), | | |
| | | | | | nuclear gene encoding | | |
| | | | | | mitochondrial protein, | | |
| | | | | | mRNA. | | |
| 1016 | 1002 | 4880703 | NM_053067.1 | NM_053067 | ubiquilin 1 (UBQLN1), | UBQLN1 | DA41; XDRP1; DSK2; |
| | | | | | transcript variant 2, | | FLJ90054; PLIC-1 |
| | | | | | mRNA. | | |
| 1017 | 1003 | 4890181 | NM_002885.1 | NM_002885 | RAP1 GTPase | RAP1GAP | KIAA0474; |
| | | | | | activating protein | | Rap1GAP1; |
| | | | | | (RAP1GAP), mRNA. | | RAP1GA1; rap1GAPII |
| 1018 | 1004 | 4890255 | NM_024758.3 | NM_024758 | agmatineureohydrolase | AGMAT | FLJ23384 |
| | | | | | (agmatinase) | | |
| | | | | | (AGMAT), mRNA. | | |
| 1019 | 1005 | 4900070 | NM_004832.1 | NM_004832 | glutathione S- | GSTO1 | GSTTLp28; P28; |
| | | | | | transferase omega 1 | | DKFZp686H13163 |
| | | | | | (GSTO1), mRNA. | | |
| 1020 | 1006 | 4900685 | NM_001040194.1 | NM_001040194 | angiotensin II receptor- | AGTRAP | MGC29646; ATRAP |
| | | | | | associated protein | | |
| | | | | | (AGTRAP), transcript | | |
| | | | | | variant 2, mRNA. | | |
| 1021 | 1007 | 4900707 | NR_001588.1 | NR_001588 | Shwachman-Bodian- | SBDSP | — |
| | | | | | Diamond syndrome | | |
| | | | | | pseudogene (SBDSP) | | |
| | | | | | on chromosome 7. | | |
| 1022 | 1008 | 4920403 | NM_018427.3 | NM_018427 | RRN3 RNA | RRN3 | MGC104238; TIFIA; |
| | | | | | polymerase I | | DKFZp566E104 |
| | | | | | transcription factor | | |
| | | | | | homolog (S. cerevisiae) | | |
| | | | | | (RRN3), mRNA. | | |
| 1023 | 1009 | 5050349 | NM_001018038.1 | NM_001018038 | vacuolar protein sorting | VPS13A | CHAC; FLJ42030; |
| | | | | | 13 homolog A (S. cerevisiae) | | KIAA0986 |
| | | | | | (VPS13A), | | |
| | | | | | transcript variant D, | | |
| | | | | | mRNA. | | |
| 1024 | 1010 | 5050408 | NM_005066.1 | NM_005066 | splicing factor | SFPQ | POMP100; PSF |
| | | | | | proline/glutamine-rich | | |
| | | | | | (polypyrimidine tract | | |
| | | | | | binding protein | | |
| | | | | | associated) (SFPQ), | | |
| | | | | | mRNA. | | |
| 1025 | 1011 | 5050437 | NM_016558.2 | NM_016558 | SCAN domain | SCAND1 | RAZ1; SDP1 |
| | | | | | containing 1 | | |
| | | | | | (SCAND1), transcript | | |
| | | | | | variant 1, mRNA. | | |
| 1026 | 1012 | 5050441 | NM_014795.2 | NM_014795 | zinc finger E-box | ZEB2 | KIAA0569; SMADIP1; |
| | | | | | binding homeobox 2 | | ZFHX1B; SIP1; SIP-1 |
| | | | | | (ZEB2), mRNA. | | |
| 1027 | 1013 | 5050520 | NM_022827.2 | NM_022827 | spermatogenesis | SPATA20 | MGC111032; |
| | | | | | associated 20 | | FLJ21347; Tisp78; |
| | | | | | (SPATA20), mRNA. | | DKFZp686H1839; |
| | | | | | | | SSP411; FLJ21969 |
| 1028 | 1014 | 5050603 | NM_198517.2 | NM_198517 | TBC1 domain family, | TBC1D10C | MGC46488; |
| | | | | | member 10C | | FLJ00332 |
| | | | | | (TBC1D10C), mRNA. | | |
| 1029 | 1015 | 5050634 | NM_014468.2 | NM_014468 | VENT homeobox | VENTX | HPX42B; |
| | | | | | homolog | | MGC119910; |
| | | | | | (Xenopus laevis) | | MGC119911; |
| | | | | | (VENTX), mRNA. | | VENTX2; NA88A |
| 1030 | 1016 | 5050681 | NM_017899.2 | NM_017899 | tescalcin (TESC), | TESC | TSC; FLJ20607 |
| | | | | | mRNA. | | |
| 1031 | 1017 | 5050753 | NM_001013703.2 | NM_001013703 | eukaryotic translation | EIF2AK4 | GCN2; KIAA1338 |
| | | | | | initiation factor 2 alpha | | |
| | | | | | kinase 4 (EIF2AK4), | | |
| | | | | | mRNA. | | |
| 1032 | 1018 | 5080021 | NM_001165.3 | NM_001165 | baculoviral IAP repeat- | BIRC3 | RNF49; MALT2; |
| | | | | | containing 3 (BIRC3), | | MIHC; HAIP1; API2; |
| | | | | | transcript variant 1, | | HIAP1; AIP1; CIAP2 |
| | | | | | mRNA. | | |
| 1033 | 1019 | 5080333 | NM_080686.1 | NM_080686 | HLA-B associated | BAT2 | G2; D6S51E; |
| | | | | | transcript 2 (BAT2), | | DKFZp686D09175; |
| | | | | | transcript variant 1, | | D6S51 |
| | | | | | mRNA. | | |
| 1034 | 1021 | 5090040 | NM_198219.1 | NM_198219 | inhibitor of growth | ING1 | p33ING1; p33; |
| | | | | | family, member 1 | | p47ING1a; |
| | | | | | (ING1), transcript | | p33ING1b; p47; |
| | | | | | variant 1, mRNA. | | p24ING1c |
| 1035 | 1022 | 5090068 | NM_003164.3 | NM_003164 | syntaxin 5 (STX5), | STX5 | STX5A; SED5 |
| | | | | | mRNA. | | |
| 1036 | 1023 | 5090088 | NM_004446.2 | NM_004446 | glutamyl-prolyl- | EPRS | QPRS; EARS; PARS; |
| | | | | | tRNAsynthetase | | PIG32; QARS; |
| | | | | | (EPRS), mRNA. | | DKFZp313B047 |
| 1037 | 1024 | 5090156 | NM_182744.1 | NM_182744 | neuroblastoma, | NBL1 | D1S1733E; NO3; |
| | | | | | suppression of | | DAND1; DAN; NB; |
| | | | | | tumorigenicity 1 | | MGC8972 |
| | | | | | (NBL1), transcript | | |
| | | | | | variant 1, mRNA. | | |
| 1038 | 1025 | 5090300 | NM_002562.4 | NM_002562 | purinergic receptor | P2RX7 | MGC20089; P2X7 |
| | | | | | P2X, ligand-gated ion | | |
| | | | | | channel, 7 (P2RX7), | | |
| | | | | | mRNA. | | |
| 1039 | 1026 | 5090376 | NM_006555.3 | NM_006555 | YKT6 v-SNARE | YKT6 | — |
| | | | | | homolog (S. cerevisiae) | | |
| | | | | | (YKT6), mRNA. | | |
| 1040 | 1027 | 5090400 | NM_018241.1 | NM_018241 | transmembrane protein | TMEM34 | FLJ10846 |
| | | | | | 34 (TMEM34), mRNA. | | |
| 1041 | 1028 | 5090402 | NM_016374.5 | NM_016374 | AT rich interactive | ARID4B | BCAA; RBP1L1; |
| | | | | | domain 4B (RBP1-like) | | MGC163290; |
| | | | | | (ARID4B), transcript | | BRCAA1; SAP180; |
| | | | | | variant 1, mRNA. | | RBBP1L1; |
| | | | | | | | DKFZp313M2420 |
| 1042 | 1029 | 5130114 | NM_021871.2 | NM_021871 | fibrinogen alpha chain | FGA | MGC119425; |
| | | | | | (FGA), transcript variant | | MGC119423; Fib2; |
| | | | | | alpha, mRNA. | | MGC119422 |
| 1043 | 1030 | 5130139 | NM_001537.2 | NM_001537 | heat shock factor | HSBP1 | DKFZp686D1664; |
| | | | | | binding protein 1 | | NPC-A-13; |
| | | | | | (HSBP1), mRNA. | | DKFZp686O24200 |
| 1044 | 1031 | 5130440 | NM_139346.1 | NM_139346 | bridging integrator 1 | BIN1 | MGC10367; AMPH2; |
| | | | | | (BIN1), transcript | | DKFZp547F068; |
| | | | | | variant 4, mRNA. | | SH3P9; AMPHL |
| 1045 | 1032 | 5130605 | NM_012123.2 | NM_012123 | mitochondrial | MTO1 | CGI-02 |
| | | | | | translation optimization | | |
| | | | | | 1 homolog (S. cerevisiae) | | |
| | | | | | (MTO1), | | |
| | | | | | nuclear gene encoding | | |
| | | | | | mitochondrial protein, | | |
| | | | | | transcript variant 2, | | |
| | | | | | mRNA. | | |
| 1046 | 1033 | 5220161 | NM_001001.3 | NM_001001 | ribosomal protein L36a- | RPL36AL | RPL36A; |
| | | | | | like (RPL36AL), mRNA. | | MGC111574 |
| 1047 | 1034 | 5220497 | NM_001037171.1 | NM_001037171 | acyl-CoA thioesterase 9 | ACOT9 | MT-ACT48; CGI-16; |
| | | | | | (ACOT9), transcript | | ACATE2 |
| | | | | | variant 1, mRNA. | | |
| 1048 | 1035 | 5220504 | NM_001011671.1 | NM_001011671 | coiled-coil-helix-coiled- | CHCHD7 | FLJ40966; MGC2217 |
| | | | | | coil-helix domain | | |
| | | | | | containing 7 | | |
| | | | | | (CHCHD7), transcript | | |
| | | | | | variant 6, mRNA. | | |
| 1049 | 1036 | 5220653 | NM_004539.3 | NM_004539 | asparaginyl- | NARS | ASNRS; NARS1 |
| | | | | | tRNAsynthetase | | |
| | | | | | (NARS), mRNA. | | |
| 1050 | 1037 | 5260082 | NM_014711.3 | NM_014711 | CP110 protein | CP110 | KIAA0419; |
| | | | | | (CP110), mRNA. | | DKFZp781G1416 |
| 1051 | 1038 | 5260369 | NM_145290.2 | NM_145290 | G protein-coupled | GPR125 | TEM5L; PGR21 |
| | | | | | receptor 125 | | |
| | | | | | (GPR125), mRNA. | | |
| 1052 | 1039 | 5260575 | NM_003677.3 | NM_003677 | density-regulated | DENR | DRP; DRP1; SMAP-3 |
| | | | | | protein (DENR), | | |
| | | | | | mRNA. | | |
| 1053 | 1040 | 5270575 | NM_001040439.1 | NM_001040439 | mitogen-activated | MAPK8IP3 | SYD2; KIAA1066; |
| | | | | | protein kinase 8 | | FLJ00027; JSAP1; |
| | | | | | interacting protein 3 | | DKFZp762N1113; |
| | | | | | (MAPK8IP3), transcript | | JIP3 |
| | | | | | variant 2, mRNA. | | |
| 1054 | 1041 | 5270768 | NM_031268.4 | NM_031268 | 3-phosphoinositide | PDPK1 | MGC20087; |
| | | | | | dependent protein | | MGC35290; PDK1; |
| | | | | | kinase-1 (PDPK1), | | PRO0461; PkB-like; |
| | | | | | transcript variant 2, | | PkB-like 1 |
| | | | | | mRNA. | | |
| 1055 | 1043 | 5290131 | NM_006141.2 | NM_006141 | dynein, cytoplasmic 1, | DYNC1LI2 | DNCLI2; LIC2 |
| | | | | | light intermediate chain | | |
| | | | | | 2 (DYNC1LI2), mRNA. | | |
| 1056 | 1044 | 5290193 | NM_153331.2 | NM_153331 | potassium channel | KCTD6 | MGC27385 |
| | | | | | tetramerisation domain | | |
| | | | | | containing 6 (KCTD6), | | |
| | | | | | mRNA. | | |
| 1057 | 1045 | 5290397 | NM_013246.2 | NM_013246 | cardiotrophin-like | CLCF1 | CISS2; NNT1; CLC; |
| | | | | | cytokine factor 1 | | BSF3; NR6 |
| | | | | | (CLCF1), mRNA. | | |
| 1058 | 1046 | 5290576 | NR_003264.1 | NR_003264 | succinate | SDHALP1 | SDHAL1 |
| | | | | | dehydrogenase | | |
| | | | | | complex, subunit A, | | |
| | | | | | flavoproteinpseudogene | | |
| | | | | | 1 (SDHALP1) on | | |
| | | | | | chromosome 3. | | |
| 1059 | 1047 | 5290692 | NM_005827.1 | NM_005827 | solute carrier family 35, | SLC35B1 | UGTREL1 |
| | | | | | member B1 | | |
| | | | | | (SLC35B1), mRNA. | | |
| 1060 | 1048 | 5310170 | NM_001018070.1 | NM_001018070 | coronin, actin binding | CORO1B | CORONIN-2; |
| | | | | | protein, 1B (CORO1B), | | DKFZP762I166 |
| | | | | | transcript variant 2, | | |
| | | | | | mRNA. | | |
| 1061 | 1049 | 5310397 | NM_145256.2 | NM_145256 | leucine rich repeat | LRRC25 | MAPA; FLJ38116 |
| | | | | | containing 25 | | |
| | | | | | (LRRC25), mRNA. | | |
| 1062 | 1050 | 5360064 | NM_012483.1 | NM_012483 | granulysin (GNLY), | GNLY | D2S69E; 519; LAG2; |
| | | | | | transcript variant 519, | | NKG5; LAG-2; |
| | | | | | mRNA. | | TLA519 |
| 1063 | 1051 | 5360154 | NM_017740.1 | NM_017740 | zinc finger, DHHC-type | ZDHHC7 | ZNF370; FLJ10792; |
| | | | | | containing 7 | | FLJ20279 |
| | | | | | (ZDHHC7), mRNA. | | |
| 1064 | 1052 | 5360653 | NM_000098.1 | NM_000098 | carnitinepalmitoyltransferase | CPT2 | CPTASE; CPT1 |
| | | | | | II (CPT2), | | |
| | | | | | nuclear gene encoding | | |
| | | | | | mitochondrial protein, | | |
| | | | | | mRNA. | | |
| 1065 | 1053 | 5360703 | NM_016453.2 | NM_016453 | NCK interacting protein | NCKIPSD | DIP; WISH; AF3P21; |
| | | | | | with SH3 domain | | MGC23891; SPIN90; |
| | | | | | (NCKIPSD), transcript | | DIP1; ORF1; |
| | | | | | variant 1, mRNA. | | WASLBP |
| 1066 | 1054 | 5360707 | NM_001044387.1 | NM_001044387 | zinc finger protein 557 | ZNF557 | MGC4054 |
| | | | | | (ZNF557), transcript | | |
| | | | | | variant 2, mRNA. | | |
| 1067 | 1055 | 5390010 | NM_015266.1 | NM_015266 | solute carrier family 9 | SLC9A8 | FLJ42500; |
| | | | | | (sodium/hydrogen | | MGC138418; NHE8; |
| | | | | | exchanger), member 8 | | DKFZp686C03237; |
| | | | | | (SLC9A8), mRNA. | | KIAA0939 |
| 1068 | 1056 | 5390128 | NM_018176.2 | NM_018176 | leucine-rich repeat LGI | LGI2 | KIAA1916; |
| | | | | | family, member 2 | | MGC126808; |
| | | | | | (LGI2), mRNA. | | MGC126810; |
| | | | | | | | FLJ10675; LGIL2 |
| 1069 | 1057 | 5390161 | NM_004419.3 | NM_004419 | dual specificity | DUSP5 | HVH3; DUSP |
| | | | | | phosphatase 5 | | |
| | | | | | (DUSP5), mRNA. | | |
| 1070 | 1058 | 5390349 | NM_001012452.1 | NM_001012452 | golgin-like hypothetical | FLJ32679 | MGC102859; |
| | | | | | protein LOC440321 | | MGC104696 |
| | | | | | (FLJ32679), mRNA. | | |
| 1071 | 1059 | 5390494 | NM_001417.4 | NM_001417 | eukaryotic translation | EIF4B | EIF-4B; PRO1843 |
| | | | | | initiation factor 4B | | |
| | | | | | (EIF4B), mRNA. | | |
| 1072 | 1060 | 5390703 | NM_153334.3 | NM_153334 | scavenger receptor | SCARF2 | SREC2; SRECRP-1; |
| | | | | | class F, member 2 | | SREC-II; NSR1 |
| | | | | | (SCARF2), transcript | | |
| | | | | | variant 1, mRNA. | | |
| 1073 | 1061 | 5420367 | NM_000454.4 | NM_000454 | superoxide dismutase | SOD1 | ALS1; IPOA; SOD; |
| | | | | | 1, soluble (amyotrophic | | homodimer, ALS |
| | | | | | lateral sclerosis 1 | | |
| | | | | | (adult)) (SOD1), | | |
| | | | | | mRNA. | | |
| 1074 | 1062 | 5420377 | NM_002306.1 | NM_002306 | lectin, galactoside- | LGALS3 | GAL3; MAC2; |
| | | | | | binding, soluble, 3 | | LGALS2; CBP35; |
| | | | | | (galectin 3) (LGALS3), | | GALBP |
| | | | | | mRNA. | | |
| 1075 | 1063 | 5420564 | NM_005384.2 | NM_005384 | nuclear factor, | NFIL3 | IL3BP1; NF-IL3A; |
| | | | | | interleukin 3 regulated | | E4BP4; NFIL3A |
| | | | | | (NFIL3), mRNA. | | |
| 1076 | 1064 | 5490367 | NM_175868.1 | NM_175868 | melanoma antigen | MAGEA6 | MAGE3B; MAGE-3b; |
| | | | | | family A, 6 (MAGEA6), | | MGC52297; MAGE6 |
| | | | | | transcript variant 2, | | |
| | | | | | mRNA. | | |
| 1077 | 1065 | 5490402 | NM_016202.2 | NM_016202 | zinc finger protein 580 | ZNF580 | — |
| | | | | | (ZNF580), transcript | | |
| | | | | | variant 1, mRNA. | | |
| 1078 | 1066 | 5560075 | NM_005928.1 | NM_005928 | milk fat globule-EGF | MFGE8 | HsT19888; BA46; |
| | | | | | factor 8 protein | | OAcGD3S; EDIL1 |
| | | | | | (MFGE8), mRNA. | | |
| 1079 | 1068 | 5560136 | NM_018117.10 | NM_0181170 | bromodomain and WD | BRWD2 | FLJ42531; DR11; |
| | | | | | repeat domain | | DKFZp434L1715; |
| | | | | | containing 2 (BRWD2), | | WDR15; WDR11 |
| | | | | | mRNA. | | |
| 1080 | 1069 | 5560471 | NM_133280.1 | NM_133280 | Fc fragment of IgA, | FCAR | CD89 |
| | | | | | receptor for (FCAR), | | |
| | | | | | transcript variant 10, | | |
| | | | | | mRNA. | | |
| 1081 | 1070 | 5560541 | NM_006929.4 | NM_006929 | superkillerviralicidic | SKIV2L | SKIV2; DDX13; |
| | | | | | activity 2-like (S. cerevisiae) | | SKI2W; SKI2; 170A; |
| | | | | | (SKIV2L), | | HLP |
| | | | | | mRNA. | | |
| 1082 | 1071 | 5560561 | NM_022748.10 | NM_0227480 | tensin 3 (TNS3), | TNS3 | TENS1; FLJ13732; |
| | | | | | mRNA. | | TEM6; MGC88434; |
| | | | | | | | H_NH049I23.2; |
| | | | | | | | FLJ35545; |
| | | | | | | | DKFZp686M1045; |
| | | | | | | | DKFZp686K12123 |
| 1083 | 1072 | 5560682 | NM_000421.2 | NM_000421 | keratin 10 | KRT10 | K10; KPP; CK10 |
| | | | | | (epidermolytic | | |
| | | | | | hyperkeratosis; | | |
| | | | | | keratosis palmaris et | | |
| | | | | | plantaris) (KRT10), | | |
| | | | | | mRNA. | | |
| 1084 | 1073 | 5570070 | NM_012400.2 | NM_012400 | phospholipase A2, | PLA2G2D | SPLASH; sPLA2S |
| | | | | | group IID (PLA2G2D), | | |
| | | | | | mRNA. | | |
| 1085 | 1074 | 5570139 | NM_012413.3 | NM_012413 | glutaminyl-peptide | QPCT | QC; GCT |
| | | | | | cyclotransferase | | |
| | | | | | (glutaminylcyclase) | | |
| | | | | | (QPCT), mRNA. | | |
| 1086 | 1075 | 5570195 | NM_033656.2 | NM_033656 | bromodomain and WD | BRWD1 | C21orf107; |
| | | | | | repeat domain | | FLJ43918; WDR9; |
| | | | | | containing 1 (BRWD1), | | N143 |
| | | | | | transcript variant 2, | | |
| | | | | | mRNA. | | |
| 1087 | 1076 | 5570242 | NM_002626.4 | NM_002626 | phosphofructokinase, | PFKL | FLJ40909; |
| | | | | | liver (PFKL), transcript | | DKFZp686G1648; |
| | | | | | variant 2, mRNA. | | PFK-B; FLJ30173; |
| | | | | | | | DKFZp686L2097 |
| 1088 | 1077 | 5570309 | NM_005131.2 | NM_005131 | THO complex 1 | THOC1 | P84; P84N5; HPR1 |
| | | | | | (THOC1), mRNA. | | |
| 1089 | 1079 | 5670315 | NM_016199.1 | NM_016199 | LSM7 homolog, U6 | LSM7 | YNL147W |
| | | | | | small nuclear RNA | | |
| | | | | | associated (S. cerevisiae) | | |
| | | | | | (LSM7), | | |
| | | | | | mRNA. | | |
| 1090 | 1080 | 5670719 | NM_000628.3 | NM_000628 | interleukin 10 receptor, | IL10RB | IL-10R2; CRF2-4; |
| | | | | | beta (IL10RB), mRNA. | | CRFB4; CDW210B; |
| | | | | | | | D21S58; D21S66 |
| 1091 | 1081 | 5690082 | NM_153373.1 | NM_153373 | alanine-glyoxylate | AGXT2L2 | MGC117348; |
| | | | | | aminotransferase 2-like | | MGC15875; |
| | | | | | 2 (AGXT2L2), mRNA. | | MGC45484 |
| 1092 | 1082 | 5690156 | NM_022492.3 | NM_022492 | tetratricopeptide repeat | TTC31 | FLJ33201; FLJ12788; |
| | | | | | domain 31 (TTC31), | | MGC120200 |
| | | | | | mRNA. | | |
| 1093 | 1083 | 5690279 | NM_006567.3 | NM_006567 | phenylalanyl- | FARS2 | dJ520B18.2; FARS1; |
| | | | | | tRNAsynthetase 2, | | HSPC320; PheRS |
| | | | | | mitochondrial (FARS2), | | |
| | | | | | nuclear gene encoding | | |
| | | | | | mitochondrial protein, | | |
| | | | | | mRNA. | | |
| 1094 | 1086 | 5690382 | NM_005605.3 | NM_005605 | protein phosphatase 3 | PPP3CC | CALNA3 |
| | | | | | (formerly 2B), catalytic | | |
| | | | | | subunit, gamma | | |
| | | | | | isoform (PPP3CC), | | |
| | | | | | mRNA. | | |
| 1095 | 1087 | 5690400 | NR_003082.1 | NR_003082 | glutathione S- | GSTTP2 | FLJ46109 |
| | | | | | transferase theta | | |
| | | | | | pseudogene 2 | | |
| | | | | | (GSTTP2) on | | |
| | | | | | chromosome 22. | | |
| | | | | | XM_941198 | | |
| | | | | | XM_945014 | | |
| | | | | | XM_945016 | | |
| 1096 | 1088 | 5690437 | NM_004515.2 | NM_004515 | interleukin enhancer | ILF2 | MGC8391; PRO3063; |
| | | | | | binding factor 2, 45 kDa | | NF45 |
| | | | | | (ILF2), mRNA. | | |
| 1097 | 1089 | 5700020 | NM_014155.2 | NM_014155 | BTB (POZ) domain | BTBD15 | MGC57431; |
| | | | | | containing 15 | | MGC60348; |
| | | | | | (BTBD15), mRNA. | | MGC88058; |
| | | | | | | | HSPC063; |
| | | | | | | | MGC26123 |
| 1098 | 1090 | 5700142 | NM_004462.3 | NM_004462 | farnesyl- | FDFT1 | SS; DGPT; SQS; |
| | | | | | diphosphatefarnesyltransferase | | ERG9 |
| | | | | | 1 (FDFT1), | | |
| | | | | | mRNA. | | |
| 1099 | 1091 | 5700220 | NM_004938.2 | NM_004938 | death-associated | DAPK1 | DAPK; |
| | | | | | protein kinase 1 | | DKFZp781I035 |
| | | | | | (DAPK1), mRNA. | | |
| 1100 | 1092 | 5700309 | NM_199336.1 | NM_199336 | fumarylacetoacetate | FAHD2B | DKFZp434N062 |
| | | | | | hydrolase domain | | |
| | | | | | containing 2B | | |
| | | | | | (FAHD2B), mRNA. | | |
| 1101 | 1093 | 5700672 | NM_006464.2 | NM_006464 | trans-golgi network | TGOLN2 | TGN51; MGC14722; |
| | | | | | protein 2 (TGOLN2), | | TGN48; TGN38; |
| | | | | | mRNA. | | TGN46; TTGN2 |
| 1102 | 1094 | 5700722 | NM_003310.1 | NM_003310 | tumor suppressing | TSSC1 | — |
| | | | | | subtransferable | | |
| | | | | | candidate 1 (TSSC1), | | |
| | | | | | mRNA. | | |
| 1103 | 1095 | 5720056 | NM_032286.2 | NM_032286 | mediator complex | MED10 | L6; MGC5309; NUT2; |
| | | | | | subunit 10 (MED10), | | TRG20 |
| | | | | | mRNA. | | |
| 1104 | 1096 | 5720180 | NM_001466.2 | NM_001466 | frizzled homolog 2 | FZD2 | — |
| | | | | | (Drosophila) (FZD2), | | |
| | | | | | mRNA. | | |
| 1105 | 1097 | 5720273 | NM_000999.2 | NM_000999 | ribosomal protein L38 | RPL38 | — |
| | | | | | (RPL38), mRNA. | | |
| 1106 | 1098 | 5720373 | NM_001012302.2 | NM_001012302 | transmembrane protein | TMEM16J | TP53I5; PIG5 |
| | | | | | 16J (TMEM16J), | | |
| | | | | | mRNA. | | |
| 1107 | 1099 | 5720398 | NM_174889.3 | NM_174889 | NADH dehydrogenase | NDUFAF2 | FLJ22398; mimitin; |
| | | | | | (ubiquinone) 1 alpha | | B17.2L; MMTN; |
| | | | | | subcomplex, assembly | | NDUFA12L |
| | | | | | factor 2 (NDUFAF2), | | |
| | | | | | mRNA. | | |
| 1108 | 1100 | 5810142 | NM_133467.2 | NM_133467 | Cbp/p300-interacting | CITED4 | — |
| | | | | | transactivator, with | | |
| | | | | | Glu/Asp-rich carboxy- | | |
| | | | | | terminal domain, 4 | | |
| | | | | | (CITED4), mRNA. | | |
| 1109 | 1101 | 5810367 | NM_018177.2 | NM_018177 | Nedd4 binding protein 2 | N4BP2 | B3BP; KIAA1413; |
| | | | | | (N4BP2), mRNA. | | FLJ10680 |
| 1110 | 1102 | 5810605 | NM_006835.2 | NM_006835 | cyclin I (CCNI), mRNA. | CCNI | CYC1; CYI |
| 1111 | 1103 | 5810612 | NM_001150.1 | NM_001150 | alanyl (membrane) | ANPEP | APN; gp150; CD13; |
| | | | | | aminopeptidase | | LAP1; PEPN |
| | | | | | (aminopeptidase N, | | |
| | | | | | aminopeptidase M, | | |
| | | | | | microsomal | | |
| | | | | | aminopeptidase, CD13, | | |
| | | | | | p150) (ANPEP), | | |
| | | | | | mRNA. | | |
| 1112 | 1104 | 5820242 | NM_152911.2 | NM_152911 | polyamine oxidase | PAOX | PAO; RP11- |
| | | | | | (exo-N4-amino) | | 122K13.11; |
| | | | | | (PAOX), transcript | | MGC45464; |
| | | | | | variant 1, mRNA. | | DKFZp434J245 |
| 1113 | 1105 | 5820598 | NM_005481.2 | NM_005481 | mediator complex | MED16 | THRAP5; TRAP95; |
| | | | | | subunit 16 (MED16), | | DRIP92; MED16 |
| | | | | | mRNA. | | |
| 1114 | 1106 | 5860215 | NM_016006.3 | NM_016006 | abhydrolase domain | ABHD5 | MGC8731; CGI58; |
| | | | | | containing 5 (ABHD5), | | CDS; NCIE2; IECN2 |
| | | | | | mRNA. | | |
| 1115 | 1107 | 5860253 | NM_017651.3 | NM_017651 | Abelson helper | AHI1 | FLJ14023; FLJ20069; |
| | | | | | integration site 1 | | DKFZp686J1653; |
| | | | | | (AHI1), mRNA. | | JBTS3; dJ71N10.1; |
| | | | | | | | ORF1; AHI-1 |
| 1116 | 1108 | 5870164 | NM_001045557.1 | NM_001045557 | Src-like-adaptor (SLA), | SLA | SLA1; SLAP |
| | | | | | transcript variant 2, | | |
| | | | | | mRNA. | | |
| 1117 | 1109 | 5870189 | NM_152542.2 | NM_152542 | protein phosphatase 1K | PPM1K | UG0882E07; PP2Cm; |
| | | | | | (PP2C domain | | DKFZp667B084; |
| | | | | | containing) (PPM1K), | | PTMP; |
| | | | | | mRNA. | | DKFZp761G058 |
| 1118 | 1110 | 5870192 | NM_001075099.1 | NM_001075099 | src kinase associated | SKAP1 | SCAP1; SKAP55 |
| | | | | | phosphoprotein 1 | | |
| | | | | | (SKAP1), transcript | | |
| | | | | | variant 2, mRNA. | | |
| 1119 | 1111 | 5870326 | NM_014580.3 | NM_014580 | solute carrier family 2, | SLC2A8 | GLUTX1; GLUT8 |
| | | | | | (facilitated glucose | | |
| | | | | | transporter) member 8 | | |
| | | | | | (SLC2A8), mRNA. | | |
| 1120 | 1112 | 5890349 | NM_017454.2 | NM_017454 | staufen, RNA binding | STAU1 | FLJ25010; STAU |
| | | | | | protein, homolog 1 | | |
| | | | | | (Drosophila) (STAU1), | | |
| | | | | | transcript variant T1, | | |
| | | | | | mRNA. | | |
| 1121 | 1113 | 5890414 | NM_001465.3 | NM_001465 | FYN binding protein | FYB | PRO0823; SLAP-130; |
| | | | | | (FYB-120/130) (FYB), | | ADAP |
| | | | | | transcript variant 1, | | |
| | | | | | mRNA. | | |
| 1122 | 1114 | 5890497 | NM_001077446.1 | NM_001077446 | tRNA splicing | TSEN34 | LENG5; SEN34; |
| | | | | | endonuclease 34 | | SEN34L |
| | | | | | homolog (S. cerevisiae) | | |
| | | | | | (TSEN34), transcript | | |
| | | | | | variant 2, mRNA. | | |
| 1123 | 1115 | 5890554 | NM_207406.2 | NM_207406 | coiled-coil domain | CCDC4 | MGC157807; |
| | | | | | containing 4 (CCDC4), | | FLJ35632; |
| | | | | | mRNA. | | MGC157808; |
| | | | | | | | FLJ43965 |
| 1124 | 1116 | 5890564 | NM_182703.3 | NM_182703 | ankyrin repeat and | ANKDD1A | MGC120306; |
| | | | | | death domain | | FLJ25870; |
| | | | | | containing 1A | | MGC120307; |
| | | | | | (ANKDD1A), mRNA. | | MGC120305 |
| 1125 | 1117 | 5890653 | NM_000076.1 | NM_000076 | cyclin-dependent | CDKN1C | BWCR; p57; BWS; |
| | | | | | kinase inhibitor 1C | | KIP2; WBS |
| | | | | | (p57, Kip2) (CDKN1C), | | |
| | | | | | mRNA. | | |
| 1126 | 1118 | 5890730 | XR_017804.1 | XR_017804 | PREDICTED: 40S | RPS26L | — |
| | | | | | ribosomal protein S26- | | |
| | | | | | like (RPS26L), misc | | |
| | | | | | RNA. | | |
| 1127 | 1119 | 5900379 | NM_003134.2 | NM_003134 | signal recognition | SRP14 | ALURBP; MGC14326 |
| | | | | | particle 14 kDa | | |
| | | | | | (homologous Alu RNA | | |
| | | | | | binding protein) | | |
| | | | | | (SRP14), mRNA. | | |
| 1128 | 1120 | 5900468 | NM_006037.3 | NM_006037 | histone deacetylase 4 | HDAC4 | HD4; HDAC-A; |
| | | | | | (HDAC4), mRNA. | | KIAA0288; HA6116; |
| | | | | | | | HDACA |
| 1129 | 1121 | 5900592 | NM_002406.2 | NM_002406 | mannosyl (alpha-1,3-)- | MGAT1 | GLYT1; GLCT1; |
| | | | | | glycoprotein beta-1,2- | | GNT-1; GLCNAC-TI; |
| | | | | | N- | | MGAT; GNT-I |
| | | | | | acetylglucosaminyltransferase | | |
| | | | | | (MGAT1), | | |
| | | | | | mRNA. | | |
| 1130 | 1122 | 5900692 | NM_015917.1 | NM_015917 | glutathione S- | GSTK1 | GST13 |
| | | | | | transferase kappa 1 | | |
| | | | | | (GSTK1), mRNA. | | |
| 1131 | 1123 | 5900725 | NM_007350.3 | NM_007350 | pleckstrin homology- | PHLDA1 | DT1P1B11; PHRIP; |
| | | | | | like domain, family A, | | TDAG51; |
| | | | | | member 1 (PHLDA1), | | MGC131738 |
| | | | | | mRNA. | | |
| 1132 | 1124 | 5900739 | NM_152230.3 | NM_152230 | inositol polyphosphate | IPMK | — |
| | | | | | multikinase (IPMK), | | |
| | | | | | mRNA. | | |
| 1133 | 1125 | 5910112 | NM_001012636.1 | NM_001012636 | interleukin 32 (IL32), | IL32 | TAIFb; IL-32alpha; |
| | | | | | transcript variant 7, | | TAIFa; TAIFd; IL- |
| | | | | | mRNA. | | 32beta; IL-32delta; |
| | | | | | | | TAIFc; TAIF; NK4; IL- |
| | | | | | | | 32gamma |
| 1134 | 1126 | 5910523 | NM_006769.2 | NM_006769 | LIM domain only 4 | LMO4 | — |
| | | | | | (LMO4), mRNA. | | |
| 1135 | 1127 | 5910632 | NM_003078.3 | NM_003078 | SWI/SNF related, | SMARCD3 | Rsc6p; BAF60C; |
| | | | | | matrix associated, actin | | CRACD3; |
| | | | | | dependent regulator of | | MGC111010 |
| | | | | | chromatin, subfamily d, | | |
| | | | | | member 3 | | |
| | | | | | (SMARCD3), transcript | | |
| | | | | | variant 2, mRNA. | | |
| 1136 | 1128 | 5960097 | NM_001126.2 | NM_001126 | adenylosuccinate | ADSS | ADEH; MGC20404 |
| | | | | | synthase (ADSS), | | |
| | | | | | mRNA. | | |
| 1137 | 1129 | 5960343 | NM_033405.2 | NM_033405 | peroxisomal | PRIC285 | MGC138228; PDIP-1; |
| | | | | | proliferator-activated | | PDIP1alpha; |
| | | | | | receptor A interacting | | KIAA1769; |
| | | | | | complex 285 | | PDIP1beta; |
| | | | | | (PRIC285), transcript | | MGC132634; |
| | | | | | variant 2, mRNA. | | FLJ00244 |
| 1138 | 1130 | 5960520 | NM_021819.2 | NM_021819 | lectin, mannose- | LMAN1L | ERGL; ERGIC-53L |
| | | | | | binding, 1 like | | |
| | | | | | (LMAN1L), mRNA. | | |
| 1139 | 1131 | 6020093 | NM_006513.2 | NM_006513 | seryl-tRNAsynthetase | SARS | SERRS; FLJ36399; |
| | | | | | (SARS), mRNA. | | SERS |
| 1140 | 1132 | 6020474 | NM_018445.4 | NM_018445 | selenoprotein S | SELS | SEPS1; ADO15; |
| | | | | | (SELS), transcript | | MGC2553; SBBI8; |
| | | | | | variant 2, mRNA. | | VIMP; AD-015; |
| | | | | | | | MGC104346 |
| 1141 | 1133 | 6020491 | NM_198220.1 | NM_198220 | small nuclear | SNRPB2 | MGC45309; |
| | | | | | ribonucleoprotein | | MGC24807 |
| | | | | | polypeptide B″ | | |
| | | | | | (SNRPB2), transcript | | |
| | | | | | variant 2, mRNA. | | |
| 1142 | 1134 | 6040064 | NM_001006115.2 | NM_001006115 | inositol hexaphosphate | IHPK1 | PiUS; IP6K1; |
| | | | | | kinase 1 (IHPK1), | | MGC9925 |
| | | | | | transcript variant 2, | | |
| | | | | | mRNA. | | |
| 1143 | 1135 | 6040670 | NR_001561.1 | NR_001561 | cytochrome c, somatic- | CYCSL1 | HS11; bA513I15.3; |
| | | | | | like 1 (CYCSL1) on | | HCP15 |
| | | | | | chromosome 6. | | |
| 1144 | 1136 | 6060148 | NM_014563.3 | NM_014563 | trafficking protein | TRAPPC2 | hYP38334; TRS20; |
| | | | | | particle complex 2 | | SEDT; SEDL; |
| | | | | | (TRAPPC2), transcript | | ZNF547L; MIP-2A |
| | | | | | variant 2, mRNA. | | |
| 1145 | 1137 | 6060201 | NM_006773.3 | NM_006773 | DEAD (Asp-Glu-Ala- | DDX18 | FLJ33908; MrDb |
| | | | | | Asp) box polypeptide | | |
| | | | | | 18 (DDX18), mRNA. | | |
| 1146 | 1138 | 6060377 | NM_016818.2 | NM_016818 | ATP-binding cassette, | ABCG1 | WHITE1; ABC8; |
| | | | | | sub-family G (WHITE), | | MGC34313 |
| | | | | | member 1 (ABCG1), | | |
| | | | | | transcript variant 2, | | |
| | | | | | mRNA. | | |
| 1147 | 1139 | 6060433 | NM_001006944.1 | NM_001006944 | ribosomal protein S6 | RPS6KA4 | RSK-B; MSK2 |
| | | | | | kinase, 90 kDa, | | |
| | | | | | polypeptide 4 | | |
| | | | | | (RPS6KA4), transcript | | |
| | | | | | variant 2, mRNA. | | |
| 1148 | 1140 | 6060468 | NM_002964.3 | NM_002964 | S100 calcium binding | S100A8 | CFAG; 60B8AG; |
| | | | | | protein A8 (S100A8), | | MRP8; CGLA; L1Ag; |
| | | | | | mRNA. | | MIF; MA387; CAGA; |
| | | | | | | | CP-10; NIF; P8 |
| 1149 | 1141 | 6060475 | NM_001204.5 | NM_001204 | bone morphogenetic | BMPR2 | BRK-3; BMPR3; |
| | | | | | protein receptor, type II | | BMPR-II; BMR2; |
| | | | | | (serine/threonine | | TRG10; PPH1; T-ALK |
| | | | | | kinase) (BMPR2), | | |
| | | | | | mRNA. | | |
| 1150 | 1142 | 6060685 | NM_153485.1 | NM_153485 | nucleoporin 155 kDa | NUP155 | N155; KIAA0791 |
| | | | | | (NUP155), transcript | | |
| | | | | | variant 1, mRNA. | | |
| 1151 | 1143 | 6060731 | NM_012325.1 | NM_012325 | microtubule-associated | MAPRE1 | EB1; MGC129946; |
| | | | | | protein, RP/EB family, | | MGC117374 |
| | | | | | member 1 (MAPRE1), | | |
| | | | | | mRNA. | | |
| 1152 | 1144 | 6100022 | NM_003517.2 | NM_003517 | histone cluster 2, H2ac | HIST2H2AC | H2AFQ; MGC74460; |
| | | | | | (HIST2H2AC), mRNA. | | H2A; H2A/q; H2A- |
| | | | | | | | GL101 |
| 1153 | 1145 | 6100364 | NM_022893.3 | NM_022893 | B-cell CLL/lymphoma | BCL11A | BCL11A-L; CTIP1; |
| | | | | | 11A (zinc finger protein) | | FLJ10173; EVI9; |
| | | | | | (BCL11A), transcript | | BCL11A-XL; |
| | | | | | variant 1, mRNA. | | HBFQTL5; BCL11A- |
| | | | | | | | S; FLJ34997; |
| | | | | | | | KIAA1809 |
| 1154 | 1146 | 6100482 | NM_001001396.1 | NM_001001396 | ATPase, Ca++ | ATP2B4 | DKFZp686M088; |
| | | | | | transporting, plasma | | PMCA4b; |
| | | | | | membrane 4 | | DKFZp686G08106; |
| | | | | | (ATP2B4), transcript | | PMCA4x; PMCA4; |
| | | | | | variant 1, mRNA. | | ATP2B2; MXRA1 |
| 1155 | 1147 | 6100630 | NM_032853.2 | NM_032853 | melanoma associated | MUM1 | MGC163315; |
| | | | | | antigen (mutated) 1 | | MGC131891; |
| | | | | | (MUM1), mRNA. | | HSPC211; FLJ22283; |
| | | | | | | | FLJ14868; MUM-1 |
| 1156 | 1148 | 6100703 | NM_002880.2 | NM_002880 | v-raf-1 murine leukemia | RAF1 | Raf-1; c-Raf; NS5; |
| | | | | | viral oncogene | | CRAF |
| | | | | | homolog 1 (RAF1), | | |
| | | | | | mRNA. | | |
| 1157 | 1149 | 6100768 | NM_014376.2 | NM_014376 | cytoplasmic FMR1 | CYFIP2 | PIR121 |
| | | | | | interacting protein 2 | | |
| | | | | | (CYFIP2), transcript | | |
| | | | | | variant 3, mRNA. | | |
| 1158 | 1150 | 6110037 | NM_006865.2 | NM_006865 | leukocyte | LILRA3 | HM31; LIR-4; e3; |
| | | | | | immunoglobulin-like | | CD85E; ILT6; HM43; |
| | | | | | receptor, subfamily A | | LIR4 |
| | | | | | (without TM domain), | | |
| | | | | | member 3 (LILRA3), | | |
| | | | | | mRNA. | | |
| 1159 | 1151 | 6110731 | NM_014216.3 | NM_014216 | inositol 1,3,4- | ITPK1 | ITRPK1 |
| | | | | | triphosphate 5/6 kinase | | |
| | | | | | (ITPK1), mRNA. | | |
| 1160 | 1152 | 6110736 | NM_003749.2 | NM_003749 | insulin receptor | IRS2 | — |
| | | | | | substrate 2 (IRS2), | | |
| | | | | | mRNA. | | |
| 1161 | 1153 | 6130019 | NM_001018677.1 | NM_001018677 | farnesyltransferase, | FNTA | FPTA; MGC99680; |
| | | | | | CAAX box, alpha | | PGGT1A |
| | | | | | (FNTA), transcript | | |
| | | | | | variant 3, mRNA. | | |
| 1162 | 1154 | 6130020 | NM_003666.2 | NM_003666 | basic leucine zipper | BLZF1 | JEM1; JEM-1; |
| | | | | | nuclear factor 1 (JEM- | | GOLGIN-45; |
| | | | | | 1) (BLZF1), mRNA. | | MGC22497; JEM-1s |
| 1163 | 1155 | 6130044 | NM_032765.2 | NM_032765 | tripartite motif- | TRIM52 | RNF102; MGC16175 |
| | | | | | containing 52 | | |
| | | | | | (TRIM52), mRNA. | | |
| 1164 | 1156 | 6130326 | NM_006113.4 | NM_006113 | vav 3 guanine | VAV3 | FLJ40431 |
| | | | | | nucleotide exchange | | |
| | | | | | factor (VAV3), transcript | | |
| | | | | | variant 1, mRNA. | | |
| 1165 | 1157 | 6130438 | NM_001031720.2 | NM_001031720 | glutathione S- | GSTCD | DKFZp686I10174; |
| | | | | | transferase, C-terminal | | FLJ13273 |
| | | | | | domain containing | | |
| | | | | | (GSTCD), transcript | | |
| | | | | | variant 1, mRNA. | | |
| 1166 | 1158 | 6180019 | NM_004763.3 | NM_004763 | integrin beta 1 binding | ITGB1BP1 | ICAP1B; ICAP- |
| | | | | | protein 1 (ITGB1BP1), | | 1alpha; ICAP1A; |
| | | | | | transcript variant 1, | | ICAP1; ICAP-1B; |
| | | | | | mRNA. | | DKFZp686K08158; |
| | | | | | | | ICAP-1A |
| 1167 | 1159 | 6180039 | NM_001005.3 | NM_001005 | ribosomal protein S3 | RPS3 | FLJ27450; FLJ26283; |
| | | | | | (RPS3), mRNA. | | MGC87870 |
| 1168 | 1160 | 6180088 | NM_145230.2 | NM_145230 | ATPase, H+ | ATP6V0E2 | ATP6V0E2L; C7orf32 |
| | | | | | transporting V0 subunit | | |
| | | | | | e2 (ATP6V0E2), | | |
| | | | | | transcript variant 1, | | |
| | | | | | mRNA. | | |
| 1169 | 1161 | 6180128 | NR_003089.1 | NR_003089 | OTU domain, ubiquitin | OTUB1 | OTU1; HSPC263; |
| | | | | | aldehyde binding 1 | | MGC4584; |
| | | | | | (OTUB1), transcript | | MGC111158; |
| | | | | | variant 2, transcribed | | FLJ20113; OTB1; |
| | | | | | RNA. | | FLJ40710 |
| 1170 | 1162 | 6180176 | NM_198970.1 | NM_198970 | amino-terminal | AES | AES-2; ESP1; GRG5; |
| | | | | | enhancer of split (AES), | | GRG; TLE5; AES-1 |
| | | | | | transcript variant 3, | | |
| | | | | | mRNA. | | |
| 1171 | 1163 | 6180187 | NM_153046.1 | NM_153046 | tudor domain | TDRD9 | FLJ36164; |
| | | | | | containing 9 (TDRD9), | | DKFZp434N0820; |
| | | | | | mRNA. | | C14orf75; |
| | | | | | | | MGC135025; HIG-1 |
| 1172 | 1164 | 6180408 | NM_015953.3 | NM_015953 | nitric oxide synthase | NOSIP | CGI-25 |
| | | | | | interacting protein | | |
| | | | | | (NOSIP), mRNA. | | |
| 1173 | 1165 | 6180538 | NM_001494.2 | NM_001494 | GDP dissociation | GDI2 | FLJ37352; FLJ16452; |
| | | | | | inhibitor 2 (GDI2), | | RABGDIB |
| | | | | | mRNA. | | |
| 1174 | 1166 | 6200019 | NM_002258.2 | NM_002258 | killer cell lectin-like | KLRB1 | hNKR-P1A; NKR-P1; |
| | | | | | receptor subfamily B, | | CLEC5B; CD161; |
| | | | | | member 1 (KLRB1), | | MGC138614; |
| | | | | | mRNA. | | NKRP1A; NKR-P1A; |
| | | | | | | | NKR |
| 1175 | 1167 | 6200053 | NM_005102.2 | NM_005102 | fasciculation and | FEZ2 | MGC117372; |
| | | | | | elongation protein zeta | | HUM3CL |
| | | | | | 2 (zygin II) (FEZ2), | | |
| | | | | | transcript variant 1, | | |
| | | | | | mRNA. | | |
| 1176 | 1168 | 6200086 | NM_002778.2 | NM_002778 | prosaposin (variant | PSAP | GLBA; SAP1; |
| | | | | | Gaucher disease and | | MGC110993; |
| | | | | | variant metachromatic | | FLJ00245 |
| | | | | | leukodystrophy) | | |
| | | | | | (PSAP), transcript | | |
| | | | | | variant 1, mRNA. | | |
| 1177 | 1169 | 6200315 | NM_001375.2 | NM_001375 | deoxyribonuclease II, | DNASE2 | DNASE2A; DNL; |
| | | | | | lysosomal (DNASE2), | | DNL2 |
| | | | | | mRNA. | | |
| 1178 | 1170 | 6200370 | NM_006865.2 | NM_006865 | leukocyte | LILRA3 | HM31; LIR-4; e3; |
| | | | | | immunoglobulin-like | | CD85E; ILT6; HM43; |
| | | | | | receptor, subfamily A | | LIR4 |
| | | | | | (without TM domain), | | |
| | | | | | member 3 (LILRA3), | | |
| | | | | | mRNA. | | |
| 1179 | 1171 | 6200577 | NM_182898.2 | NM_182898 | cAMP responsive | CREB5 | CRE-BPA |
| | | | | | element binding protein | | |
| | | | | | 5 (CREB5), transcript | | |
| | | | | | variant 1, mRNA. | | |
| 1180 | 1172 | 6200753 | NM_015055.2 | NM_015055 | SWAP-70 protein | SWAP70 | HSPC321; FLJ39540; |
| | | | | | (SWAP70), mRNA. | | KIAA0640; SWAP-70 |
| 1181 | 1173 | 6200768 | NM_000945.3 | NM_000945 | protein phosphatase 3 | PPP3R1 | CALNB1; CNB; CNB1 |
| | | | | | (formerly 2B), | | |
| | | | | | regulatory subunit B, | | |
| | | | | | alpha isoform | | |
| | | | | | (PPP3R1), mRNA. | | |
| 1182 | 1174 | 6220044 | NM_001418.3 | NM_001418 | eukaryotic translation | EIF4G2 | AAG1; NAT1; p97; |
| | | | | | initiation factor 4 | | FLJ41344; DAP5 |
| | | | | | gamma, 2 (EIF4G2), | | |
| | | | | | transcript variant 1, | | |
| | | | | | mRNA. | | |
| 1183 | 1175 | 6220086 | NM_001037494.1 | NM_001037494 | dynein, light chain, | DYNLL1 | PIN; DLC1; |
| | | | | | LC8-type 1 (DYNLL1), | | MGC126137; DLC8; |
| | | | | | transcript variant 1, | | DNCL1; MGC126138; |
| | | | | | mRNA. | | LC8a; hdlc1; LC8; |
| | | | | | | | DNCLC1 |
| 1184 | 1176 | 6220112 | NR_002569.1 | NR_002569 | small Cajal body- | SCARNA9 | Z32; mgU2-19/30 |
| | | | | | specific RNA 9 | | |
| | | | | | (SCARNA9) on | | |
| | | | | | chromosome 11. | | |
| 1185 | 1177 | 6220278 | NM_030927.1 | NM_030927 | tetraspanin 14 | TSPAN14 | MGC11352; |
| | | | | | (TSPAN14), mRNA. | | TM4SF14; DC- |
| | | | | | | | TM4F2 |
| 1186 | 1178 | 6220288 | NM_001198.2 | NM_001198 | PR domain containing | PRDM1 | MGC118922; |
| | | | | | 1, with ZNF domain | | BLIMP1; PRDI-BF1; |
| | | | | | (PRDM1), transcript | | MGC118925; |
| | | | | | variant 1, mRNA. | | MGC118924; |
| | | | | | | | MGC118923 |
| 1187 | 1179 | 6220300 | NM_004965.6 | NM_004965 | high-mobility group | HMGN1 | FLJ31471; |
| | | | | | nucleosome binding | | MGC104230; |
| | | | | | domain 1 (HMGN1), | | MGC117425; |
| | | | | | mRNA. | | FLJ27265; HMG14 |
| 1188 | 1180 | 6220372 | NM_182543.1 | NM_182543 | NOL1/NOP2/Sun | NSUN6 | 4933414E04Rik; |
| | | | | | domain family, member | | NOPD1; FLJ23743 |
| | | | | | 6 (NSUN6), mRNA. | | |
| 1189 | 1181 | 6220451 | NM_001151.2 | NM_001151 | solute carrier family 25 | SLC25A4 | PEO2; ANT1; PEO3; |
| | | | | | (mitochondrial carrier; | | T1; ANT |
| | | | | | adenine nucleotide | | |
| | | | | | translocator), member 4 | | |
| | | | | | (SLC25A4), nuclear | | |
| | | | | | gene encoding | | |
| | | | | | mitochondrial protein, | | |
| | | | | | mRNA. | | |
| 1190 | 1182 | 6250010 | NM_198281.2 | NM_198281 | GPRIN family member | GPRIN3 | GRIN3; FLJ42625 |
| | | | | | 3 (GPRIN3), mRNA. | | |
| 1191 | 1183 | 6250091 | NM_014943.3 | NM_014943 | zinc fingers and | ZHX2 | KIAA0854 |
| | | | | | homeoboxes 2 (ZHX2), | | |
| | | | | | mRNA. | | |
| 1192 | 1184 | 6250121 | NM_014043.2 | NM_014043 | chromatin modifying | CHMP2B | DKFZP564O123; |
| | | | | | protein 2B (CHMP2B), | | DMT1; CHMP2.5; |
| | | | | | mRNA. | | VPS2B; VPS2-2 |
| 1193 | 1185 | 6250382 | NM_015391.2 | NM_015391 | anaphase promoting | ANAPC13 | SWM1; APC13; |
| | | | | | complex subunit 13 | | DKFZP566D193m; |
| | | | | | (ANAPC13), mRNA. | | DKFZP566D193 |
| 1194 | 1186 | 6250685 | NM_002576.3 | NM_002576 | p21/Cdc42/Rac1- | PAK1 | MGC130001; |
| | | | | | activated kinase 1 | | MGC130000; |
| | | | | | (STE20 homolog, | | PAKalpha |
| | | | | | yeast) (PAK1), mRNA. | | |
| 1195 | 1188 | 6270022 | NM_002110.2 | NM_002110 | hemopoietic cell kinase | HCK | JTK9 |
| | | | | | (HCK), mRNA. | | |
| 1196 | 1189 | 6270114 | NM_172313.1 | NM_172313 | colony stimulating | CSF3R | GCSFR; CD114 |
| | | | | | factor 3 receptor | | |
| | | | | | (granulocyte) (CSF3R), | | |
| | | | | | transcript variant 4, | | |
| | | | | | mRNA. | | |
| 1197 | 1190 | 6270717 | NM_003093.1 | NM_003093 | small nuclear | SNRPC | FLJ20302 |
| | | | | | ribonucleoprotein | | |
| | | | | | polypeptide C | | |
| | | | | | (SNRPC), mRNA. | | |
| 1198 | 1191 | 6280086 | NM_006498.2 | NM_006498 | lectin, galactoside- | LGALS2 | HL14; MGC75071 |
| | | | | | binding, soluble, 2 | | |
| | | | | | (LGALS2), mRNA. | | |
| 1199 | 1192 | 6280092 | NM_024103.2 | NM_024103 | solute carrier family 25 | SLC25A23 | MGC2615; MCSC2; |
| | | | | | (mitochondrial carrier; | | SCaMC-3; APC2 |
| | | | | | phosphate carrier), | | |
| | | | | | member 23 | | |
| | | | | | (SLC25A23), nuclear | | |
| | | | | | gene encoding | | |
| | | | | | mitochondrial protein, | | |
| | | | | | mRNA. | | |
| 1200 | 1193 | 6280184 | NM_020379.2 | NM_020379 | mannosidase, alpha, | MAN1C1 | MAN1A3; pp6318; |
| | | | | | class 1C, member 1 | | MAN1C; HMIC |
| | | | | | (MAN1C1), mRNA. | | |
| 1201 | 1194 | 6280332 | NM_022059.1 | NM_022059 | chemokine (C—X—C | CXCL16 | SRPSOX; CXCLG16; |
| | | | | | motif) ligand 16 | | SR-PSOX |
| | | | | | (CXCL16), mRNA. | | |
| 1202 | 1195 | 6280482 | NM_016101.3 | NM_016101 | nuclear import 7 | NIP7 | HSPC031; FLJ10296; |
| | | | | | homolog (S. cerevisiae) | | CGI-37; KD93 |
| | | | | | (NIP7), mRNA. | | |
| 1203 | 1198 | 6290132 | NM_007278.1 | NM_007278 | GABA(A) receptor- | GABARAP | MM46; MGC120155; |
| | | | | | associated protein | | FLJ25768; |
| | | | | | (GABARAP), mRNA. | | MGC120154 |
| 1204 | 1199 | 6290187 | NM_001032279.1 | NM_001032279 | RCE1 homolog, prenyl | RCE1 | FACE2; RCE1B; |
| | | | | | protein peptidase (S. cerevisiae) | | RCE1A |
| | | | | | (RCE1), | | |
| | | | | | transcript variant 2, | | |
| | | | | | mRNA. | | |
| 1205 | 1200 | 6290400 | NM_000734.2 | NM_000734 | CD247 molecule | CD247 | CD3Q; CD3H; TCRZ; |
| | | | | | (CD247), transcript | | CD3Z; CD3-ZETA |
| | | | | | variant 2, mRNA. | | |
| 1206 | 1201 | 6330025 | NM_058219.2 | NM_058219 | exosome component 6 | EXOSC6 | hMtr3p; MTR3; p11; |
| | | | | | (EXOSC6), mRNA. | | EAP4; Mtr3p |
| 1207 | 1202 | 6330068 | NM_000528.2 | NM_000528 | mannosidase, alpha, | MAN2B1 | LAMAN; MANB |
| | | | | | class 2B, member 1 | | |
| | | | | | (MAN2B1), mRNA. | | |
| 1208 | 1203 | 6330176 | NM_018095.3 | NM_018095 | kelch repeat and BTB | KBTBD4 | FLJ10450; BKLHD4; |
| | | | | | (POZ) domain | | HSPC252 |
| | | | | | containing 4 (KBTBD4), | | |
| | | | | | transcript variant 1, | | |
| | | | | | mRNA. | | |
| 1209 | 1204 | 6330196 | NM_002371.2 | NM_002371 | mal, T-cell | MAL | — |
| | | | | | differentiation protein | | |
| | | | | | (MAL), transcript variant | | |
| | | | | | a, mRNA. | | |
| 1210 | 1205 | 6330224 | NM_139247.2 | NM_139247 | adenylatecyclase 4 | ADCY4 | — |
| | | | | | (ADCY4), mRNA. | | |
| 1211 | 1206 | 6330373 | NM_001959.2 | NM_001959 | eukaryotic translation | EEF1B2 | EEF1B; EF1B; |
| | | | | | elongation factor 1 beta | | EEF1B1 |
| | | | | | 2 (EEF1B2), transcript | | |
| | | | | | variant 1, mRNA. | | |
| 1212 | 1207 | 6330484 | NM_004079.3 | NM_004079 | cathepsin S (CTSS), | CTSS | MGC3886 |
| | | | | | mRNA. | | |
| 1213 | 1208 | 6330491 | NM_015979.2 | NM_015979 | mediator complex | MED23 | MED23; |
| | | | | | subunit 23 (MED23), | | DKFZp434H0117; |
| | | | | | transcript variant 2, | | CRSP3; DRIP130; |
| | | | | | mRNA. | | CRSP133; CRSP130; |
| | | | | | | | SUR2 |
| 1214 | 1209 | 6350131 | NM_001907.1 | NM_001907 | chymotrypsin-like | CTRL | CTRL1; MGC70821 |
| | | | | | (CTRL), mRNA. | | |
| 1215 | 1210 | 6370369 | NM_001040021.1 | NM_001040021 | CD14 molecule | CD14 | — |
| | | | | | (CD14), transcript | | |
| | | | | | variant 2, mRNA. | | |
| 1216 | 1211 | 6370468 | NM_001031827.1 | NM_001031827 | bolA homolog 2 (E. coli) | BOLA2 | BOLA2A; My016 |
| | | | | | (BOLA2), mRNA. | | |
| 1217 | 1212 | 6370593 | NM_138707.1 | NM_138707 | B-cell CLL/lymphoma | BCL7B | — |
| | | | | | 7B (BCL7B), transcript | | |
| | | | | | variant 2, mRNA. | | |
| 1218 | 1213 | 6370661 | NM_004069.3 | NM_004069 | adaptor-related protein | AP2S1 | AP17; CLAPS2; |
| | | | | | complex 2, sigma 1 | | AP17-DELTA |
| | | | | | subunit (AP2S1), | | |
| | | | | | transcript variant AP17, | | |
| | | | | | mRNA. | | |
| 1219 | 1214 | 6380093 | NM_001031696.1 | NM_001031696 | phospholipase D family, | PLD3 | HU-K4 |
| | | | | | member 3 (PLD3), | | |
| | | | | | transcript variant 1, | | |
| | | | | | mRNA. | | |
| 1220 | 1215 | 6380110 | NM_022006.1 | NM_022006 | FXYD domain | FXYD7 | FLJ25096 |
| | | | | | containing ion transport | | |
| | | | | | regulator 7 (FXYD7), | | |
| | | | | | mRNA. | | |
| 1221 | 1216 | 6380161 | NM_000061.1 | NM_000061 | Brutonagammaglobulin | BTK | MGC126261; ATK; |
| | | | | | emia tyrosine kinase | | XLA; IMD1; AT; BPK; |
| | | | | | (BTK), mRNA. | | AGMX1; PSCTK1; |
| | | | | | | | MGC126262 |
| 1222 | 1217 | 6380445 | NM_006925.3 | NM_006925 | splicing factor, | SFRS5 | SRP40; HRS |
| | | | | | arginine/serine-rich 5 | | |
| | | | | | (SFRS5), transcript | | |
| | | | | | variant 2, mRNA. | | |
| 1223 | 1218 | 6380484 | NM_001002235.1 | NM_001002235 | serpin peptidase | SERPINA1 | PI1; MGC23330; |
| | | | | | inhibitor, clade A | | PRO2275; A1AT; |
| | | | | | (alpha-1 antiproteinase, | | AAT; MGC9222; PI; |
| | | | | | antitrypsin), member 1 | | A1A |
| | | | | | (SERPINA1), transcript | | |
| | | | | | variant 3, mRNA. | | |
| 1224 | 1219 | 6400243 | NM_001003407.1 | NM_001003407 | actin binding LIM | ABLIM1 | KIAA0059; FLJ14564; |
| | | | | | protein 1 (ABLIM1), | | MGC1224; LIMATIN; |
| | | | | | transcript variant 2, | | LIMAB1; |
| | | | | | mRNA. | | DKFZp781D0148; |
| | | | | | | | ABLIM |
| 1225 | 1221 | 6420040 | NM_144607.3 | NM_144607 | cytochrome b5 domain | CYB5D1 | FLJ32499 |
| | | | | | containing 1 (CYB5D1), | | |
| | | | | | mRNA. | | |
| 1226 | 1222 | 6420392 | NM_001014446.1 | NM_001014446 | OCIA domain | OCIAD2 | DKFZp686C03164; |
| | | | | | containing 2 (OCIAD2), | | MGC45416 |
| | | | | | transcript variant 1, | | |
| | | | | | mRNA. | | |
| 1227 | 1223 | 6420403 | NM_001013254.1 | NM_001013254 | lymphocyte-specific | LSP1 | WP34; pp52 |
| | | | | | protein 1 (LSP1), | | |
| | | | | | transcript variant 3, | | |
| | | | | | mRNA. | | |
| 1228 | 1224 | 6420746 | NM_002010.1 | NM_002010 | fibroblast growth factor | FGF9 | MGC119914; GAF; |
| | | | | | 9 (glia-activating factor) | | MGC119915; HBFG-9 |
| | | | | | (FGF9), mRNA. | | |
| 1229 | 1225 | 6450093 | NM_000952.3 | NM_000952 | platelet-activating factor | PTAFR | PAFR |
| | | | | | receptor (PTAFR), | | |
| | | | | | mRNA. | | |
| 1230 | 1226 | 6450129 | NM_004867.3 | NM_004867 | integral membrane | ITM2A | E25A; BRICD2A |
| | | | | | protein 2A (ITM2A), | | |
| | | | | | mRNA. | | |
| 1231 | 1227 | 6450139 | NR_002201.1 | NR_002201 | ferritin, heavy | FTHL3 | — |
| | | | | | polypeptide-like 3 | | |
| | | | | | (FTHL3) on | | |
| | | | | | chromosome 2. | | |
| 1232 | 1228 | 6450475 | NM_024640.3 | NM_024640 | yrdC domain containing | YRDC | FLJ23476; IRIP; |
| | | | | | (E. coli) (YRDC), | | FLJ26165; RP11- |
| | | | | | mRNA. | | 109P14.4; SUA5; |
| | | | | | | | DRIP3 |
| 1233 | 1229 | 6450538 | NM_006706.3 | NM_006706 | transcription elongation | TCERG1 | MGC133200; TAF2S; |
| | | | | | regulator 1 (TCERG1), | | CA150 |
| | | | | | transcript variant 1, | | |
| | | | | | mRNA. | | |
| 1234 | 1230 | 6450661 | NM_032250.1 | NM_032250 | ankyrin repeat domain | ANKRD20A1 | ANKRD20A; |
| | | | | | 20 family, member A1 | | DKFZp434A171 |
| | | | | | (ANKRD20A1), mRNA. | | |
| 1235 | 1231 | 6480059 | NM_001613.1 | NM_001613 | actin, alpha 2, smooth | ACTA2 | ACTSA |
| | | | | | muscle, aorta (ACTA2), | | |
| | | | | | mRNA. | | |
| 1236 | 1232 | 6480196 | NM_018070.3 | NM_018070 | single stranded DNA | SSBP3 | CSDP; FLJ10355; |
| | | | | | binding protein 3 | | SSDP1; SSDP |
| | | | | | (SSBP3), transcript | | |
| | | | | | variant 2, mRNA. | | |
| 1237 | 1233 | 6480349 | NM_012446.2 | NM_012446 | single-stranded DNA | SSBP2 | HSPC116; |
| | | | | | binding protein 2 | | DKFZp686F03273 |
| | | | | | (SSBP2), mRNA. | | |
| 1238 | 1234 | 6480360 | NM_138636.2 | NM_138636 | toll-like receptor 8 | TLR8 | MGC119600; |
| | | | | | (TLR8), transcript | | MGC119599 |
| | | | | | variant 2, mRNA. | | |
| 1239 | 1235 | 6510026 | NM_016584.2 | NM_016584 | interleukin 23, alpha | IL23A | IL-23A; IL23P19; |
| | | | | | subunit p19 (IL23A), | | MGC79388; SGRF; |
| | | | | | mRNA. | | P19; IL-23 |
| 1240 | 1236 | 6510279 | NM_001047434.1 | NM_001047434 | DPH3, KTI11 homolog | DPH3 | MGC20197; DPH3A; |
| | | | | | (S. cerevisiae) (DPH3), | | DELGIP1; ZCSL2; |
| | | | | | transcript variant 2, | | DELGIP; KTI11; |
| | | | | | mRNA. | | DESR1 |
| 1241 | 1237 | 6510367 | NM_002228.3 | NM_002228 | jun oncogene (JUN), | JUN | AP1; c-Jun |
| | | | | | mRNA. | | |
| 1242 | 1238 | 6510553 | NM_005224.2 | NM_005224 | AT rich interactive | ARID3A | E2FBP1; BRIGHT; |
| | | | | | domain 3A (BRIGHT- | | DRIL3; DRIL1 |
| | | | | | like) (ARID3A), mRNA. | | |
| 1243 | 1239 | 6510603 | NM_000485.2 | NM_000485 | adenine | APRT | MGC125857; AMP; |
| | | | | | phosphoribosyltransferase | | MGC125856; |
| | | | | | (APRT), transcript | | DKFZp686D13177; |
| | | | | | variant 1, mRNA. | | MGC129961 |
| 1244 | 1240 | 6520180 | NM_003853.2 | NM_003853 | interleukin 18 receptor | IL18RAP | MGC120590; |
| | | | | | accessory protein | | MGC120589; |
| | | | | | (IL18RAP), mRNA. | | CDw218b; CD218b; |
| | | | | | | | ACPL |
| 1245 | 1241 | 6520192 | NM_001039673.1 | NM_001039673 | Yip1 interacting factor | YIF1B | FinGER8 |
| | | | | | homolog B (S. cerevisiae) | | |
| | | | | | (YIF1B), | | |
| | | | | | transcript variant 4, | | |
| | | | | | mRNA. | | |
| 1246 | 1242 | 6520280 | NM_023926.3 | NM_023926 | zinc finger and SCAN | ZSCAN18 | ZNF447; |
| | | | | | domain containing 18 | | DKFZp586B1122; |
| | | | | | (ZSCAN18), mRNA. | | FLJ44152; MGC2427; |
| | | | | | | | MGC8682; |
| | | | | | | | MGC4074; FLJ12895 |
| 1247 | 1243 | 6520576 | NM_212552.2 | NM_212552 | bolA homolog 3 (E. coli) | BOLA3 | — |
| | | | | | (BOLA3), transcript | | |
| | | | | | variant 1, mRNA. | | |
| 1248 | 1244 | 6520630 | NM_181504.2 | NM_181504 | phosphoinositide-3- | PIK3R1 | p85; p85-ALPHA; |
| | | | | | kinase, regulatory | | GRB1 |
| | | | | | subunit 1 (alpha) | | |
| | | | | | (PIK3R1), transcript | | |
| | | | | | variant 2, mRNA. | | |
| 1249 | 1245 | 6520646 | NM_003870.3 | NM_003870 | IQ motif containing | IQGAP1 | HUMORFA01; SAR1; |
| | | | | | GTPase activating | | KIAA0051; p195 |
| | | | | | protein 1 (IQGAP1), | | |
| | | | | | mRNA. | | |
| 1250 | 1246 | 6550064 | NM_181738.1 | NM_181738 | peroxiredoxin 2 | PRDX2 | TDPX1; MGC4104; |
| | | | | | (PRDX2), nuclear gene | | TSA; PRP; PRX2; |
| | | | | | encoding mitochondrial | | NKEFB; PRXII |
| | | | | | protein, transcript | | |
| | | | | | variant 3, mRNA. | | |
| 1251 | 1247 | 6550673 | NM_001152.1 | NM_001152 | solute carrier family 25 | SLC25A5 | T3; 2F1; ANT2; T2 |
| | | | | | (mitochondrial carrier; | | |
| | | | | | adenine nucleotide | | |
| | | | | | translocator), member 5 | | |
| | | | | | (SLC25A5), mRNA. | | |
| 1252 | 1248 | 6550754 | NM_016337.2 | NM_016337 | Enah/Vasp-like (EVL), | EVL | RNB6 |
| | | | | | mRNA. | | |
| 1253 | 1249 | 6560136 | NM_001042442.1 | NM_001042442 | calpastatin (CAST), | CAST | MGC9402; BS-17 |
| | | | | | transcript variant 8, | | |
| | | | | | mRNA. | | |
| 1254 | 1250 | 6560180 | NM_001003696.1 | NM_001003696 | ATP synthase, H+ | ATP5J | ATP5A CF6; F6; |
| | | | | | transporting, | | ATPM; ATP5 |
| | | | | | mitochondrial F0 | | |
| | | | | | complex, subunit F6 | | |
| | | | | | (ATP5J), nuclear gene | | |
| | | | | | encoding mitochondrial | | |
| | | | | | protein, transcript | | |
| | | | | | variant 3, mRNA. | | |
| 1255 | 1251 | 6560300 | NM_001860.2 | NM_001860 | solute carrier family 31 | SLC31A2 | hCTR2; CTR2; |
| | | | | | (copper transporters), | | COPT2 |
| | | | | | member 2 (SLC31A2), | | |
| | | | | | mRNA. | | |
| 1256 | 1252 | 6560451 | NM_138394.2 | NM_138394 | heterogeneous nuclear | HNRPLL | SRRF |
| | | | | | ribonucleoprotein L-like | | |
| | | | | | (HNRPLL), mRNA. | | |
| 1257 | 1253 | 6580041 | NM_006433.2 | NM_006433 | granulysin (GNLY), | GNLY | D2S69E; 519; LAG2; |
| | | | | | transcript variant | | LAG-2; TLA519; |
| | | | | | NKG5, mRNA. | | NKG5 |
| 1258 | 1254 | 6580059 | NM_003355.2 | NM_003355 | uncoupling protein 2 | UCP2 | SLC25A8; UCPH |
| | | | | | (mitochondrial, proton | | |
| | | | | | carrier) (UCP2), nuclear | | |
| | | | | | gene encoding | | |
| | | | | | mitochondrial protein, | | |
| | | | | | mRNA. | | |
| 1259 | 1255 | 6580437 | NM_012139.2 | NM_012139 | secretion regulating | SERGEF | Gnefr; DELGEF |
| | | | | | guanine nucleotide | | |
| | | | | | exchange factor | | |
| | | | | | (SERGEF), mRNA. | | |
| 1260 | 1257 | 6580717 | NM_032265.1 | NM_032265 | zinc finger, MYND-type | ZMYND15 | DKFZp434N127 |
| | | | | | containing 15 | | |
| | | | | | (ZMYND15), mRNA. | | |
| 1261 | 1258 | 6580750 | NM_002621.1 | NM_002621 | complement factor | CFP | PFC; PROPERDIN; |
| | | | | | properdin (CFP), | | BFD; PFD |
| | | | | | mRNA. | | |
| 1262 | 1259 | 6590201 | NM_001183.4 | NM_001183 | ATPase, H+ | ATP6AP1 | XAP-3; CF2; 16A; |
| | | | | | transporting, lysosomal | | ATP6IP1; ATP6S1; |
| | | | | | accessory protein 1 | | Ac45; MGC129781; |
| | | | | | (ATP6AP1), mRNA. | | XAP3; VATPS1 |
| 1263 | 1260 | 6590441 | NM_004238.1 | NM_004238 | thyroid hormone | TRIP12 | KIAA0045; |
| | | | | | receptor interactor 12 | | MGC138850; |
| | | | | | (TRIP12), mRNA. | | MGC138849 |
| 1264 | 1261 | 6590722 | NM_016374.5 | NM_016374 | AT rich interactive | ARID4B | BCM; RBP1L1; |
| | | | | | domain 4B (RBP1-like) | | MGC163290; |
| | | | | | (ARID4B), transcript | | BRCAA1; SAP180; |
| | | | | | variant 1, mRNA. | | RBBP1L1; |
| | | | | | | | DKFZp313M2420 |
| 1265 | 1262 | 6620072 | NM_004930.1 | NM_004930 | capping protein (actin | CAPZB | CAPB; MGC104401; |
| | | | | | filament) muscle Z-line, | | MGC129749; |
| | | | | | beta (CAPZB), mRNA. | | MGC129750; |
| | | | | | | | CAPPB; CAPZ |
| 1266 | 1263 | 6620170 | NM_000517.3 | NM_000517 | hemoglobin, alpha 2 | HBA2 | HBA1 |
| | | | | | (HBA2), mRNA. | | |
| 1267 | 1264 | 6620201 | NM_017644.3 | NM_017644 | kelch-like 24 | KLHL24 | FLJ25796; KRIP6; |
| | | | | | (Drosophila) (KLHL24), | | DRE1 |
| | | | | | mRNA. | | |
| 1268 | 1265 | 6620315 | NM_182476.1 | NM_182476 | coenzyme Q6 | COQ6 | CGI-10 |
| | | | | | homolog, | | |
| | | | | | monooxygenase (S. cerevisiae) | | |
| | | | | | (COQ6), | | |
| | | | | | transcript variant 1, | | |
| | | | | | mRNA. | | |
| 1269 | 1266 | 6620474 | NM_138924.1 | NM_138924 | guanidinoacetate N- | GAMT | TP53I2; PIG2 |
| | | | | | methyltransferase | | |
| | | | | | (GAMT), transcript | | |
| | | | | | variant 2, mRNA. | | |
| 1270 | 1267 | 6650161 | NM_006572.3 | NM_006572 | guanine nucleotide | GNA13 | MGC46138; G13 |
| | | | | | binding protein (G | | |
| | | | | | protein), alpha 13 | | |
| | | | | | (GNA13), mRNA. | | |
| 1271 | 1268 | 6650242 | NM_021034.2 | NM_021034 | interferon induced | IFITM3 | 1-8U; IP15 |
| | | | | | transmembrane protein | | |
| | | | | | 3 (1-8U) (IFITM3), | | |
| | | | | | mRNA. | | |
| 1272 | 1269 | 6650639 | NM_199245.1 | NM_199245 | vesicle-associated | VAMP1 | SYB1; VAMP-1; |
| | | | | | membrane protein 1 | | DKFZp686H12131 |
| | | | | | (synaptobrevin 1) | | |
| | | | | | (VAMP1), transcript | | |
| | | | | | variant 2, mRNA. | | |
| 1273 | 1270 | 6650746 | NM_001040456.1 | NM_001040456 | rhomboid domain | RHBDD2 | NPD007; RHBDL7 |
| | | | | | containing 2 | | |
| | | | | | (RHBDD2), transcript | | |
| | | | | | variant 1, mRNA. | | |
| 1274 | 1271 | 6660092 | NM_001745.2 | NM_001745 | calcium modulating | CAMLG | CAML; MGC163197 |
| | | | | | ligand (CAMLG), | | |
| | | | | | mRNA. | | |
| 1275 | 1272 | 6660343 | NM_006328.2 | NM_006328 | RNA binding motif | RBM14 | SYTIP1; COAA; SIP; |
| | | | | | protein 14 (RBM14), | | DKFZp779J0927 |
| | | | | | mRNA. | | |
| 1276 | 1273 | 6660368 | NM_001042600.1 | NM_001042600 | mitogen-activated | MAP4K1 | HPK1 |
| | | | | | protein kinase | | |
| | | | | | kinasekinasekinase 1 | | |
| | | | | | (MAP4K1), transcript | | |
| | | | | | variant 1, mRNA. | | |
| 1277 | 1274 | 6660398 | NM_002003.2 | NM_002003 | ficolin | FCN1 | FCNM |
| | | | | | (collagen/fibrinogen | | |
| | | | | | domain containing) 1 | | |
| | | | | | (FCN1), mRNA. | | |
| 1278 | 1275 | 6660411 | NM_018466.3 | NM_018466 | asparagine-linked | ALG13 | YGL047W; GLT28D1; |
| | | | | | glycosylation 13 | | MDS031; CXorf45 |
| | | | | | homolog (S. cerevisiae) | | |
| | | | | | (ALG13), mRNA. | | |
| 1279 | 1276 | 6660475 | NM_001042729.1 | NM_001042729 | Gardner-Rasheed | FGR | p58c-fgr, SRC2; c-fgr; |
| | | | | | feline sarcoma viral (v- | | FLJ43153; |
| | | | | | fgr) oncogene homolog | | MGC75096; c-src2; |
| | | | | | (FGR), transcript | | p55c-fgr |
| | | | | | variant 3, mRNA. | | |
| 1280 | 1277 | 6660673 | NM_016628.2 | NM_016628 | WW domain containing | WAC | bA48B24; |
| | | | | | adaptor with coiled-coil | | MGC10753; BM-016; |
| | | | | | (WAC), transcript | | Wwp4; PRO1741; |
| | | | | | variant 1, mRNA. | | bA48B24.1 |
| 1281 | 1278 | 6660768 | NM_182972.2 | NM_182972 | interferon regulatory | IRF2BP2 | MGC72189 |
| | | | | | factor 2 binding protein | | |
| | | | | | 2 (IRF2BP2), transcript | | |
| | | | | | variant 1, mRNA. | | |
| 1282 | 1279 | 6760273 | NM_020926.2 | NM_020926 | BCL6 co-repressor | BCOR | MGC131961; |
| | | | | | (BCOR), transcript | | KIAA1575; FLJ20285; |
| | | | | | variant 2, mRNA. | | MGC71031; |
| | | | | | | | MCOPS2; FLJ38041; |
| | | | | | | | MAA2; ANOP2 |
| 1283 | 1280 | 6760315 | NM_006768.2 | NM_006768 | BRCA1 associated | BRAP | RNF52; IMP; BRAP2 |
| | | | | | protein (BRAP), mRNA. | | |
| 1284 | 1282 | 6770377 | NM_022918.2 | NM_022918 | transmembrane protein | TMEM135 | FLJ22104; |
| | | | | | 135 (TMEM135), | | DKFZp686I1974 |
| | | | | | mRNA. | | |
| 1285 | 1283 | 6770474 | NM_030622.6 | NM_030622 | cytochrome P450, | CYP2S1 | — |
| | | | | | family 2, subfamily S, | | |
| | | | | | polypeptide 1 | | |
| | | | | | (CYP2S1), mRNA. | | |
| 1286 | 1284 | 6770754 | NM_031454.1 | NM_031454 | selenoprotein O | SELO | MGC131879 |
| | | | | | (SELO), mRNA. | | |
| 1287 | 1285 | 6840072 | NM_000314.4 | NM_000314 | phosphatase and | PTEN | MMAC1; MHAM; |
| | | | | | tensin homolog | | TEP1; BZS; PTEN1; |
| | | | | | (mutated in multiple | | MGC11227 |
| | | | | | advanced cancers 1) | | |
| | | | | | (PTEN), mRNA. | | |
| 1288 | 1286 | 6840184 | NM_002087.2 | NM_002087 | granulin (GRN), mRNA. | GRN | PEPI; PGRN; |
| | | | | | | | PCDGF; GEP; GP88 |
| 1289 | 1287 | 6840246 | NM_000308.2 | NM_000308 | cathepsin A (CTSA), | CTSA | NGBE; PPCA; GSL; |
| | | | | | mRNA. | | PPGB; GLB2 |
| 1290 | 1288 | 6840408 | NM_004271.3 | NM_004271 | lymphocyte antigen 86 | LY86 | dJ80N2.1; MMD-1; |
| | | | | | (LY86), mRNA. | | RP1-80N2.1; MD-1 |
| 1291 | 1289 | 6840593 | NM_031905.2 | NM_031905 | armadillo repeat | ARMC10 | SVH; MGC3195; |
| | | | | | containing 10 | | PNAS-112 |
| | | | | | (ARMC10), mRNA. | | |
| 1292 | 1290 | 6860095 | NM_205835.2 | NM_205835 | lipolysis stimulated | LSR | MGC48312; LISCH7; |
| | | | | | lipoprotein receptor | | MGC48503; |
| | | | | | (LSR), transcript variant | | MGC10659 |
| | | | | | 3, mRNA. | | |
| 1293 | 1291 | 6860202 | NM_001064.1 | NM_001064 | transketolase | TKT | TKT1; FLJ34765 |
| | | | | | (Wernicke-Korsakoff | | |
| | | | | | syndrome) (TKT), | | |
| | | | | | mRNA. | | |
| 1294 | 1292 | 6860452 | NM_002598.2 | NM_002598 | programmed cell death | PDCD2 | RP8; MGC12347; |
| | | | | | 2 (PDCD2), transcript | | ZMYND7 |
| | | | | | variant 1, mRNA. | | |
| 1295 | 1293 | 6860553 | NM_003136.2 | NM_003136 | signal recognition | SRP54 | — |
| | | | | | particle 54 kDa | | |
| | | | | | (SRP54), mRNA. | | |
| 1296 | 1294 | 6860678 | NR_003249.1 | NR_003249 | heterogeneous nuclear | HNRPDL | JKTBP2; JKTBP; |
| | | | | | ribonucleoprotein D-like | | laAUF1; HNRNP |
| | | | | | (HNRPDL), transcript | | |
| | | | | | variant 3, transcribed | | |
| | | | | | RNA. | | |
| 1297 | 1295 | 6900025 | NM_004805.2 | NM_004805 | polymerase (RNA) II | POLR2D | HSRPB4; RBP4; |
| | | | | | (DNA directed) | | HSRBP4 |
| | | | | | polypeptide D | | |
| | | | | | (POLR2D), mRNA. | | |
| 1298 | 1296 | 6900398 | NM_002004.2 | NM_002004 | farnesyldiphosphate | FDPS | FPS |
| | | | | | synthase (farnesyl | | |
| | | | | | pyrophosphate | | |
| | | | | | synthetase, | | |
| | | | | | dimethylallyltranstransferase, | | |
| | | | | | geranyltranstransferase) | | |
| | | | | | (FDPS), mRNA. | | |
| 1299 | 1297 | 6900593 | NM_001004491.1 | NM_001004491 | olfactory receptor, | OR2AK2 | OR1-47; OR2AK1P |
| | | | | | family 2, subfamily AK, | | |
| | | | | | member 2 (OR2AK2), | | |
| | | | | | mRNA. | | |
| 1300 | 1298 | 6900612 | NM_001011546.1 | NM_001011546 | destrin (actin | DSTN | ACTDP; bA462D18.2; |
| | | | | | depolymerizing factor) | | ADF |
| | | | | | (DSTN), transcript | | |
| | | | | | variant 2, mRNA. | | |
| 1301 | 1299 | 6900630 | NM_001684.3 | NM_001684 | ATPase, Ca++ | ATP2B4 | DKFZp686M088; |
| | | | | | transporting, plasma | | PMCA4b; |
| | | | | | membrane 4 | | DKFZp686G08106; |
| | | | | | (ATP2B4), transcript | | PMCA4x; PMCA4; |
| | | | | | variant 2, mRNA. | | ATP2B2; MXRA1 |
| 1302 | 1300 | 6900674 | NM_017664.2 | NM_017664 | ankyrin repeat domain | ANKRD10 | DKFZp686B07190; |
| | | | | | 10 (ANKRD10), mRNA. | | FLJ20093 |
| 1303 | 1301 | 6940039 | NM_003105.3 | NM_003105 | sortilin-related receptor, | SORL1 | LR11; LRP9; SORLA; |
| | | | | | L(DLR class) A | | SorLA-1; gp250 |
| | | | | | repeats-containing | | |
| | | | | | (SORL1), mRNA. | | |
| 1304 | 1302 | 6940066 | NM_005022.2 | NM_005022 | profilin 1 (PFN1), | PFN1 | — |
| | | | | | mRNA. | | |
| 1305 | 1303 | 6940255 | NM_020360.2 | NM_020360 | phospholipid | PLSCR3 | — |
| | | | | | scramblase 3 | | |
| | | | | | (PLSCR3), mRNA. | | |
| 1306 | 1304 | 6960072 | NM_002156.4 | NM_002156 | heat shock 60 kDa | HSPD1 | HuCHA60; GROEL; |
| | | | | | protein 1 (chaperonin) | | HSP60; SPG13; |
| | | | | | (HSPD1), nuclear gene | | CPN60; HSP65 |
| | | | | | encoding mitochondrial | | |
| | | | | | protein, transcript | | |
| | | | | | variant 1, mRNA. | | |
| 1307 | 1305 | 6960129 | NM_152729.2 | NM_152729 | 5′-nucleotidase domain | NT5DC1 | MGC131837; |
| | | | | | containing 1 (NT5DC1), | | C6orf200; |
| | | | | | mRNA. | | MGC24302; LP2642; |
| | | | | | | | NT5C2L1 |
| 1308 | 1306 | 6960168 | NM_020452.2 | NM_020452 | ATPase, class I, type | ATP8B2 | ATPID; |
| | | | | | 8B, member 2 | | DKFZp434M0219; |
| | | | | | (ATP8B2), transcript | | KIAA1137 |
| | | | | | variant 1, mRNA. | | |
| 1309 | 1307 | 6960242 | NM_019048.1 | NM_019048 | asparagine synthetase | ASNSD1 | NBLA00058; |
| | | | | | domain containing 1 | | NS3TP1; FLJ20752 |
| | | | | | (ASNSD1), mRNA. | | |
| 1310 | 1308 | 6960440 | NM_181762.1 | NM_181762 | ubiquitin-conjugating | UBE2A | UBC2; RAD6A; |
| | | | | | enzyme E2A (RAD6 | | HHR6A |
| | | | | | homolog) (UBE2A), | | |
| | | | | | transcript variant 2, | | |
| | | | | | mRNA. | | |
| 1311 | 1310 | 6960768 | NM_006963.3 | NM_006963 | zinc finger protein 22 | ZNF22 | HKR-T1; Zfp422; |
| | | | | | (KOX 15) (ZNF22), | | KOX15; ZNF422 |
| | | | | | mRNA. | | |
| 1312 | 1311 | 6980164 | NM_017595.4 | NM_017595 | NFKB inhibitor | NKIRAS2 | KBRAS2; |
| | | | | | interacting Ras-like 2 | | MGC74742; kappaB- |
| | | | | | (NKIRAS2), transcript | | Ras2; |
| | | | | | variant 2, mRNA. | | DKFZP434N1526 |
| 1313 | 1312 | 6980471 | NM_130436.2 | NM_130436 | dual-specificity tyrosine- | DYRK1A | HP86; DYRK; |
| | | | | | (Y)-phosphorylation | | DYRK1; MNBH; MNB |
| | | | | | regulated kinase 1A | | |
| | | | | | (DYRK1A), transcript | | |
| | | | | | variant 2, mRNA. | | |
| 1314 | 1313 | 6980541 | NM_003255.4 | NM_003255 | TIMP metallopeptidase | TIMP2 | CSC-21K |
| | | | | | inhibitor 2 (TIMP2), | | |
| | | | | | mRNA. | | |
| 1315 | 1314 | 7000121 | NM_176877.2 | NM_176877 | InaD-like (Drosophila) | INADL | Cipp; FLJ26982; |
| | | | | | (INADL), mRNA. | | PATJ |
| 1316 | 1315 | 7000307 | NM_004458.1 | NM_004458 | acyl-CoA synthetase | ACSL4 | MRX68; FACL4; |
| | | | | | long-chain family | | ACS4; MRX63; |
| | | | | | member 4 (ACSL4), | | LACS4 |
| | | | | | transcript variant 1, | | |
| | | | | | mRNA. | | |
| 1317 | 1317 | 7040707 | NM_015074.2 | NM_015074 | kinesin family member | KIF1B | KIAA0591; HMSNII; |
| | | | | | 1B (KIF1B), transcript | | CMT2; FLJ23699; |
| | | | | | variant 1, mRNA. | | KIAA1448; CMT2A; |
| | | | | | | | MGC134844; |
| | | | | | | | CMT2A1; KLP |
| 1318 | 1318 | 7040709 | NM_006548.4 | NM_006548 | insulin-like growth | IGF2BP2 | IMP-2; VICKZ2; p62; |
| | | | | | factor 2 mRNA binding | | IMP2 |
| | | | | | protein 2 (IGF2BP2), | | |
| | | | | | transcript variant 1, | | |
| | | | | | mRNA. | | |
| 1319 | 1319 | 7040735 | NM_000784.2 | NM_000784 | cytochrome P450, | CYP27A1 | CYP27; CTX; CP27 |
| | | | | | family 27, subfamily A, | | |
| | | | | | polypeptide 1 | | |
| | | | | | (CYP27A1), nuclear | | |
| | | | | | gene encoding | | |
| | | | | | mitochondrial protein, | | |
| | | | | | mRNA. | | |
| 1320 | 1320 | 7050189 | NM_014502.3 | NM_014502 | PRP19/PSO4 pre- | PRPF19 | NMP200; PRP19; |
| | | | | | mRNA processing | | hPSO4; UBOX4; |
| | | | | | factor 19 homolog (S. cerevisiae) | | SNEV; PSO4 |
| | | | | | (PRPF19), | | |
| | | | | | mRNA. | | |
| 1321 | 1321 | 7050332 | NM_005348.2 | NM_005348 | heat shock protein | HSP90AA1 | HSPCAL4; HSPN; |
| | | | | | 90 kDa alpha | | HSP86; Hsp89; |
| | | | | | (cytosolic), class A | | HSP90N; HSPC1; |
| | | | | | member 1 | | HSP90A; HSPCAL1; |
| | | | | | (HSP90AA1), transcript | | Hsp90; HSPCA; |
| | | | | | variant 2, mRNA. | | LAP2; FLJ31884 |
| 1322 | 1322 | 7050364 | NM_173849.2 | NM_173849 | goosecoidhomeobox | GSC | — |
| | | | | | (GSC), mRNA. | | |
| 1323 | 1323 | 7050494 | NM_014713.3 | NM_014713 | lysosomal-associated | LAPTM4A | LAPTM4; KIAA0108; |
| | | | | | protein transmembrane | | Mtrp; HUMORF13; |
| | | | | | 4 alpha (LAPTM4A), | | MBNT |
| | | | | | mRNA. | | |
| 1324 | 1324 | 7050619 | NM_017724.1 | NM_017724 | leucine rich repeat (in | LRRFIP2 | FLJ20248; HUFI-2; |
| | | | | | FLII) interacting protein | | FLJ22683; |
| | | | | | 2 (LRRFIP2), transcript | | DKFZp434H2035 |
| | | | | | variant 2, mRNA. | | |
| 1325 | 1325 | 7050717 | NM_004267.3 | NM_004267 | carbohydrate (N- | CHST2 | C6ST |
| | | | | | acetylglucosamine-6-O) | | |
| | | | | | sulfotransferase 2 | | |
| | | | | | (CHST2), mRNA. | | |
| 1326 | 1326 | 7100156 | NM_203504.1 | NM_203504 | GTPase activating | G3BP2 | — |
| | | | | | protein (SH3 domain) | | |
| | | | | | binding protein 2 | | |
| | | | | | (G3BP2), transcript | | |
| | | | | | variant 3, mRNA. | | |
| 1327 | 1327 | 7100338 | NM_001032278.1 | NM_001032278 | matrix metallopeptidase | MMP28 | MMP25; MM28 |
| | | | | | 28 (MMP28), transcript | | |
| | | | | | variant 3, mRNA. | | |
| 1328 | 1328 | 7100520 | NM_006368.4 | NM_006368 | cAMP responsive | CREB3 | LZIP; LUMAN; |
| | | | | | element binding protein | | MGC15333; |
| | | | | | 3 (CREB3), mRNA. | | MGC19782 |
| 1329 | 1331 | 7160059 | NM_004047.3 | NM_004047 | ATPase, H+ | ATP6V0B | HATPL; ATP6F; |
| | | | | | transporting, lysosomal | | VMA16 |
| | | | | | 21 kDa, V0 subunit b | | |
| | | | | | (ATP6V0B), transcript | | |
| | | | | | variant 1, mRNA. | | |
| 1330 | 1332 | 7160382 | NM_181713.3 | NM_181713 | UBX domain containing | UBXD4 | MGC138202 |
| | | | | | 4 (UBXD4), mRNA. | | |
| 1331 | 1333 | 7160593 | NM_152542.2 | NM_152542 | protein phosphatase 1K | PPM1K | UG0882E07; PP2Cm; |
| | | | | | (PP2C domain | | DKFZp667B084; |
| | | | | | containing) (PPM1K), | | PTMP; |
| | | | | | mRNA. | | DKFZp761G058 |
| 1332 | 1334 | 7200041 | NM_000310.2 | NM_000310 | palmitoyl-protein | PPT1 | CLN1; INCL; PPT |
| | | | | | thioesterase 1 (ceroid- | | |
| | | | | | lipofuscinosis, neuronal | | |
| | | | | | 1, infantile) (PPT1), | | |
| | | | | | mRNA. | | |
| 1333 | 1335 | 7200142 | NM_032940.2 | NM_032940 | polymerase (RNA) II | POLR2C | RPB31; hsRPB3; |
| | | | | | (DNA directed) | | RPB3; hRPB33 |
| | | | | | polypeptide C, 33 kDa | | |
| | | | | | (POLR2C), mRNA. | | |
| 1334 | 1336 | 7200242 | NM_018837.2 | NM_018837 | sulfatase 2 (SULF2), | SULF2 | MGC126411; |
| | | | | | transcript variant 1, | | FLJ90554; KIAA1247; |
| | | | | | mRNA. | | HSULF-2; |
| | | | | | | | DKFZp313E091 |
| 1335 | 1337 | 7200392 | NM_001212.3 | NM_001212 | complement | C1QBP | gC1qR; HABP1; |
| | | | | | component 1, q | | SF2p32; p32; gC1Q- |
| | | | | | subcomponent binding | | R; GC1QBP |
| | | | | | protein (C1QBP), | | |
| | | | | | nuclear gene encoding | | |
| | | | | | mitochondrial protein, | | |
| | | | | | mRNA. | | |
| 1336 | 1338 | 7200435 | NM_005170.2 | NM_005170 | achaete-scute complex | ASCL2 | ASH2; MASH2; |
| | | | | | homolog 2 (Drosophila) | | HASH2 |
| | | | | | (ASCL2), mRNA. | | |
| 1337 | 1339 | 7200475 | NM_015698.3 | NM_015698 | G patch domain and | GPKOW | GPATCH5; GPATC5; |
| | | | | | KOW motifs (GPKOW), | | T54 |
| | | | | | mRNA. | | |
| 1338 | 1340 | 7200601 | NM_001044390.1 | NM_001044390 | mucin 1, cell surface | MUC1 | PEMT; PUM; PEM; |
| | | | | | associated (MUC1), | | EMA; H23AG; MAM6; |
| | | | | | transcript variant 5, | | CD227 |
| | | | | | mRNA. | | |
| 1339 | 1341 | 7200670 | NM_016640.3 | NM_016640 | mitochondrial ribosomal | MRPS30 | PDCD9; MRP-S30; |
| | | | | | protein S30 (MRPS30), | | DKFZp566B2024; |
| | | | | | nuclear gene encoding | | PAP |
| | | | | | mitochondrial protein, | | |
| | | | | | mRNA. | | |
| 1340 | 1342 | 7210020 | NM_001006618.1 | NM_001006618 | mitogen-activated | MAPKAP1 | MGC2745; MIP1; |
| | | | | | protein kinase | | SIN1b; SIN1g; SIN1 |
| | | | | | associated protein 1 | | |
| | | | | | (MAPKAP1), transcript | | |
| | | | | | variant 6, mRNA. | | |
| 1341 | 1343 | 7210682 | NM_014716.2 | NM_014716 | centaurin, beta 1 | CENTB1 | KIAA0050; ACAP1 |
| | | | | | (CENTB1), mRNA. | | |
| 1342 | 1344 | 7210725 | NM_181463.1 | NM_181463 | mitochondrial ribosomal | MRPL55 | DKFZp686D1387; |
| | | | | | protein L55 (MRPL55), | | PRO19675; |
| | | | | | nuclear gene encoding | | MGC61802; |
| | | | | | mitochondrial protein, | | AAVG5835 |
| | | | | | transcript variant 5, | | |
| | | | | | mRNA. | | |
| 1343 | 1345 | 7320307 | NM_005707.1 | NM_005707 | programmed cell death | PDCD7 | HES18; ES18; |
| | | | | | 7 (PDCD7), mRNA. | | MGC22015 |
| 1344 | 1346 | 7320424 | NR_002944.2 | NR_002944 | heterogeneous nuclear | HNRPA1L-2 | — |
| | | | | | ribonucleoprotein A1 | | |
| | | | | | pseudogene | | |
| | | | | | (HNRPA1L-2) on | | |
| | | | | | chromosome 19. | | |
| 1345 | 1347 | 7320594 | NM_003461.4 | NM_003461 | zyxin (ZYX), transcript | ZYX | ESP-2; HED-2 |
| | | | | | variant 1, mRNA. | | |
| 1346 | 1348 | 7320687 | NM_002697.2 | NM_002697 | POU class 2 homeobox | POU2F1 | OCT1; OTF1 |
| | | | | | 1 (POU2F1), mRNA. | | |
| 1347 | 1349 | 7330068 | NM_031287.2 | NM_031287 | splicing factor 3b, | SF3B5 | SF3b10; MGC3133 |
| | | | | | subunit 5, 10 kDa | | |
| | | | | | (SF3B5), mRNA. | | |
| 1348 | 1351 | 7330504 | NM_138553.1 | NM_138553 | B-cell CLL/lymphoma | BCL11A | BCL11A-L; CTIP1; |
| | | | | | 11A (zinc finger protein) | | FLJ10173; BCL11A- |
| | | | | | (BCL11A), transcript | | XL; BCL11A-S; |
| | | | | | variant 5, mRNA. | | FLJ34997; KIAA1809; |
| | | | | | | | EVI9 |
| 1349 | 1352 | 7330544 | NM_005165.2 | NM_005165 | aldolase C, fructose- | ALDOC | ALDC |
| | | | | | bisphosphate | | |
| | | | | | (ALDOC), mRNA. | | |
| 1350 | 1353 | 7330671 | NM_145699.2 | NM_145699 | apolipoprotein B mRNA | APOBEC3A | PHRBN; bK150C2.1; |
| | | | | | editing enzyme, | | ARP3 |
| | | | | | catalytic polypeptide- | | |
| | | | | | like 3A (APOBEC3A), | | |
| | | | | | mRNA. | | |
| 1351 | 1354 | 7330753 | NM_005891.2 | NM_005891 | acetyl-Coenzyme A | ACAT2 | — |
| | | | | | acetyltransferase 2 | | |
| | | | | | (ACAT2), mRNA. | | |
| 1352 | 1355 | 7380164 | NM_004604.3 | NM_004604 | syntaxin 4 (STX4), | STX4 | STX4A; p35-2 |
| | | | | | mRNA. | | |
| 1353 | 1356 | 7380452 | NM_018203.1 | NM_018203 | kelch domain | KLHDC8A | FLJ10748 |
| | | | | | containing 8A | | |
| | | | | | (KLHDC8A), mRNA. | | |
| 1354 | 1358 | 7380626 | NM_019027.1 | NM_019027 | RNA-binding protein | FLJ20273 | DKFZp686F02235 |
| | | | | | (FLJ20273), mRNA. | | |
| 1355 | 1359 | 7400114 | NM_023039.2 | NM_023039 | ankyrin repeat, family A | ANKRA2 | ANKRA |
| | | | | | (RFXANK-like), 2 | | |
| | | | | | (ANKRA2), mRNA. | | |
| 1356 | 1360 | 7400246 | NM_181708.1 | NM_181708 | BCDIN3 domain | BCDIN3D | — |
| | | | | | containing (BCDIN3D), | | |
| | | | | | mRNA. | | |
| 1357 | 1361 | 7400521 | NM_006403.2 | NM_006403 | neural precursor cell | NEDD9 | dJ761I2.1; |
| | | | | | expressed, | | dJ49G10.2; CAS-L; |
| | | | | | developmentally down- | | HEF1; CASL |
| | | | | | regulated 9 (NEDD9), | | |
| | | | | | transcript variant 1, | | |
| | | | | | mRNA. | | |
| 1358 | 1362 | 7400546 | NM_021132.1 | NM_021132 | protein phosphatase 3 | PPP3CB | CALNA2; CALNB |
| | | | | | (formerly 2B), catalytic | | |
| | | | | | subunit, beta isoform | | |
| | | | | | (PPP3CB), mRNA. | | |
| 1359 | 1363 | 7510097 | NM_181270.2 | NM_181270 | CKLF-like MARVEL | CMTM1 | CKLFH; CKLFSF1; |
| | | | | | transmembrane | | CKLFH1; MGC71870 |
| | | | | | domain containing 1 | | |
| | | | | | (CMTM1), transcript | | |
| | | | | | variant 2, mRNA. | | |
| 1360 | 1364 | 7510204 | NM_016403.3 | NM_016403 | CWC15 homolog (S. cerevisiae) | CWC15 | ORF5; Cwf15; |
| | | | | | (CWC15), | | HSPC148; C11orf5 |
| | | | | | mRNA. | | |
| 1361 | 1365 | 7510332 | NM_001029991.1 | NM_001029991 | methyltransferase 11 | METT11D1 | FLJ20859 |
| | | | | | domain containing 1 | | |
| | | | | | (METT11D1), transcript | | |
| | | | | | variant 1, mRNA. | | |
| 1362 | 1366 | 7510356 | NM_001347.2 | NM_001347 | diacylglycerol kinase, | DGKQ | DAGK7; DAGK4; |
| | | | | | theta 110 kDa (DGKQ), | | DAGK |
| | | | | | mRNA. | | |
| 1363 | 1367 | 7510537 | NM_005138.1 | NM_005138 | SCO cytochrome | SCO2 | MGC125823; |
| | | | | | oxidase deficient | | MGC125825; SCO1L |
| | | | | | homolog 2 (yeast) | | |
| | | | | | (SCO2), nuclear gene | | |
| | | | | | encoding mitochondrial | | |
| | | | | | protein, mRNA. | | |
| 1364 | 1368 | 7510538 | NM_001012614.1 | NM_001012614 | C-terminal binding | CTBP1 | BARS; MGC104684 |
| | | | | | protein 1 (CTBP1), | | |
| | | | | | transcript variant 2, | | |
| | | | | | mRNA. | | |
| 1365 | 1370 | 7550341 | NM_014056.1 | NM_014056 | HIG1 domain family, | HIGD1A | HIG1; |
| | | | | | member 1A (HIGD1A), | | DKFZP564K247 |
| | | | | | mRNA. | | |
| 1366 | 1371 | 7550437 | XM_001128220.1 | XM_001128220 | PREDICTED: pleckstrin | PLEKHM1 | — |
| | | | | | homology domain | | |
| | | | | | containing, family M | | |
| | | | | | (with RUN domain) | | |
| | | | | | member 1 (PLEKHM1), | | |
| | | | | | mRNA. | | |
| 1367 | 1372 | 7550601 | NM_175932.1 | NM_175932 | proteasome (prosome, | PSMD13 | HSPC027; p40.5 |
| | | | | | macropain) 26S | | |
| | | | | | subunit, non-ATPase, | | |
| | | | | | 13 (PSMD13), | | |
| | | | | | transcript variant 2, | | |
| | | | | | mRNA. | | |
| 1368 | 1373 | 7550639 | NM_138335.1 | NM_138335 | glucosamine-6- | GNPDA2 | SB52 |
| | | | | | phosphate deaminase | | |
| | | | | | 2 (GNPDA2), mRNA. | | |
| 1369 | 1374 | 7560092 | NM_032273.2 | NM_032273 | transmembrane protein | TMEM126A | DKFZp586C1924 |
| | | | | | 126A (TMEM126A), | | |
| | | | | | mRNA. | | |
| 1370 | 1375 | 7560097 | NM_005765.2 | NM_005765 | ATPase, H+ | ATP6AP2 | ELDF10; APT6M8-9; |
| | | | | | transporting, lysosomal | | MGC99577; XMRE; |
| | | | | | accessory protein 2 | | M8-9; ATP6IP2; |
| | | | | | (ATP6AP2), mRNA. | | MSTP009; MRXE; |
| | | | | | | | HT028; ATP6M8-9 |
| 1371 | 1376 | 7560129 | NM_153028.1 | NM_153028 | zinc finger protein 75a | ZNF75A | FLJ31529 |
| | | | | | (ZNF75A), mRNA. | | |
| 1372 | 1377 | 7560180 | NM_022486.3 | NM_022486 | sushi domain | SUSD1 | RP11-4O1.1 |
| | | | | | containing 1 (SUSD1), | | |
| | | | | | mRNA. | | |
| 1373 | 1378 | 7560435 | NM_018053.2 | NM_018053 | XK, Kell blood group | XKR8 | XRG8; FLJ10307; |
| | | | | | complex subunit-related | | RP11-460I13.3 |
| | | | | | family, member 8 | | |
| | | | | | (XKR8), mRNA. | | |
| 1374 | 1379 | 7560465 | NM_001042450.1 | NM_001042450 | solute carrier family 5 | SLC5A10 | FLJ25217; SGLT5 |
| | | | | | (sodium/glucose | | |
| | | | | | cotransporter), member | | |
| | | | | | 10 (SLC5A10), | | |
| | | | | | transcript variant 2, | | |
| | | | | | mRNA. | | |
| 1375 | 1380 | 7570673 | NM_003364.2 | NM_003364 | uridinephosphorylase 1 | UPP1 | UP; UPASE; |
| | | | | | (UPP1), transcript | | UDRPASE; UPP |
| | | | | | variant 1, mRNA. | | |
| 1376 | 1381 | 7610097 | NM_006515.1 | NM_006515 | SET domain and | SETMAR | METNASE |
| | | | | | mariner transposase | | |
| | | | | | fusion gene (SETMAR), | | |
| | | | | | mRNA. | | |
| 1377 | 1382 | 7610138 | NM_004396.2 | NM_004396 | DEAD (Asp-Glu-Ala- | DDX5 | HUMP68; |
| | | | | | Asp) box polypeptide 5 | | DKFZp686J01190; |
| | | | | | (DDX5), mRNA. | | p68; HLR1; G17P1 |
| 1378 | 1383 | 7610433 | NM_005628.1 | NM_005628 | solute carrier family 1 | SLC1A5 | M7V1; ATBO; |
| | | | | | (neutral amino acid | | FLJ31068; ASCT2; |
| | | | | | transporter), member 5 | | AAAT; R16; M7VS1; |
| | | | | | (SLC1A5), mRNA. | | RDRC |
| 1379 | 1384 | 7610538 | NM_006026.2 | NM_006026 | H1 histone family, | H1FX | MGC8350; H1X; |
| | | | | | member X (H1FX), | | MGC15959 |
| | | | | | mRNA. | | |
| 1380 | 1385 | 7610563 | NM_003112.3 | NM_003112 | Sp4 transcription factor | SP4 | MGC130009; SPR-1; |
| | | | | | (SP4), mRNA. | | HF1B; MGC130008 |
| 1381 | 1386 | 7610593 | NM_001042462.1 | NM_001042462 | trafficking protein | TRAPPC5 | MGC52424 |
| | | | | | particle complex 5 | | |
| | | | | | (TRAPPC5), transcript | | |
| | | | | | variant 3, mRNA. | | |
| 1382 | 1387 | 7610754 | NM_018094.2 | NM_018094 | G1 to S phase | GSPT2 | GST2; FLJ10441; |
| | | | | | transition 2 (GSPT2), | | eRF3b |
| | | | | | mRNA. | | |
| 1383 | 1388 | 7650026 | NM_001044391.1 | NM_001044391 | mucin 1, cell surface | MUC1 | PEMT; PUM; PEM; |
| | | | | | associated (MUC1), | | EMA; H23AG; MAM6; |
| | | | | | transcript variant 6, | | CD227 |
| | | | | | mRNA. | | |
| 1384 | 1389 | 7650152 | NM_006098.4 | NM_006098 | guanine nucleotide | GNB2L1 | HLC-7; RACK1; |
| | | | | | binding protein (G | | PIG21; Gnb2-rs1; |
| | | | | | protein), beta | | H12.3 |
| | | | | | polypeptide 2-like 1 | | |
| | | | | | (GNB2L1), mRNA. | | |
| 1385 | 1390 | 7650333 | NM_001042465.1 | NM_001042465 | prosaposin (variant | PSAP | GLBA; SAP1; |
| | | | | | Gaucher disease and | | MGC110993; |
| | | | | | variant metachromatic | | FLJ00245 |
| | | | | | leukodystrophy) | | |
| | | | | | (PSAP), transcript | | |
| | | | | | variant 2, mRNA. | | |
| 1386 | 1391 | 7650433 | NM_003254.2 | NM_003254 | TIMP metallopeptidase | TIMP1 | TIMP; FLJ90373; |
| | | | | | inhibitor 1 (TIMP1), | | CLGI; EPA; EPO; HCI |
| | | | | | mRNA. | | |
| 1387 | 1392 | 10333 | XM_001129369.1 | XM_001129369 | PREDICTED: similar to | LOC731682 | — |
| | | | | | HLA class II | | |
| | | | | | histocompatibility | | |
| | | | | | antigen, DQ(1) alpha | | |
| | | | | | chain precursor (DC-4 | | |
| | | | | | alpha chain) | | |
| | | | | | (LOC731682), mRNA. | | |
| 1388 | 1393 | 60341 | XM_926322.1 | XM_926322 | PREDICTED: similar to | LOC653171 | — |
| | | | | | MAPK-interacting and | | |
| | | | | | spindle-stabilizing | | |
| | | | | | protein (LOC653171), | | |
| | | | | | mRNA. | | |
| 1389 | 1394 | 130692 | AW168583 | AW168583 | xi89f08.x1 | — | — |
| | | | | | NCI_CGAP_Mel3 | | |
| | | | | | cDNA clone | | |
| | | | | | IMAGE: 2652999 3, | | |
| | | | | | mRNA sequence | | |
| 1390 | 1395 | 150224 | NM_001010864.1 | NM_001010864 | similar to CG32542-PA | LOC196752 | FLJ34302 |
| | | | | | (LOC196752), mRNA. | | |
| 1391 | 1396 | 240392 | AK091904 | AK091904 | cDNA FLJ34585 fis, | — | — |
| | | | | | clone KIDNE2008758 | | |
| 1392 | 1397 | 270133 | NM_020362.3 | NM_020362 | chromosome 1 open | C1orf128 | TXNL1CL; HT014; |
| | | | | | reading frame 128 | | RP5-886K2.4 |
| | | | | | (C1orf128), mRNA. | | |
| 1393 | 1398 | 290687 | XM_936240.1 | XM_936240 | PREDICTED: similar to | LOC653884 | — |
| | | | | | FUS interacting protein | | |
| | | | | | (serine-arginine rich) 1 | | |
| | | | | | (LOC653884), mRNA. | | |
| 1394 | 1399 | 430519 | NM_014612.3 | NM_014612 | family with sequence | FAM120A | MGC111527; |
| | | | | | similarity 120A | | C9orf10; |
| | | | | | (FAM120A), mRNA. | | MGC133257; |
| | | | | | | | DNAPTP1; DNAPTP5 |
| 1395 | 1400 | 520403 | NM_144736.3 | NM_144736 | hypothetical protein | PRO1853 | — |
| | | | | | PRO1853 (PRO1853), | | |
| | | | | | transcript variant 1, | | |
| | | | | | mRNA. | | |
| 1396 | 1401 | 540747 | BE622355 | BE622355 | 601441142F1 | — | — |
| | | | | | NIH_MGC_72 cDNA | | |
| | | | | | clone IMAGE: 3915971 | | |
| | | | | | 5, mRNA sequence | | |
| 1397 | 1402 | 580703 | XM_001128002.1 | XM_001128002 | PREDICTED: similar to | LOC728153 | — |
| | | | | | FAM133B protein, | | |
| | | | | | transcript variant 1 | | |
| | | | | | (LOC728153), mRNA. | | |
| 1398 | 1403 | 650626 | NM_024109.2 | NM_024109 | chromosome 16 open | C16orf68 | FLJ12433; MGC2654 |
| | | | | | reading frame 68 | | |
| | | | | | (C16orf68), mRNA. | | |
| 1399 | 1404 | 670010 | XM_939387.1 | XM_939387 | PREDICTED: similar to | LOC650298 | — |
| | | | | | 40S ribosomal protein | | |
| | | | | | S26 (LOC650298), | | |
| | | | | | mRNA. | | |
| 1400 | 1405 | 730379 | XM_941195.2 | XM_941195 | PREDICTED: similar to | LOC388621 | — |
| | | | | | ribosomal protein L21 | | |
| | | | | | (LOC388621), mRNA. | | |
| 1401 | 1406 | 780079 | XM_943677.1 | XM_943677 | PREDICTED: similar to | LOC654053 | — |
| | | | | | hypothetical | | |
| | | | | | LOC389634 | | |
| | | | | | (LOC654053), mRNA. | | |
| 1402 | 1407 | 780187 | NM_145063.2 | NM_145063 | chromosome 6 open | C6orf130 | MGC19570; |
| | | | | | reading frame 130 | | dJ34B21.3 |
| | | | | | (C6orf130), mRNA. | | |
| 1403 | 1408 | 780717 | XM_925839.1 | XM_925839 | PREDICTED: | LOC158301 | — |
| | | | | | hypothetical protein | | |
| | | | | | LOC158301 | | |
| | | | | | (LOC158301), mRNA. | | |
| 1404 | 1409 | 840463 | BI827704 | BI827704 | 603074125F1 | — | — |
| | | | | | NIH_MGC_119 cDNA | | |
| | | | | | clone IMAGE: 5165863 | | |
| | | | | | 5, mRNA sequence | | |
| 1405 | 1410 | 990711 | NM_207009.2 | NM_207009 | family with sequence | FAM45A | — |
| | | | | | similarity 45, member A | | |
| | | | | | (FAM45A), mRNA. | | |
| 1406 | 1411 | 1010458 | XR_017629.1 | XR_017629 | PREDICTED: similar to | LOC645466 | — |
| | | | | | coiled-coil domain | | |
| | | | | | containing 55 | | |
| | | | | | (LOC645466), mRNA. | | |
| 1407 | 1412 | 1070470 | AK091337 | AK091337 | cDNA FLJ34018 fis, | — | — |
| | | | | | clone FCBBF2002801 | | |
| 1408 | 1413 | 1090110 | NM_001025072.2 | NM_001025072 | chromosome 3 open | C3orf17 | DKFZP434F2021 |
| | | | | | reading frame 17 | | |
| | | | | | (C3orf17), transcript | | |
| | | | | | variant 2, mRNA. | | |
| 1409 | 1414 | 1090112 | NM_058181.1 | NM_058181 | chromosome 21 open | C21orf57 | FLJ46907 |
| | | | | | reading frame 57 | | |
| | | | | | (C21orf57), transcript | | |
| | | | | | variant 1, mRNA. | | |
| 1410 | 1415 | 1110541 | NM_001009923.1 | NM_001009923 | chromosome 20 open | C20orf30 | HSPC274; |
| | | | | | reading frame 30 | | dJ1116H23.2.1 |
| | | | | | (C20orf30), transcript | | |
| | | | | | variant 1, mRNA. | | |
| 1411 | 1416 | 1230600 | XM_944489.1 | XM_944489 | PREDICTED: | LOC651064 | — |
| | | | | | hypothetical protein | | |
| | | | | | LOC651064 | | |
| | | | | | (LOC651064), mRNA. | | |
| 1412 | 1417 | 1260360 | XM_001133820.1 | XM_001133820 | PREDICTED: | LOC729776 | — |
| | | | | | hypothetical protein | | |
| | | | | | LOC729776 | | |
| | | | | | (LOC729776), mRNA. | | |
| 1413 | 1418 | 1300369 | NR_002797.1 | NR_002797 | hypothetical protein | LOC255783 | — |
| | | | | | LOC255783 | | |
| | | | | | (LOC255783) on | | |
| | | | | | chromosome 19. | | |
| 1414 | 1419 | 1340669 | BX537514 | BX537514 | mRNA; cDNA | — | — |
| | | | | | DKFZp313N0919 (from | | |
| | | | | | clone | | |
| | | | | | DKFZp313N0919) | | |
| 1415 | 1420 | 1440050 | NM_173691.2 | NM_173691 | chromosome 9 open | C9orf75 | MGC131933; RP11- |
| | | | | | reading frame 75 | | 350O14.7; FLJ90254 |
| | | | | | (C9orf75), mRNA. | | |
| 1416 | 1421 | 1450452 | NM_024331.3 | NM_024331 | chromosome 20 open | C20orf121 | DKFZp686E0870; |
| | | | | | reading frame 121 | | MGC2470 |
| | | | | | (C20orf121), transcript | | |
| | | | | | variant 1, mRNA. | | |
| 1417 | 1422 | 1690600 | NM_014661.3 | NM_014661 | family with sequence | FAM53B | RP11-12J10.2; |
| | | | | | similarity 53, member B | | KIAA0140; bA12J10.2 |
| | | | | | (FAM53B), mRNA. | | |
| 1418 | 1423 | 1740026 | XM_937227.1 | XM_937227 | PREDICTED: similar to | LOC653962 | — |
| | | | | | Teratocarcinoma- | | |
| | | | | | derived growth factor 2 | | |
| | | | | | (Epidermal growth | | |
| | | | | | factor-like cripto protein | | |
| | | | | | CR3) (Cripto-3 growth | | |
| | | | | | factor) (LOC653962), | | |
| | | | | | mRNA. | | |
| 1419 | 1424 | 1820670 | XM_935752.1 | XM_935752 | PREDICTED: similar to | LOC641978 | — |
| | | | | | general transcription | | |
| | | | | | factor II I (LOC641978), | | |
| | | | | | mRNA. | | |
| 1420 | 1425 | 1940296 | XM_932678.1 | XM_932678 | PREDICTED: similar to | LOC87841 | — |
| | | | | | ribosomal protein L13a, | | |
| | | | | | transcript variant 2 | | |
| | | | | | (LOC387841), mRNA. | | |
| 1421 | 1426 | 1940470 | XM_001132754.1 | XM_001132754 | PREDICTED: similar to | LOC728734 | — |
| | | | | | kidney-specific protein | | |
| | | | | | (KS), transcript variant | | |
| | | | | | 1 (LOC728734), | | |
| | | | | | mRNA. | | |
| 1422 | 1427 | 1980088 | BC014384 | BC014384 | Homo sapiens, clone | — | — |
| | | | | | IMAGE: 4052238, | | |
| | | | | | mRNA, partial cds | | |
| 1423 | 1428 | 1980369 | NM_001001701.1 | NM_001001701 | HCV F-transactivated | LOC401152 | — |
| | | | | | protein 1 (LOC401152), | | |
| | | | | | mRNA. | | |
| 1424 | 1429 | 2030044 | NM_015609.2 | NM_015609 | chromosome 1 open | C1orf144 | MGC70432; |
| | | | | | reading frame 144 | | DKFZp566C0424 |
| | | | | | (C1orf144), mRNA. | | |
| 1425 | 1430 | 2060014 | AK130294 | AK130294 | cDNA FLJ26784 fis, | — | — |
| | | | | | clone PRS04220 | | |
| 1426 | 1431 | 2060767 | NM_001077697.1 | NM_001077697 | similar to testis specific | LOC728137 | — |
| | | | | | protein, Y-linked 1 | | |
| | | | | | (LOC728137), mRNA. | | |
| 1427 | 1432 | 2120376 | NM_032870.1 | NM_032870 | chromosome 6 open | C6orf111 | DKFZp564B0769; |
| | | | | | reading frame 111 | | FLJ90147; SRrp130; |
| | | | | | (C6orf111), mRNA. | | MGC104269; |
| | | | | | | | bA98I9.2; RP11- |
| | | | | | | | 98I9.2; HSPC306; |
| | | | | | | | FLJ14752; FLJ14992; |
| | | | | | | | FLJ14853 |
| 1428 | 1433 | 2120468 | NM_032333.2 | NM_032333 | chromosome 10 open | C10orf58 | MGC4248 |
| | | | | | reading frame 58 | | |
| | | | | | (C10orf58), mRNA. | | |
| 1429 | 1434 | 2120746 | CD693563 | CD693563 | EST10086 human | — | — |
| | | | | | nasopharynx cDNA, | | |
| | | | | | mRNA sequence | | |
| 1430 | 1435 | 2190114 | AA722181 | AA722181 | zh20c06.s1 | — | — |
| | | | | | Soares_pineal_gland_N3HPG | | |
| | | | | | cDNA clone | | |
| | | | | | IMAGE: 412618 3, | | |
| | | | | | mRNA sequence | | |
| 1431 | 1436 | 2320408 | NM_207035.1 | NM_207035 | chromosome 1 open | C1orf63 | RP3-465N24.4; |
| | | | | | reading frame 63 | | NPD014; |
| | | | | | (C1orf63), transcript | | DJ465N24.2.1 |
| | | | | | variant 1, mRNA. | | |
| 1432 | 1437 | 2320689 | XM_928387.1 | XM_928387 | PREDICTED: similar to | LOC653610 | — |
| | | | | | Histone H2A.o (H2A/o) | | |
| | | | | | (H2A.2) (H2a-615) | | |
| | | | | | (LOC653610), mRNA. | | |
| 1433 | 1438 | 2340324 | BX648313 | BX648313 | mRNA; cDNA | — | — |
| | | | | | DKFZp686C10170 | | |
| | | | | | (from clone | | |
| | | | | | DKFZp686C10170) | | |
| 1434 | 1439 | 2340414 | BU838786 | BU838786 | AGENCOURT_821025 | — | — |
| | | | | | 9 NIH_MGC_112 | | |
| | | | | | cDNA clone | | |
| | | | | | IMAGE: 6258046 5, | | |
| | | | | | mRNA sequence | | |
| 1435 | 1440 | 2340521 | NM_152766.2 | NM_152766 | chromosome 17 open | C17orf61 | MGC40107 |
| | | | | | reading frame 61 | | |
| | | | | | (C17orf61), mRNA. | | |
| 1436 | 1441 | 2450398 | NM_001009924.1 | NM_001009924 | chromosome 20 open | C20orf30 | HSPC274; |
| | | | | | reading frame 30 | | dJ1116H23.2.1 |
| | | | | | (C20orf30), transcript | | |
| | | | | | variant 2, mRNA. | | |
| 1437 | 1442 | 2450435 | DN997246 | DN997246 | TC125227 Human | — | — |
| | | | | | breast cancer tissue, | | |
| | | | | | large insert, pCMV | | |
| | | | | | expression library | | |
| | | | | | cDNA clone TC125227 | | |
| | | | | | 5 similar to LOC399828 | | |
| | | | | | (LOC387724), mRNA | | |
| | | | | | sequence | | |
| 1438 | 1443 | 2480309 | XM_944290.1 | XM_944290 | PREDICTED: | KIAA0492 | — |
| | | | | | KIAA0492 protein | | |
| | | | | | (KIAA0492), mRNA. | | |
| 1439 | 1444 | 2510184 | NM_030797.2 | NM_030797 | family with sequence | FAM49A | FLJ11080; FLJ33961; |
| | | | | | similarity 49, member A | | DKFZP566A1524 |
| | | | | | (FAM49A), mRNA. | | |
| 1440 | 1445 | 2510403 | XM_374029 | XM_374029 | PREDICTED: | — | — |
| | | | | | hypothetical | | |
| | | | | | LOC89089 | | |
| | | | | | (LOC389089), mRNA. | | |
| 1441 | 1446 | 2630373 | AK097979 | AK097979 | cDNA FLJ40660 fis, | — | — |
| | | | | | clone THYMU2019686 | | |
| 1442 | 1447 | 2640528 | NM_001039476.1 | NM_001039476 | chromosome 16 open | C16orf35 | CGTHBA |
| | | | | | reading frame 35 | | |
| | | | | | (C16orf35), transcript | | |
| | | | | | variant 2, mRNA. | | |
| 1443 | 1448 | 2650019 | NM_016605.1 | NM_016605 | family with sequence | FAM53C | C5orf6 |
| | | | | | similarity 53, member C | | |
| | | | | | (FAM53C), mRNA. | | |
| 1444 | 1449 | 2750360 | NM_024598.2 | NM_024598 | chromosome 16 open | C16orf57 | FLJ13154 |
| | | | | | reading frame 57 | | |
| | | | | | (C16orf57), mRNA. | | |
| 1445 | 1451 | 2850630 | NM_199250.1 | NM_199250 | chromosome 19 open | C19orf48 | MGC13170 |
| | | | | | reading frame 48 | | |
| | | | | | (C19orf48), mRNA. | | |
| 1446 | 1452 | 3060661 | NM_024948.2 | NM_024948 | chromosome 10 open | C10orf97 | DERP5; MST126; |
| | | | | | reading frame 97 | | my042; FLJ13397; |
| | | | | | (C10orf97), mRNA. | | MSTP126; CARP; |
| | | | | | | | RP11-394I23.1 |
| 1447 | 1453 | 3120440 | CR596519 | CR596519 | full-length cDNA clone | — | — |
| | | | | | CS0DI056YK21 of | | |
| | | | | | Placenta Cot 25- | | |
| | | | | | normalized of (human) | | |
| 1448 | 1454 | 3120553 | BM690036 | BM690036 | UI-E-CK1-abr-b-07-0- | — | — |
| | | | | | UI.r1 UI-E-CK1 cDNA | | |
| | | | | | clone UI-E-CK1-abr-b- | | |
| | | | | | 07-0-UI5, mRNA | | |
| | | | | | sequence | | |
| 1449 | 1455 | 3130333 | XM_931058.1 | XM_931058 | PREDICTED: similar to | LOC642749 | — |
| | | | | | Succinate | | |
| | | | | | dehydrogenase | | |
| | | | | | [ubiquinone] | | |
| | | | | | flavoprotein subunit, | | |
| | | | | | mitochondrial precursor | | |
| | | | | | (Fp) (Flavoprotein | | |
| | | | | | subunit of complex II), | | |
| | | | | | transcript variant 2 | | |
| | | | | | (LOC642749), mRNA. | | |
| 1450 | 1456 | 3140280 | NM_017832.2 | NM_017832 | chromosome 9 open | C9orf6 | CG-8; FLJ20457 |
| | | | | | reading frame 6 | | |
| | | | | | (C9orf6), mRNA. | | |
| 1451 | 1457 | 3170037 | DR977977 | DR977977 | SM011178 Brain 3 EST | — | — |
| | | | | | cDNA clone ID_11178 | | |
| | | | | | 3′, mRNA sequence | | |
| 1452 | 1458 | 3180053 | NM_022833.2 | NM_022833 | family with sequence | FAM129B | OC58; MEG-3; |
| | | | | | similarity 129, member | | FLJ13518; FLJ22298; |
| | | | | | B (FAM129B), | | RP11-356B19.6; |
| | | | | | transcript variant 1, | | bA356B19.6; |
| | | | | | mRNA. | | FLJ22151; |
| | | | | | | | DKFZP434H0820; |
| | | | | | | | C9orf88 |
| 1453 | 1459 | 3180541 | NM_001013699.1 | NM_001013699 | histone H3-like | LOC440093 | — |
| | | | | | (LOC440093), mRNA. | | |
| 1454 | 1460 | 3310746 | NM_019054.2 | NM_019054 | family with sequence | FAM35A | MGC5560; |
| | | | | | similarity 35, member A | | bA163M19.1 |
| | | | | | (FAM35A), mRNA. | | |
| 1455 | 1461 | 3360170 | R25153 | R25153 | yh36h11.s1 Soares | — | — |
| | | | | | placenta Nb2HP cDNA | | |
| | | | | | clone IMAGE: 131877 | | |
| | | | | | 3, mRNA sequence | | |
| 1456 | 1462 | 3370053 | BC036926 | BC036926 | T cell receptor beta | — | — |
| | | | | | variable 21-1, mRNA | | |
| | | | | | (cDNA clone | | |
| | | | | | MGC: 46491 | | |
| | | | | | IMAGE: 5225843), | | |
| | | | | | complete cds | | |
| 1457 | 1463 | 3440670 | XM_377933.3 | XM_377933 | PREDICTED: similar to | LOC402251 | — |
| | | | | | eukaryotic translation | | |
| | | | | | elongation factor 1 | | |
| | | | | | alpha 2 (LOC402251), | | |
| | | | | | mRNA. | | |
| 1458 | 1464 | 3610372 | NM_032359.2 | NM_032359 | chromosome 3 open | C3orf26 | MGC4308 |
| | | | | | reading frame 26 | | |
| | | | | | (C3orf26), mRNA. | | |
| 1459 | 1465 | 3610682 | BX117372 | BX117372 | BX117372 | — | — |
| | | | | | NCI_CGAP_Co4 cDNA | | |
| | | | | | clone | | |
| | | | | | IMAGp998E042410, | | |
| | | | | | mRNA sequence | | |
| 1460 | 1466 | 3710682 | XM_936103.1 | XM_936103 | PREDICTED: similar to | LOC642033 | — |
| | | | | | ATP-binding cassette, | | |
| | | | | | sub-family F, member 1 | | |
| | | | | | isoform b | | |
| | | | | | (LOC642033), mRNA. | | |
| 1461 | 1467 | 3780382 | NM_138368.3 | NM_138368 | DKFZp761E198 protein | DKFZp761E198 | PP1030 |
| | | | | | (DKFZp761E198), | | |
| | | | | | mRNA. | | |
| 1462 | 1468 | 3850754 | NM_025249.1 | NM_025249 | KIAA1683 (KIAA1683), | KIAA1683 | MGC131731 |
| | | | | | mRNA. | | |
| 1463 | 1469 | 3990435 | BX282075 | BX282075 | BX282075 | — | — |
| | | | | | NIH_MGC_120 cDNA | | |
| | | | | | clone | | |
| | | | | | IMAGp998M2011561; | | |
| | | | | | IMAGE: 5223355, | | |
| | | | | | mRNA sequence | | |
| 1464 | 1470 | 4010433 | XM_939919.2 | XM_939919 | PREDICTED: similar to | LOC650832 | — |
| | | | | | mitogen-activated | | |
| | | | | | protein kinase kinase 3 | | |
| | | | | | isoform A | | |
| | | | | | (LOC650832), mRNA. | | |
| 1465 | 1471 | 4040086 | XM_936105.1 | XM_936105 | PREDICTED: | LOC642035 | — |
| | | | | | hypothetical protein | | |
| | | | | | LOC642035 | | |
| | | | | | (LOC642035), mRNA. | | |
| 1466 | 1472 | 4040300 | AK054653 | AK054653 | cDNA FLJ30091 fis, | — | — |
| | | | | | clone BNGH41000017 | | |
| 1467 | 1473 | 4060685 | XR_015313.1 | XR_015313 | PREDICTED: similar to | LOC653080 | — |
| | | | | | Beta-glucuronidase | | |
| | | | | | precursor | | |
| | | | | | (LOC653080), misc | | |
| | | | | | RNA. | | |
| 1468 | 1474 | 4120377 | NM_024520.1 | NM_024520 | chromosome 2 open | C2orf47 | FLJ22555; |
| | | | | | reading frame 47 | | DKFZp666A212 |
| | | | | | (C2orf47), mRNA. | | |
| 1469 | 1475 | 4200753 | BI024234 | BI024234 | CM3-MT0357-260101- | — | — |
| | | | | | 690-b10 MT0357 | | |
| | | | | | cDNA, mRNA | | |
| | | | | | sequence | | |
| 1470 | 1476 | 4210286 | XM_938283.1 | XM_938283 | PREDICTED: | C17orf68 | — |
| | | | | | chromosome 17 open | | |
| | | | | | reading frame 68 | | |
| | | | | | (C17orf68), mRNA. | | |
| 1471 | 1477 | 4220364 | NM_134447.1 | NM_134447 | chromosome 19 open | C19orf2 | URI; FLJ10575; RMP; |
| | | | | | reading frame 2 | | NNX3 |
| | | | | | (C19orf2), transcript | | |
| | | | | | variant 2, mRNA. | | |
| 1472 | 1478 | 4230735 | NM_052966.2 | NM_052966 | family with sequence | FAM129A | NIBAN; FLJ38228; |
| | | | | | similarity 129, member | | C1orf24 |
| | | | | | A (FAM129A), | | |
| | | | | | transcript variant 2, | | |
| | | | | | mRNA. | | |
| 1473 | 1479 | 4250192 | BX447862 | BX447862 | BX447862 T CELLS | — | — |
| | | | | | (JURKAT CELL LINE) | | |
| | | | | | cDNA clone | | |
| | | | | | CS0DH002YG04 3- | | |
| | | | | | PRIME, mRNA | | |
| | | | | | sequence | | |
| 1474 | 1480 | 4260296 | NM_003203.3 | NM_003203 | chromosome 2 open | C2orf3 | TCF9; GCF; DNABF |
| | | | | | reading frame 3 | | |
| | | | | | (C2orf3), mRNA. | | |
| 1475 | 1481 | 4290575 | NM_024315.2 | NM_024315 | chromosome 7 open | C7orf23 | MM-TRAG; |
| | | | | | reading frame 23 | | MGC4175 |
| | | | | | (C7orf23), mRNA. | | |
| 1476 | 1482 | 4390086 | AW015915 | AW015915 | UI-H-BI0-aao-g-05-0- | — | — |
| | | | | | UI.s1 | | |
| | | | | | NCI_CGAP_Sub1 | | |
| | | | | | cDNA clone | | |
| | | | | | IMAGE: 2710088 3, | | |
| | | | | | mRNA sequence | | |
| 1477 | 1483 | 4480753 | NM_199283.4 | NM_199283 | hypothetical protein | LOC220686 | — |
| | | | | | LOC220686 | | |
| | | | | | (LOC220686), mRNA. | | |
| 1478 | 1484 | 4540064 | NM_025161.3 | NM_025161 | chromosome 17 open | C17orf70 | FAAP100; FLJ30151; |
| | | | | | reading frame 70 | | FLJ22175 |
| | | | | | (C17orf70), mRNA. | | |
| 1479 | 1485 | 4540386 | XM_379543.4 | XM_379543 | PREDICTED: | LOC401442 | — |
| | | | | | hypothetical | | |
| | | | | | LOC401442 | | |
| | | | | | (LOC401442), mRNA. | | |
| 1480 | 1486 | 4570064 | NR_002186.1 | NR_002186 | hypothetical protein | DKFZp586I1420 | — |
| | | | | | DKFZp586I1420 | | |
| | | | | | (DKFZp586I1420) on | | |
| | | | | | chromosome 7. | | |
| 1481 | 1487 | 4640132 | NM_173518.2 | NM_173518 | chromosome 8 open | C8orf45 | FLJ25692 |
| | | | | | reading frame 45 | | |
| | | | | | (C8orf45), mRNA. | | |
| 1482 | 1489 | 4760537 | NM_199483.1 | NM_199483 | chromosome 20 open | C20orf24 | PNAS-11; RIP5 |
| | | | | | reading frame 24 | | |
| | | | | | (C20orf24), transcript | | |
| | | | | | variant 2, mRNA. | | |
| 1483 | 1490 | 4760601 | XM_001127981.1 | XM_001127981 | PREDICTED: similar to | LOC728014 | — |
| | | | | | huntingtin interacting | | |
| | | | | | protein 1 related | | |
| | | | | | (LOC728014), mRNA. | | |
| 1484 | 1491 | 4850161 | XM_001133058.1 | XM_001133058 | PREDICTED: | LOC728844 | — |
| | | | | | hypothetical | | |
| | | | | | LOC728844 | | |
| | | | | | (LOC728844), mRNA. | | |
| 1485 | 1492 | 4860280 | AK055969 | AK055969 | cDNA FLJ31407 fis, | — | — |
| | | | | | clone NT2NE2000137 | | |
| 1486 | 1493 | 4860309 | XM_376420.3 | XM_376420 | PREDICTED: similar to | LOC401206 | — |
| | | | | | 40S ribosomal protein | | |
| | | | | | S25 (LOC401206), | | |
| | | | | | mRNA. | | |
| 1487 | 1494 | 4860646 | NM_020223.2 | NM_020223 | family with sequence | FAM20C | RNS; DMP4 |
| | | | | | similarity 20, member C | | |
| | | | | | (FAM20C), mRNA. | | |
| 1488 | 1495 | 4880392 | NM_025182.2 | NM_025182 | KIAA1539 (KIAA1539), | KIAA1539 | P1.11659_5; |
| | | | | | mRNA. | | FLJ11560; RP11- |
| | | | | | | | 182N22.6; |
| | | | | | | | bA182N22.6 |
| 1489 | 1496 | 5130661 | NM_019018.1 | NM_019018 | family with sequence | FAM105A | FLJ11127 |
| | | | | | similarity 105, member | | |
| | | | | | A (FAM105A), mRNA. | | |
| 1490 | 1497 | 5220438 | NM_080748.1 | NM_080748 | chromosome 20 open | C20orf52 | MGC111180; |
| | | | | | reading frame 52 | | bA353C18.2 |
| | | | | | (C20orf52), mRNA. | | |
| 1491 | 1498 | 5290433 | BX105338 | BX105338 | BX105338 | — | — |
| | | | | | Soares_pregnant_uterus_NbHPU | | |
| | | | | | cDNA clone | | |
| | | | | | IMAGp998C114347, | | |
| | | | | | mRNA sequence | | |
| 1492 | 1499 | 5310181 | XM_938283.2 | XM_938283 | PREDICTED: | C17orf68 | — |
| | | | | | chromosome 17 open | | |
| | | | | | reading frame 68 | | |
| | | | | | (C17orf68), mRNA. | | |
| 1493 | 1500 | 5340162 | NM_018330.4 | NM_018330 | KIAA1598 (KIAA1598), | KIAA1598 | shootin1; shootin-1; |
| | | | | | mRNA. | | MGC40476; |
| | | | | | | | DKFZp686A0439 |
| 1494 | 1501 | 5420289 | NM_206837.1 | NM_206837 | chromosome 1 open | C1orf102 | NOR1; MGC26685; |
| | | | | | reading frame 102 | | OSCP1 |
| | | | | | (C1orf102), transcript | | |
| | | | | | variant 2, mRNA. | | |
| 1495 | 1502 | 5420349 | XM_937154.1 | XM_937154 | PREDICTED: similar to | LOC648099 | — |
| | | | | | positive cofactor 2, | | |
| | | | | | glutamine/Q-rich- | | |
| | | | | | associated protein | | |
| | | | | | isoform b | | |
| | | | | | (LOC648099), mRNA. | | |
| 1496 | 1503 | 5560279 | XM_001128421.1 | XM_001128421 | PREDICTED: | LOC728069 | — |
| | | | | | hypothetical | | |
| | | | | | LOC728069 | | |
| | | | | | (LOC728069), mRNA. | | |
| 1497 | 1504 | 5720414 | NM_017887.1 | NM_017887 | chromosome 1 open | C1orf123 | FLJ20580; RP5- |
| | | | | | reading frame 123 | | 1024G6.3 |
| | | | | | (C1orf123), mRNA. | | |
| 1498 | 1505 | 5720768 | AL049435 | AL049435 | mRNA; cDNA | — | — |
| | | | | | DKFZp586B0220 (from | | |
| | | | | | clone | | |
| | | | | | DKFZp586B0220) | | |
| 1499 | 1506 | 5810196 | NM_015395.1 | NM_015395 | DKFZP434B0335 | DKFZP434B0335 | FLJ90593; FLJ23419 |
| | | | | | protein | | |
| | | | | | (DKFZP434B0335), | | |
| | | | | | mRNA. | | |
| 1500 | 1507 | 5810632 | NM_014306.3 | NM_014306 | chromosome 22 open | C22orf28 | HSPC117; RP1- |
| | | | | | reading frame 28 | | 149A16.6; |
| | | | | | (C22orf28), mRNA. | | DJ149A16.6 |
| 1501 | 1508 | 5810671 | NM_032350.4 | NM_032350 | chromosome 7 open | C7orf50 | MGC11257; |
| | | | | | reading frame 50 | | YCR016W |
| | | | | | (C7orf50), mRNA. | | |
| 1502 | 1509 | 5820180 | AI539492 | AI539492 | te46f04.x1 | — | — |
| | | | | | Soares_NhHMPu_S1 | | |
| | | | | | cDNA clone | | |
| | | | | | IMAGE: 2089759 3, | | |
| | | | | | mRNA sequence | | |
| 1503 | 1510 | 5820504 | XM_001128859.1 | XM_001128859 | PREDICTED: similar to | LOC728944 | — |
| | | | | | THAP domain- | | |
| | | | | | containing protein 4 | | |
| | | | | | (LOC728944), mRNA. | | |
| 1504 | 1511 | 5960021 | AK023329 | AK023329 | cDNA FLJ13267 fis, | — | — |
| | | | | | clone OVARC1000964 | | |
| 1505 | 1512 | 5960167 | XR_017252.1 | XR_017252 | PREDICTED: | LOC284988 | — |
| | | | | | hypothetical | | |
| | | | | | LOC284988 | | |
| | | | | | (LOC284988), mRNA. | | |
| 1506 | 1513 | 6020433 | NM_198534.1 | NM_198534 | chromosome 19 open | C19orf45 | FLJ35784 |
| | | | | | reading frame 45 | | |
| | | | | | (C19orf45), mRNA. | | |
| 1507 | 1514 | 6100239 | NM_153706.2 | NM_153706 | chromosome 5 open | C5orf35 | MGC33648 |
| | | | | | reading frame 35 | | |
| | | | | | (C5orf35), mRNA. | | |
| 1508 | 1515 | 6110246 | NM_024627.5 | NM_024627 | chromosome 22 open | C22orf29 | FLJ21125 |
| | | | | | reading frame 29 | | |
| | | | | | (C22orf29), mRNA. | | |
| 1509 | 1516 | 6180470 | NM_001025780.1 | NM_001025780 | family with sequence | FAM108B1 | CGI-67; RP11- |
| | | | | | similarity 108, member | | 409O11.2; C9orf77 |
| | | | | | B1 (FAM108B1), | | |
| | | | | | transcript variant 2, | | |
| | | | | | mRNA. | | |
| 1510 | 1517 | 6200747 | XM_941684.2 | XM_941684 | PREDICTED: similar to | LOC220433 | — |
| | | | | | 40S ribosomal protein | | |
| | | | | | S4, X isoform | | |
| | | | | | (LOC220433), mRNA. | | |
| 1511 | 1518 | 6220762 | XM_001134398.1 | XM_001134398 | PREDICTED: | LOC730256 | — |
| | | | | | hypothetical protein | | |
| | | | | | LOC730256 | | |
| | | | | | (LOC730256), mRNA. | | |
| 1512 | 1519 | 6270112 | NM_182901.2 | NM_182901 | chromosome 11 open | C11orf17 | BCA3; AKIP1 |
| | | | | | reading frame 17 | | |
| | | | | | (C11orf17), transcript | | |
| | | | | | variant 1, mRNA. | | |
| 1513 | 1520 | 6280750 | AK128384 | AK128384 | cDNA FLJ46527 fis, | — | — |
| | | | | | clone THYMU3034853 | | |
| 1514 | 1521 | 6370082 | CR743148 | CR743148 | CR743148 | — | — |
| | | | | | NCI_CGAP_GC4 | | |
| | | | | | cDNA clone | | |
| | | | | | IMAGp971L0563; | | |
| | | | | | IMAGE: 1550800 5, | | |
| | | | | | mRNA sequence | | |
| 1515 | 1522 | 6520241 | NM_001001794.2 | NM_001001794 | family with sequence | FAM116B | MGC33692 |
| | | | | | similarity 116, member | | |
| | | | | | B (FAM116B), mRNA. | | |
| 1516 | 1523 | 6520661 | NM_018465.2 | NM_018465 | chromosome 9 open | C9orf46 | FLJ39176; FLJ14688; |
| | | | | | reading frame 46 | | AD025; MDS030 |
| | | | | | (C9orf46), mRNA. | | |
| 1517 | 1524 | 6550139 | XR_018917.1 | XR_018917 | PREDICTED: similar to | LOC441034 | — |
| | | | | | 60S ribosomal protein | | |
| | | | | | L7a (LOC441034), | | |
| | | | | | mRNA. | | |
| 1518 | 1525 | 6560072 | AW954199 | AW954199 | EST366269 MAGE | — | — |
| | | | | | resequences, MAGC | | |
| | | | | | cDNA, mRNA | | |
| | | | | | sequence | | |
| 1519 | 1526 | 6560176 | AI821401 | AI821401 | ye15f04.x5 Stratagene | — | — |
| | | | | | lung (#937210) cDNA | | |
| | | | | | clone IMAGE: 117823 3 | | |
| | | | | | similar to contains | | |
| | | | | | element MER6 | | |
| | | | | | repetitive element;, | | |
| | | | | | mRNA sequence | | |
| 1520 | 1527 | 6580129 | NM_020233.4 | NM_020233 | chromosome 17 open | C17orf48 | MDS006; NBLA03831 |
| | | | | | reading frame 48 | | |
| | | | | | (C17orf48), mRNA. | | |
| 1521 | 1528 | 6620292 | NM_022153.1 | NM_022153 | chromosome 10 open | C10orf54 | PP2135; GI24; SISP1 |
| | | | | | reading frame 54 | | |
| | | | | | (C10orf54), mRNA. | | |
| 1522 | 1529 | 6660296 | NM_058188.1 | NM_058188 | chromosome 21 open | C21orf67 | PRED54; |
| | | | | | reading frame 67 | | MGC149387; |
| | | | | | (C21orf67), mRNA. | | MGC149386 |
| 1523 | 1530 | 6660711 | NM_025138.3 | NM_025138 | chromosome 13 open | C13orf23 | FLJ23780; |
| | | | | | reading frame 23 | | bA50D16.2; RP11- |
| | | | | | (C13orf23), transcript | | 50D16.2; FLJ12661 |
| | | | | | variant 1, mRNA. | | |
| 1524 | 1531 | 6840324 | NR_002803.1 | NR_002803 | RPL13-2 pseudogene | LOC283345 | RRPL13L |
| | | | | | (LOC283345) on | | |
| | | | | | chromosome 12. | | |
| 1525 | 1532 | 6900458 | XR_015292.1 | XR_015292 | PREDICTED: similar to | LOC728481 | — |
| | | | | | similar to RPL23AP7 | | |
| | | | | | protein (LOC728481), | | |
| | | | | | mRNA. | | |
| 1526 | 1533 | 6900520 | XM_942586.1 | XM_942586 | PREDICTED: | LOC651309 | — |
| | | | | | hypothetical protein | | |
| | | | | | LOC651309 | | |
| | | | | | (LOC651309), mRNA. | | |
| 1527 | 1534 | 6940181 | NM_152644.2 | NM_152644 | family with sequence | FAM24B | MGC45962; |
| | | | | | similarity 24, member B | | DKFZp667I0323 |
| | | | | | (FAM24B), mRNA. | | |
| 1528 | 1536 | 7000274 | XM_929431.1 | XM_929431 | PREDICTED: similar to | LOC644039 | — |
| | | | | | 60S ribosomal protein | | |
| | | | | | L10 (QM protein) | | |
| | | | | | (Tumor suppressor | | |
| | | | | | QM) (Laminin receptor | | |
| | | | | | homolog) | | |
| | | | | | (LOC644039), mRNA. | | |
| 1529 | 1537 | 7050463 | DA098517 | DA098517 | DA098517 BRACE3 | — | — |
| | | | | | cDNA clone | | |
| | | | | | BRACE3009543 5, | | |
| | | | | | mRNA sequence | | |
| 1530 | 1538 | 7100632 | NM_152350.2 | NM_152350 | chromosome 17 open | C17orf45 | MGC40157; |
| | | | | | reading frame 45 | | FLJ25777 |
| | | | | | (C17orf45), mRNA. | | |
| 1531 | 1539 | 7150017 | NM_001040437.1 | NM_001040437 | chromosome 6 open | C6orf48 | G8; D6S57 |
| | | | | | reading frame 48 | | |
| | | | | | (C6orf48), transcript | | |
| | | | | | variant 1, mRNA. | | |
| 1532 | 1540 | 7210161 | BX101409 | BX101409 | BX101409 | — | — |
| | | | | | NCI_CGAP_Pr1 cDNA | | |
| | | | | | clone | | |
| | | | | | IMAGp998B182517, | | |
| | | | | | mRNA sequence | | |
| 1533 | 1541 | 7210300 | NM_173473.2 | NM_173473 | chromosome 10 open | C10orf104 | FLJ33728; |
| | | | | | reading frame 104 | | bA570G20.3 |
| | | | | | (C10orf104), mRNA. | | |
| 1534 | 1542 | 7210484 | NM_199184.1 | NM_199184 | chromosome 6 open | C6orf108 | RCL; RP3-330M21.3; |
| | | | | | reading frame 108 | | dJ330M21.3 |
| | | | | | (C6orf108), transcript | | |
| | | | | | variant 2, mRNA. | | |
| 1535 | 1543 | 7330070 | NM_174919.2 | NM_174919 | hypothetical protein | LOC201175 | — |
| | | | | | LOC201175 | | |
| | | | | | (LOC201175), mRNA. | | |
| 1536 | 1544 | 7330523 | NM_001014279.1 | NM_001014279 | chromosome 5 open | C5orf39 | AX2R; AXIIR |
| | | | | | reading frame 39 | | |
| | | | | | (C5orf39), mRNA. | | |
| 1537 | 1545 | 7380390 | NR_002773.1 | NR_002773 | AOC3 pseudogene | LOC90586 | — |
| | | | | | (LOC90586) on | | |
| | | | | | chromosome 17. | | |
| 1538 | 1546 | 7610309 | AV652851 | AV652851 | AV652851 GLC cDNA | — | — |
| | | | | | clone GLCDEG06 3, | | |
| | | | | | mRNA sequence | | |

| RNA1538 | | | | Minimal p- |
|---|---|---|---|---|
| Index | Probe Sequence | P or N Predictor or HSK gene | Minimal p-value Precision-weighted T-test | value Standard Heteroscedastic T-test |
| 1 | ATATTCCATCCTGCCCAA | N | 0.037332164 | 0.000988007 |
| | CCCTTCCTCTCCCATCCT | | | |
| | CAAAAAAGGGCCAT | | | |
| 2 | GCCCAGAGAGAGCTGTC | P | 0.001981785 | 0.00068905 |
| | CTCTCATTGGGTGAACTG | | | |
| | ATTGAGGAAGGGTCT | | | |
| 3 | ACCTAACGGTTCTCATGC | N | 0.018504517 | 0.011526675 |
| | GGTGCGTAATTGTAGATG | | | |
| | CATGTACTTGTGTG | | | |
| 4 | TCAGCACATGGAAGGCC | P | 0.032983026 | 0.002980549 |
| | CCTGGTATGGACACTGAA | | | |
| | AGGAAGGGCTGGTCC | | | |
| 5 | TCACAGTTCTGGAGGCTG | N | 0.017352387 | 0.00246003 |
| | AGAAGATCGTGAGGCTG | | | |
| | CATCTGGCAAGGGCC | | | |
| 6 | GACCCCCTTTTAAGCCAG | N | 0.041675799 | 0.020246951 |
| | TGAGCTGGGCTTCAGTTT | | | |
| | TTCCCAGGCCATGC | | | |
| 7 | GAATACTTCTCTTGCTGA | P | 0.017275273 | 0.009130841 |
| | GAGCCGATGCCCGTCCC | | | |
| | CGGGCCAGCAGGGAT | | | |
| 8 | GCAAAAGTGAAGCAGGA | P | 0.01225196 | 0.001468372 |
| | AAGAAGGGCCCTGGCAG | | | |
| | GCCAACAGGCTCAAAG | | | |
| 9 | CTCGGCTACAACATGCG | N | 0.025693928 | 5.44535E−05 |
| | GTCAAACTTGTTTCGAGG | | | |
| | GGCTGCTGAGGAGAC | | | |
| 10 | AAGCAGCTGGTGTGGCA | P | 0.040720428 | 0.002633846 |
| | GGTTCAGGAGAAGTGGC | | | |
| | ACCTGGTGGAGGACCT | | | |
| 11 | GGATTCTAGGTGGACATT | N | 0.005331291 | 0.003121417 |
| | ACAGAGTTGAATTCCTCA | | | |
| | CTACCCCCTCCCGC | | | |
| 12 | GCTGTCCCTTGGGAATG | P | 0.02710595 | 0.006979527 |
| | GGCCCTCAGAGGACAGT | | | |
| | GCTTCCAAGTACATCT | | | |
| 13 | GCTCTCTGCCTCCGGTCA | P | 0.014982241 | 0.004435676 |
| | CTCTTGCTGTGGTGCTAC | | | |
| | GTGGAAGTGAATGG | | | |
| 14 | GGACTTGTTACTAAGCAG | N | 0.021401921 | 3.61367E−05 |
| | ATTTAAGGGTCAGTGGG | | | |
| | GGAAGGCTATCAACC | | | |
| 15 | GAACCAGTAGTCCAGGG | P | 0.028514638 | 0.000900452 |
| | TGGCTCACAAAGACCACT | | | |
| | TTGAGGCTCTTGCTC | | | |
| 16 | TAAGGCCCTGCACTGAAA | P | 0.024090015 | 0.004075409 |
| | ATGCAAGCTCAGGCGCC | | | |
| | GGTGGTCGTTGTGAC | | | |
| 17 | GATAGGATTCCTTAAGAT | N | 0.027728716 | 6.12919E−05 |
| | GTTACCACCCAGGGGGC | | | |
| | CACAAGCCAGCCTGC | | | |
| 18 | GTACCGCTGCCAACACC | N | 0.002720448 | 0.001024047 |
| | CATTGACCTCCTCGTTTT | | | |
| | TGCCCGCCTTCTCCA | | | |
| 19 | CTGTGGGAGGGCTTCTT | N | 0.028462166 | 0.000297434 |
| | CCCTGTGCGCTGTTGCC | | | |
| | CATCCAAGCCTAATAT | | | |
| 20 | TCAGAGGATGAGGAGGA | P | 0.028825106 | 0.000852077 |
| | GTATGTTGTGGAGAAGGT | | | |
| | GCTAGACAGGCGCGT | | | |
| 21 | CTCCACTGGTGACAGAG | N | 0.024597969 | 8.99202E−05 |
| | AAGACACCAGGGTTTGG | | | |
| | GGGATGCCTGGGACTT | | | |
| 22 | GGGACTCAGCATTTTCCA | N | 0.021834229 | 0.000496175 |
| | GTCTTTTTCAGGGGTAGA | | | |
| | CAGGGGAGCCTGGG | | | |
| 23 | ATGTAGCAGAATGGCACC | P | 0.007622049 | 0.000468379 |
| | CAGACCACTGCCCACCA | | | |
| | GTGACGGACATGCAC | | | |
| 24 | GCAGTGATCAGGGTCCT | N | 0.035419444 | 0.000372001 |
| | GCAAGCAGTGGGGAAGG | | | |
| | GGGCCAAGGTATTGGA | | | |
| 25 | ACATGTTCCGATGCCTGT | P | 0.00391759 | 0.002067277 |
| | GGAAGACATGCCGACGT | | | |
| | CTCCTCTGCCTAGGG | | | |
| 26 | ACACAGAGGAAGTTGGC | P | 0.041093374 | 0.014034901 |
| | TAGAGGCCGGTCCCTTC | | | |
| | CTTGGGCCCCTCTCAT | | | |
| 27 | TCAGGAGGGGCCAAGAA | N | 0.046922294 | 0.000644216 |
| | CCAGGGGGCCATCAAAA | | | |
| | GCATCGGGATTTGGCA | | | |
| 28 | GAGGTGTTTGCATGTGG | P | 0.012859845 | 0.00253581 |
| | CCATTACCGTCATTGGCC | | | |
| | TGTGAAGCATTGGAC | | | |
| 29 | AGGCTCGGGGGTCCCCG | N | 0.040045541 | 0.005852028 |
| | CGTCCCAGGCCCAGGGG | | | |
| | GATGGGGGTCGCGAGA | | | |
| 30 | TACGCCTTCAGCGAGAAC | P | 0.043127654 | 0.000581297 |
| | CCTCTGCCCACAGTGGA | | | |
| | GATTGCCATCCGGAA | | | |
| 31 | GTGGTCTGTAGCCCAATA | N | 0.005178045 | 5.12006E−05 |
| | ACTGGGGAACGAGTTAC | | | |
| | AGACAAACATCACCG | | | |
| 32 | GAGTCTTCGTGGATGATG | P | 0.002407557 | 0.000800511 |
| | TGACCATTGAGGACCTGT | | | |
| | CAGGCTACATGGAG | | | |
| 33 | GTGCTGCATTGTCTGAAG | P | 0.01846435 | 0.004300257 |
| | TTAGCACCTCTTGGACTG | | | |
| | AATCGTTTGTCTAG | | | |
| 34 | CTGTTCCGATTTGCCTCT | P | 0.032766586 | 0.003191998 |
| | GAGAACGATCTCCCAGAA | | | |
| | TGGAAGGAGCGAGG | | | |
| 35 | CTAGTCCCCCCACTAGAG | N | 0.034820338 | 4.92477E−05 |
| | ACTGAGAAGTTGCCTCGC | | | |
| | AAACGAGCAGGGGC | | | |
| 36 | GAGGCTTGCTCCTATGG | P | 0.019029343 | 0.00117229 |
| | CTCCATTCCTGTGGTGGA | | | |
| | AGACGTGATGACAGC | | | |
| 37 | GATGGAGTTGACCTGGC | P | 0.03824342 | 0.001544114 |
| | AATGATCTGTGGCTAACA | | | |
| | TGCCGTCTCTCTGCC | | | |
| 38 | GAGCACCTTGTTACAGTT | P | 0.002915199 | 0.000206666 |
| | CCGGCCTCTCAGTATGTG | | | |
| | GGCTAAATGCCAGC | | | |
| 39 | CAGCCAAGAGCTGAGGG | P | 0.019880093 | 0.015887782 |
| | TAAGGGCAGGTAGGCGT | | | |
| | GAGGCTGTGGACATTT | | | |
| 40 | CACTGCAGGGCAGCGGG | N | 0.027593311 | 0.003370428 |
| | TATTCTCCTCCCCACCTA | | | |
| | AGTCTCTGGGAAGAA | | | |
| 41 | GTTTGGTCAAGGGGTAG | P | 0.011246471 | 0.005489624 |
| | GTGCAACCCAATGGACC | | | |
| | ACTTATGCAAAAGATG | | | |
| 42 | ATGGGGCACAGAGGAAG | N | 0.043753676 | 0.000552001 |
| | TTGCTGCTTGGCTGGATC | | | |
| | TGCTCAATTTGGGAG | | | |
| 43 | GTTGGTGGTGTTTGAGG | N | 0.000868885 | 0.000483754 |
| | GTTGGCTAGAAATGAAAG | | | |
| | CCTGGATTTTGTGCC | | | |
| 44 | GGCCAAGGCCATCTCCA | P | 0.049414262 | 0.000696972 |
| | AGAACGTGCTCTTCGCTC | | | |
| | ACCTGGATGACAACG | | | |
| 45 | CTGTAATTAGCTCCACGT | N | 0.041201724 | 0.000981316 |
| | GTACCCCCTTCACTCCCT | | | |
| | CCCACCAGCTCTGC | | | |
| 46 | AGTGGAGCGGCCGCCGG | P | 0.002800365 | 0.00326773 |
| | AGATGCCTGACGCATCTG | | | |
| | TCTGAGGAGCGGTCA | | | |
| 47 | CGCCTGATGTCGGGACA | P | 0.019848148 | 0.009406841 |
| | GCCCTGCTCCCAAGTACA | | | |
| | AATAGAGTGACCCGT | | | |
| 48 | CCAGATGGCATGGTTGCT | N | 0.000707601 | 0.000469973 |
| | CTATTGGACTACCGTGAG | | | |
| | GATGGTGTGACCCC | | | |
| 49 | GCACCCAGCGGAATGTG | HSK | HSK | HSK |
| | CTTAGTATTTGGTCACCA | | | |
| | GCCGTCATCCTGGGC | | | |
| 50 | TCCAGCAGTGGTCATTCG | N | 0.009966308 | 0.001088538 |
| | ACAACGAAAGTCATACCG | | | |
| | TAGAAAAGATGGCG | | | |
| 51 | CAGACCCAGAGAAAAGTA | N | 0.013671386 | 0.002749976 |
| | GTTGTCAGTCATAGCACA | | | |
| | CATCGGACATTTGG | | | |
| 52 | GCAATGGTAAACCTCGAG | N | 0.001814082 | 9.08413E−05 |
| | ACAACAAACAAGCAGGG | | | |
| | GTGTTTGAACCAACC | | | |
| 53 | GTGAGCCTGGGCCCTAC | P | 0.009398616 | 0.000918585 |
| | ATGGATGTGGTCGTCTCC | | | |
| | CTGGTCACTATCATG | | | |
| 54 | CAGAGGCAGAGGATGCT | N | 0.001627582 | 0.000849497 |
| | GCAAGAGAGAAAAGCTG | | | |
| | CAAAAGAGGCCGCCGC | | | |
| 55 | GTTGGGGAAGAGGATAA | N | 0.009360761 | 5.94033E−05 |
| | GGTTATATCTAGGACAAC | | | |
| | TCTTTGAGTTGGTCC | | | |
| 56 | CTGAGAAGGAACTGGCT | N | 0.001468154 | 0.000118685 |
| | GCTGAAAAGAAACGCATC | | | |
| | CTGCACTGCCTGGGG | | | |
| 57 | CGAAGTCAGAAAACTCAT | P | 0.006818317 | 0.000590803 |
| | CATCAGGCGACGCCCTG | | | |
| | GCGGCTGGGTGGAGA | | | |
| 58 | GGGCAAACCCAAAGATG | N | 0.019614515 | 1.54054E−06 |
| | GAAAGTGCTTGTTGGGTG | | | |
| | GGTAAGCACCACCTG | | | |
| 59 | ATGTACGTGGGGGATTCT | N | 0.012771344 | 1.7475E−05 |
| | TGACTCGGGTTAGTCTCT | | | |
| | GGGGATGCAGAGCC | | | |
| 60 | TTTCGTTTGAGTCCTGCT | P | 0.012870801 | 0.007058607 |
| | GTTGGTGTCGGAGCACG | | | |
| | AGGGGAGGCACGGTG | | | |
| 61 | GGACCCTGTTGCTAAGC | P | 0.004036969 | 0.000411885 |
| | CCCAGCAAGCAATCCTAG | | | |
| | GTAGGGTTTAATCCC | | | |
| 62 | CAGTGTGGTGAAGGTTG | N | 0.004098879 | 0.001708665 |
| | ACTGAAGAAGTCCAGTGT | | | |
| | GTCCAGTTAAAACAG | | | |
| 63 | CAACTTTCAGAGCCTCTT | P | 0.007348034 | 0.000538906 |
| | GTATTTGGAAGGCTGGAA | | | |
| | GGGCCCAGACTTTG | | | |
| 64 | ACACAGTAGCGATGGAG | P | 0.008240878 | 0.000130326 |
| | GTGACGTAGCTTCCTCCG | | | |
| | AGTGGAACTGCAGCC | | | |
| 65 | CCCTCCCTGTGGAGCCT | P | 0.010600382 | 0.003694658 |
| | GTTACCTCCGCATTTGAC | | | |
| | ACGAGTCTGCTGTGA | | | |
| 66 | GTTTGGTGTGTTCCCGCA | P | 0.030046219 | 0.000791838 |
| | AACCCCCTTTGTGCTGTG | | | |
| | GGGCTGGTAGCTCA | | | |
| 67 | AGCCATAGCTGGTGACAA | N | 0.015966527 | 0.008984203 |
| | ACAGATGGTTGCTCAGG | | | |
| | GACAAGGTGCCTTCC | | | |
| 68 | GCGCCTTTCTCATCAGCT | N | 0.008279154 | 0.005651563 |
| | TCTTCCGAGGGTGACAG | | | |
| | GTGAAAGACCCCTAC | | | |
| 69 | CATGGAGGGCAAAGAGC | N | 0.018391268 | 0.000887428 |
| | TCAGCAAAGGGCAAGCC | | | |
| | AAGAAGCTGAAGAAGC | | | |
| 70 | GCATTGGGGCCAAACAC | P | 0.029415319 | 0.015178021 |
| | AGAATCAGCAAAGAGGA | | | |
| | GGCCATGCGCTGGTTC | | | |
| 71 | GCATCAGACTTTTAATCT | P | 0.021705071 | 0.001460624 |
| | GAGGGTCCAGGGTTCAA | | | |
| | GTCCCTGTTCGGGCG | | | |
| 72 | GGGGAGAGGAAAAGTGG | N | 0.024140153 | 0.020459406 |
| | ATGGAAGTGTCTGGAAAG | | | |
| | GGCACGAGAGAGTCT | | | |
| 73 | TGCCAGAACACAAGACAC | N | 0.033188881 | 0.006635147 |
| | CAAATTGAACTCACTGCT | | | |
| | TTTGAGGCATCTGG | | | |
| 74 | AGCATCTTTCATATGGTA | N | 0.014552301 | 0.00674199 |
| | GGAACCAACAAGGAAACT | | | |
| | TTCCTTTAACTCCC | | | |
| 75 | TACCGCCTCCTCCCCGTC | N | 0.041006567 | 3.6805E−05 |
| | GCTCTGCCTTTTCCAAAA | | | |
| | CTCACTTGGGCCCT | | | |
| 76 | GAACCCGCGTGCAACCT | P | 0.015932773 | 0.019756877 |
| | GTCCCGACTCTAGCCGC | | | |
| | CTCTTCAGCACGCCAT | | | |
| 77 | CCCCTTGGGGAAGACGA | N | 0.004848855 | 0.00204549 |
| | AGGGATGCTGCAGTTCC | | | |
| | AAAAGAGAAGGACTCT | | | |
| 78 | CCTCTGCTCCTCCCTTCC | N | 0.002769245 | 0.001149087 |
| | CAAGGCATTGAAGCTGAA | | | |
| | TGTGCCAACTGGCA | | | |
| 79 | GCTTGTGGGTCATCTTGC | P | 0.005689907 | 3.51486E−05 |
| | ACCTTTACAAACAAGGAA | | | |
| | TTCCCCTCTGTGCC | | | |
| 80 | CTTTTTTGTACGTAGCTG | N | 0.009261833 | 0.002535233 |
| | TTACATGTAGGGCAATCT | | | |
| | GTCTTTAAGTAGGG | | | |
| 81 | CCCACCATCACCTCAAAC | N | 0.003288948 | 0.003275589 |
| | CCAATCACCCCCTCCTCT | | | |
| | GTATGCTGTCACAC | | | |
| 82 | GGGGGCACTATAGCCAC | N | 0.008604899 | 0.000681996 |
| | TAAACGAGGTGTGAAAG | | | |
| | GCTCAAGAGGATGACC | | | |
| 83 | AAAGTACTGCGCGACAAT | P | 0.011343988 | 0.00097227 |
| | ATCCAGGGCATCACCAA | | | |
| | GCCGGCCATCCGGCG | | | |
| 84 | GGGGAAGCCCGGGGCC | N | 0.031645706 | 0.000409337 |
| | GCCCGGGACCTCGGCCC | | | |
| | GTTCCTCCGGACCCGAG | | | |
| 85 | CCGGGCTCCTAGCGGGG | N | 0.026199581 | 7.30733E−05 |
| | AAAAGGAAGGGGATAACT | | | |
| | CAGAGGAACAGACAC | | | |
| 86 | GAGCAAAACTGCACAAAC | N | 0.00257002 | 0.000470189 |
| | TTGCACATTGGAAAGTGC | | | |
| | AACAAGTTCCCGTG | | | |
| 87 | CGCCACTTCATGGAGCT | P | 0.007681502 | 0.003121849 |
| | GGTGACTTGTGGCCTTTC | | | |
| | CAAAAACCCATATCT | | | |
| 88 | GGTGGCTGCGCGAGGGA | N | 0.000207886 | 0.000291014 |
| | CCGAGTACTAGAGCTGCT | | | |
| | TGCATGCGTTACTAA | | | |
| 89 | CTGCACTGCGTGCTGGT | P | 0.028714119 | 0.013807898 |
| | GACGAATCCACATTCATC | | | |
| | TCAATGGAAGGATCC | | | |
| 90 | AAGGACTCTTCCACCAGA | N | 0.008984509 | 0.002853643 |
| | GATGGGAAAACCACTGG | | | |
| | GGAGGACTAGGACCC | | | |
| 91 | GTGGGTCTCACCTCTCCA | N | 0.031525302 | 0.000801824 |
| | TTGTTCTCTTGTTCTATG | | | |
| | GGGCAGGTTTGGGG | | | |
| 92 | ACCAAGGGAGAACCAGG | P | 0.005085163 | 0.000658284 |
| | AAACGGAAACAGAGTGG | | | |
| | TCATTCCCCAGCCCGG | | | |
| 93 | GGGGCATCTGGCATGGA | N | 0.024159522 | 0.000179822 |
| | CTGGGGTGGAAATGGGG | | | |
| | ATGTCAGTTTGAAAGC | | | |
| 94 | GCCTGAGGTGACAGACA | P | 0.027191026 | 0.001043909 |
| | GGGCAGGTGGTAACAAA | | | |
| | ACCGTTGAACCTCCCA | | | |
| 95 | CATGGCCAAACGTACCAA | N | 0.020811279 | 0.012763214 |
| | GAAAGTCGGGATCGTCG | | | |
| | GTAAATACGGGACCC | | | |
| 96 | GCTCCGTGTTGGAAAAAA | N | 0.001352071 | 0.000494316 |
| | GGGGTAGTGCATTTTAAA | | | |
| | TTGACCTTCATACG | | | |
| 97 | GGGGTCTGTGAGAGTAC | N | 0.002473879 | 0.003326958 |
| | ATGTATTATATACAAGCA | | | |
| | CAACAGGGCTTGCAC | | | |
| 98 | GGCACAGGCTCTGCCGT | P | 0.007554333 | 6.88269E−05 |
| | GTCCTTGGAGTGAAAGAC | | | |
| | TCTTTTTACCAGAGG | | | |
| 99 | CCTGTTCCCTTCATTGCT | N | 0.047157776 | 0.008599342 |
| | GTGAGTTGGGAGTGCATT | | | |
| | GAGAGATGATGTCC | | | |
| 100 | GACCGGAAGCAACCCCT | N | 0.002980627 | 0.004409495 |
| | TCACAGACACGAGCACAT | | | |
| | CGGCAAACCCTATGA | | | |
| 101 | CCACTTCTGAGGAATGGA | N | 0.007523301 | 0.000712361 |
| | CCTGGTGTAACACACTTG | | | |
| | AATATGTGTGATGC | | | |
| 102 | CCAGCTCTACCAGCCCCT | P | 0.00400794 | 0.00250033 |
| | CAAGGATCGAGAAGATG | | | |
| | ACCAGTACAGCCACC | | | |
| 103 | CGGGCTGGCCCACCTCG | P | 0.005823665 | 0.003599139 |
| | TTTTGCTAGTGAAGAGAG | | | |
| | GCGAGAAATTGCTGA | | | |
| 104 | AGTAAGGGATCGAAGAC | N | 0.015966542 | 0.000690126 |
| | ATTTCAAATTGCTATCTCC | | | |
| | ATCTGGGCTGATCC | | | |
| 105 | GGCTGCAAGCTGGATAC | P | 0.031574076 | 0.00482945 |
| | ATGGAATTCAGCACACTT | | | |
| | TTCTCCCTCTTACTG | | | |
| 106 | GGCATTTACGTTTCTCTG | N | 0.006538796 | 0.002363376 |
| | ATGCTCCCTTGAAGCCAT | | | |
| | AGAATTTAGGGGCT | | | |
| 107 | GCAGCCCTAGAAAGTAA | N | 0.020468039 | 6.36589E−05 |
| | GCCCAGGGCTTCAGATC | | | |
| | TAAGTTAGTCCAAAAG | | | |
| 108 | TGGGAGCCCCATTGCCT | P | 0.0465622 | 0.002572124 |
| | CTGTCTCCTTCGGTGCCT | | | |
| | GCAGAGACTTTGTCT | | | |
| 109 | AACTGGTTGTGGGGAGG | N | 0.024268598 | 2.92395E−05 |
| | GAAGAGAAGGACAGGGT | | | |
| | GTTGGGGGGATGAGGA | | | |
| 110 | TACAGAACCATCCACTTG | N | 0.003269445 | 0.009058255 |
| | ACCTAACTACCTCCCCTG | | | |
| | GCCGCGCTCTCGCT | | | |
| 111 | TCCAAGGCCTGGATGCTA | N | 0.002557283 | 0.000924193 |
| | ATCAAGATGAACAGGTCG | | | |
| | ACTTTCAAGAATTC | | | |
| 112 | CCAGGGGAGGTGGGTAG | N | 0.02074243 | 4.5543E−05 |
| | AGCCCGAGGCCCCCCAG | | | |
| | TAGCCGACCCTGGCGT | | | |
| 113 | CCCGGGAGTGGATTCTA | P | 0.019704852 | 0.006056356 |
| | AATGTGATTTTCCTAGGC | | | |
| | TACTGCAGGAGCCCC | | | |
| 114 | GAGCACTCAACCCAGAA | P | 0.002545834 | 0.002083034 |
| | GGCGAAGATAGCTTTTGG | | | |
| | TTGTAGGCGGCTTCC | | | |
| 115 | GTCACCGAAAAGTGCTG | P | 0.029826357 | 0.001671524 |
| | CGGGATAACATCCAAGG | | | |
| | CATCACCAAACCGGCC | | | |
| 116 | CGACTCTCAAGGCACTGT | P | 0.038275024 | 0.012053236 |
| | GTATGCCCTGCAAGTTGG | | | |
| | CTGTCTATGAGCAT | | | |
| 117 | GCTGTCTAGGTCCGTCC | N | 0.006981971 | 0.007950141 |
| | GGTGTGTCAGATTTTCCT | | | |
| | CAGATTAGATGTGCC | | | |
| 118 | GATCTCACTGACCCGTTG | N | 0.010236169 | 0.007717381 |
| | CCCTGTAACCACTTTCTT | | | |
| | TCCTTCTTTTGCCT | | | |
| 119 | GTTTTGGTTGTGAATCAT | N | 0.030427324 | 0.000332984 |
| | TTGCCAGCGAGCCAAGG | | | |
| | GAGAGGCAGGGATTC | | | |
| 120 | AGGGAAGTGGGATCCGA | N | 0.01803385 | 0.000812944 |
| | GCCTGTAGAAGGGAGGC | | | |
| | ATGAAACTTGTGGAGG | | | |
| 121 | TTACGTTATCTACCAGAG | N | 0.0214931 | 0.008021978 |
| | CACCGTGGGCTGTTACTT | | | |
| | GCCTTGAGTTGGAA | | | |
| 122 | GGGCTGAAAACTGCCCTT | P | 0.004239413 | 0.002122611 |
| | GGGCTGACTTTTGATAGG | | | |
| | CCATGCCTTGCCAC | | | |
| 123 | GCACAGCGTCCTGTCCA | N | 0.004334836 | 0.00529578 |
| | CACCCAGCTCAGCATTTC | | | |
| | CACACCAAGCAGCAA | | | |
| 124 | GTAACCCTCCAGTGGTG | P | 0.019628615 | 0.001216422 |
| | GAAGGCACACCATGGCT | | | |
| | TCCTCTGCTTGGTTTG | | | |
| 125 | GTTGAGGGAGTCAGCAC | P | 0.022339333 | 0.002482027 |
| | AGTCCTTTCTGCAGCTTC | | | |
| | TAACCCAGGACCATG | | | |
| 126 | GTGTCCCTGGAGCAGTG | N | 0.014752098 | 0.001847445 |
| | AGGGGACACCAGCAAAA | | | |
| | ACCTTCAGCTCTCAGA | | | |
| 127 | GCCTTCGGTTGTAAGTAG | N | 0.038065763 | 0.032809685 |
| | CCAGATCCCTCTCCAGTG | | | |
| | ACATTGGAACATGC | | | |
| 128 | CCAGACTGTGATGACTG | N | 0.009421378 | 0.006557969 |
| | GGAGCGGGCTGAATGAG | | | |
| | ATGGAGTGTGCATTAC | | | |
| 129 | GCCCTCTCTGTGGATCCC | N | 0.009864615 | 0.015626713 |
| | TACTGCTGGTTTCTGCCT | | | |
| | TCTCCATGCTGAGA | | | |
| 130 | GCCTCAGGAAAACAAGA | P | 0.048658712 | 0.001081202 |
| | CCTCTGTGCACCTCACTT | | | |
| | TTGGCTCACTGCAGC | | | |
| 131 | TGTAAGACGAACTTGGAT | N | 0.029901567 | 0.000120075 |
| | CACGGCTTGGTTCAGCA | | | |
| | GAGCATGGGGGCGGG | | | |
| 132 | AACCCAGGGCTTTAGAAG | N | 0.008491795 | 8.92123E−06 |
| | GCTGAGGCTGGGGGATT | | | |
| | GCTTGAAGTCAGGAG | | | |
| 133 | TCACTTGGGAGGGACGC | N | 0.001572086 | 0.00042732 |
| | ATAGAAGGAGCTCTAGGA | | | |
| | ACACAGTGCCAGTGC | | | |
| 134 | CAAAGGGGCATCGGAGA | P | 0.011706711 | 0.003529377 |
| | AGTGCAGCTGCTGTGCC | | | |
| | TGATGTGGGAACAGCT | | | |
| 135 | ACCTGAAGCAGCAAGTG | P | 0.039208835 | 0.021102604 |
| | AGCGGGCTGGAGGGTGT | | | |
| | GCAGGACGACCTGTTC | | | |
| 136 | TCTCAAACCCGGTATGGT | N | 0.045388658 | 0.022274481 |
| | GGTCACCTTTGCTCCAGT | | | |
| | CAACGTTACAACGG | | | |
| 137 | GTCACGACATCCGAACTG | N | 0.015344888 | 0.000886132 |
| | GAGGGACAAGGATCTTAA | | | |
| | ACCCAAAGTACGAG | | | |
| 138 | GCTGCTAAAGTTCCAGCA | N | 0.046979583 | 0.014494505 |
| | AAAAAGATCACCGCCGC | | | |
| | GAGTAAAAAGGCTCC | | | |
| 139 | TAGCTGCTACCCTGGAAC | P | 0.020581476 | 0.003669674 |
| | GGTGGGCAGAGAGCCTA | | | |
| | CTAGGAAATGTGCAG | | | |
| 140 | GAAGAGTAACAAGAGTAG | N | 0.002215247 | 0.000437489 |
| | ACTGGACCAGAAATCGG | | | |
| | AGGGTGGCAAGCAGC | | | |
| 141 | CGAGAGTGCCCTTCTGAT | P | 0.00404049 | 0.000434785 |
| | GAATGTGGTGCTGGGGT | | | |
| | GTTTATGGCAAGTCA | | | |
| 142 | GGTGCTGATCCTACCACC | P | 0.002534122 | 0.001605959 |
| | TACTGCTACCTTCCTTAG | | | |
| | CTTCACCCTGGCTA | | | |
| 143 | ACCCTACTCTTCGGCCCC | P | 0.018495536 | 0.00116788 |
| | GCCAGCTCTCCATCTCAC | | | |
| | ACTTTAAGAGCCTC | | | |
| 144 | CGTAACCAAAGAACGACA | N | 0.042699055 | 0.003989645 |
| | CAGAGAGATCAACAAGCA | | | |
| | AGCCACCCGAGGGG | | | |
| 145 | GAAGTAGCCCCAGTGAG | P | 0.008798324 | 0.000770132 |
| | TGTTAGTGATGCAGCTCT | | | |
| | CCTGGCCCCAGAGGA | | | |
| 146 | GTGAGTGGTCTCTGTCG | N | 0.012969873 | 4.57892E−05 |
| | GGAAAGATGTAGGGATT | | | |
| | GGTTCTCCAGGATCTT | | | |
| 147 | CACAGCCTTACTAGTTCC | N | 0.007897073 | 0.007786129 |
| | TTGCTTCCAGTATTTCAAT | | | |
| | TGGTCTCCTCCCC | | | |
| 148 | GGCGGCCTCATCGTTCTT | P | 0.008495878 | 0.01270945 |
| | TGCCTTCCTGGTCACCAT | | | |
| | CTGCTACGCTGGAA | | | |
| 149 | CGTGGCACCCCAAAAGG | P | 0.037138165 | 0.008694684 |
| | CCTCTGCTGGCATTTGCC | | | |
| | TGTGATGACAAAGAC | | | |
| 150 | GGCTTTTCAATTCTGTGG | N | 0.042964366 | 0.027099992 |
| | ACTTTGTACCATTTGGCT | | | |
| | TCACCTTGTACTGC | | | |
| 151 | AAAGCAGATATTTCCCGG | N | 0.000457197 | 0.001746366 |
| | ACCCAGCGCGGCCTCAA | | | |
| | CCAGGGCAGGAAAGA | | | |
| 152 | ACGGCGTGGAGGACTTT | P | 0.012030947 | 0.001874106 |
| | TCCGTGAGCCAGACGAT | | | |
| | GCTGGAGGAGGTATTC | | | |
| 153 | GGGGCTACATTTGTTCAT | N | 0.03089471 | 0.024754256 |
| | TTCCAGCAGTAGCATAAA | | | |
| | CTTACGGTGACATG | | | |
| 154 | GTCCTCACGTTCCCAGGA | P | 0.016355746 | 0.00699423 |
| | GGGCGGCTTCACCCTTC | | | |
| | GTAACCAGGAGACAA | | | |
| 155 | CTGAACTGCTAATGTGGC | N | 0.031398144 | 0.004785948 |
| | TGCTTTGTAGGGAATGGA | | | |
| | CTAATATCAGTGTG | | | |
| 156 | TGCCAAGATACATTGACA | P | 0.021675389 | 0.012145095 |
| | CTGAACATGGAGGCAGC | | | |
| | CAGGCCCGTTTCCTC | | | |
| 157 | CTTGCGGAAAATGAGAAT | P | 0.034571633 | 0.015217814 |
| | TGATGGTGTCCCCAATGC | | | |
| | CCCACCTCACAGAG | | | |
| 158 | TGCATGGGGGTACCCCA | N | 0.001617601 | 0.000135135 |
| | ATCTGAAGTCAGTAAATG | | | |
| | AACTAATCTACAAGC | | | |
| 159 | AACAGCATCCTCTTCCAC | P | 0.038694398 | 0.001478528 |
| | GCTCAGAAGTGTTCTGGT | | | |
| | TGGGGCCAGGCATG | | | |
| 160 | CAGATCTACTGGCGAGC | N | 0.025042639 | 0.004060175 |
| | GATGAAAATGTTGCAGGG | | | |
| | AGAGTCAGCAGAGGC | | | |
| 161 | CCGTGGGCTGTGCCAAG | P | 0.017697722 | 0.011077006 |
| | TGTGCCCAGGGATGTGTT | | | |
| | TGCAAAGGGACATCT | | | |
| 162 | GGGATTCTGTGACTGGAA | N | 0.021955263 | 0.002057477 |
| | AAGGTGACAAGTTGGTGA | | | |
| | CTTTGACACTGCAG | | | |
| 163 | TCCTGGCCATGAGGACA | N | 0.009159399 | 0.00356599 |
| | AAAATTACTGAGTGGCCC | | | |
| | TTAAAGAGGGAAGTT | | | |
| 164 | TAATCCCGTTATGGACTC | P | 0.025232086 | 0.044454089 |
| | TGTCTCCAGGAGAGGGG | | | |
| | TCTATCCACCCCTGC | | | |
| 165 | TGTTGGCAGCGACACCAT | P | 0.019065912 | 0.001334151 |
| | CCCATACAGGCTCTTACC | | | |
| | TCTTCTCCTGAGGG | | | |
| 166 | GGCAGTTGTCTGCATTAA | N | 0.010000982 | 0.000112406 |
| | CCTGTTCATACACCCATT | | | |
| | TTGTCCCTTTATTG | | | |
| 167 | AGCTTTCTGCACCCCCAG | P | 0.040871279 | 0.00259531 |
| | TGGCATCTCCTCATCACG | | | |
| | TTCTGTGCCGTCCT | | | |
| 168 | GGGGCTTTCGTGTCCCC | N | 0.01451577 | 0.000334594 |
| | CTGTGCGGTCAGTGTTTT | | | |
| | CAGTACCACCTCTCT | | | |
| 169 | GAGCAGGTGAAGCCATC | N | 0.011876698 | 0.003317407 |
| | AAAGAATGGGGTGACCA | | | |
| | CGTGACCAACTTGTGC | | | |
| 170 | AGCCCTGATGATTGGCC | N | 0.044672319 | 0.003062544 |
| | CCACCTCCTGCTGCCCC | | | |
| | ATAACCCTCTCTTCAT | | | |
| 171 | AAAGAAAGCTGGGCCTG | N | 0.026121174 | 0.02635688 |
| | TCGAAGGATGACAGGGA | | | |
| | TGTGCTGCCAGGTTGC | | | |
| 172 | TCACCCGCACTGAGTCAA | N | 0.032826967 | 8.36096E−06 |
| | CAGACTGAGCGCGTCCA | | | |
| | GGCCTGACAGCTCTG | | | |
| 173 | GGTGTGACTTGCCTTATT | N | 0.027345905 | 0.008191302 |
| | GAACTGATACTGGCATAT | | | |
| | CTGACTGTAAGCAG | | | |
| 174 | CAAGCCTCACTTTTCTGT | N | 0.008936589 | 5.36789E−06 |
| | GCCTTCCTGAGGGGGTT | | | |
| | GGGCCGGGGAGGAAA | | | |
| 175 | TGAGGACAGTTCAGAGG | P | 0.013435976 | 0.004081858 |
| | AGGATTCAGACGAGTGTC | | | |
| | GCTGCGTGAGTGGCC | | | |
| 176 | GCTCTCTCCCATCCAAGT | N | 0.004926943 | 0.003000054 |
| | GACCAGATGCCCTACTCA | | | |
| | GCTTCCATCACCCC | | | |
| 177 | CAGCTGGTTTCCTGGGTA | P | 0.008471018 | 0.002078946 |
| | TGCCTGGACTGTTGCCCA | | | |
| | GTGTAAGATCTGTG | | | |
| 178 | AGGAGGTACAGACGGTG | P | 0.018423111 | 0.01347762 |
| | GAGGATGGGGTGTTTGA | | | |
| | CATCCACTTGTAATAG | | | |
| 179 | GGGGAACACACCTGAAA | N | 0.030934418 | 0.001904134 |
| | CTAGAGGAACAGCTTATG | | | |
| | TGGTCTATGAGGACA | | | |
| 180 | CGGACAGTGATGGCTCTT | N | 0.000473071 | 0.000865777 |
| | GGAAATGGGTGGATGGC | | | |
| | ACAGACTATAGGCAC | | | |
| 181 | ACCGTGGTGAACCCTTG | P | 0.040642634 | 0.005937424 |
| | GGGGGAGGTTCTAGCCA | | | |
| | AAGCTGGCACAGAAGA | | | |
| 182 | GGGAGTGGTGGAGCCAG | P | 0.025216093 | 0.015139534 |
| | TCGCTGTAACACTGAGCC | | | |
| | TCAGAGACGAACCAA | | | |
| 183 | AGGCCTTAAGCTTTGGAC | N | 0.004215992 | 0.004511756 |
| | CCAAGGGAAAACTGCAT | | | |
| | GGAGACGCATTTCGG | | | |
| 184 | ACTGCTGCGTCATTACAG | P | 0.002144657 | 0.000492593 |
| | GGCACAGGCCATGGATG | | | |
| | GAAAACGCTCTCTGC | | | |
| 185 | TCTGGAAGGGGACAGTG | N | 0.045579794 | 2.53683E−05 |
| | AAAAGAGGAGTGACAGG | | | |
| | AGGGAAAGGGGGAGAC | | | |
| 186 | CCTGGTCAAGTGCTGGC | N | 0.017755838 | 0.012465827 |
| | TCTGCTGTCCTTGCCTTC | | | |
| | CATTTCCCCTCTGCA | | | |
| 187 | TAGGTGTGGTGGCGTTAT | P | 0.02974907 | 0.004606371 |
| | GGCAGCCCGGCTGCTGC | | | |
| | TTGGATGCGAGCTTG | | | |
| 188 | CCTGCAGTGTAAGTACAG | N | 0.005883304 | 0.000609634 |
| | CACACTGTCAAATTCTTTT | | | |
| | CCTTAAGGTGCAC | | | |
| 189 | GGGCTTTTCCAAAAGCAA | N | 0.014467705 | 0.001401659 |
| | ACAAAGATAGGTTCCTCA | | | |
| | GGTGACCAAAACTG | | | |
| 190 | ACATCTTTCTGGCACATA | N | 0.007054921 | 0.00123624 |
| | ACTGTCTCCTTAACCACT | | | |
| | GGAACAGTTCAGCC | | | |
| 191 | GGCATTAGAGATCCAGCA | N | 0.013353268 | 0.002650261 |
| | CATTCTCAGTACTGTGGT | | | |
| | GCAGTATTAGCCCA | | | |
| 192 | CGCCCGAATCTGGCTCG | N | 0.013845835 | 0.002135094 |
| | GCGGAATACCTCTTAGAC | | | |
| | AAGCACACCCTGGGG | | | |
| 193 | GAACTTGGAGAGCATCA | N | 0.048169021 | 0.008185891 |
| | GGAAGGCCCAGCTGAAA | | | |
| | TCAGAGAATCTGCTCG | | | |
| 194 | TCCTCCTGAGCCTACTGC | P | 0.02387538 | 0.004032458 |
| | CAAACGTCCTCAGTGTTG | | | |
| | TCTGCACCTGCTCC | | | |
| 195 | CAGCTTCCAGTGGTGGC | N | 0.011484257 | 0.003844816 |
| | CGTAGACTTGGCTCGGA | | | |
| | ACTTAGTGGCACCAGA | | | |
| 196 | TCCCATGTTTTTACCCTG | N | 0.000263971 | 0.000431055 |
| | CCCCTGCCTTGATTAGAC | | | |
| | TCCTAGCACCTGGC | | | |
| 197 | GTTATGCTTGTATTGAAT | N | 0.024560935 | 0.005563563 |
| | GCTGTCTTGACATCTCTT | | | |
| | GCCTTGTCCTCCGG | | | |
| 198 | CCCGGCCAACATCAAGT | N | 0.013638772 | 0.003569124 |
| | GACTTTATAGCTGCAAGA | | | |
| | AATGTGGTATGTGGA | | | |
| 199 | CTGCTGCGACTGATGCC | P | 0.010739358 | 0.00575891 |
| | AGGACAACCTTTCTCCCA | | | |
| | GATGTAAACAGAGAG | | | |
| 200 | CCTGCATAACAACACTGG | N | 0.006611943 | 0.000644228 |
| | GCCTTCTTAACTAAAATG | | | |
| | CTCACCACTTAGCC | | | |
| 201 | GATGGACTGTGCCCGGG | N | 0.02211032 | 0.000181223 |
| | TTCTGGTCATGGACAAGG | | | |
| | GGCAGGTGGCAGAGA | | | |
| 202 | GCTGTGCAAAGGTTGAG | N | 0.012329516 | 0.008165579 |
| | AGCTATTGCTGATTAGTT | | | |
| | ACCACAGTTCTGATG | | | |
| 203 | CAGGCACCTGGCTGAGT | P | 0.011277699 | 0.000604528 |
| | GTGCTGGAGTGAGGATC | | | |
| | TTGAACAGAAACTTCC | | | |
| 204 | CAGTTATGGAGGACTTGT | N | 0.022569474 | 0.000211085 |
| | ATGGAGAAATTTAAGTCT | | | |
| | TCACTGAGGGCCAC | | | |
| 205 | TCCCCACTATAACAGTTG | N | 0.034684181 | 0.009181751 |
| | CTGCCGCCGGAAGTACA | | | |
| | GACCAGAAGCCCCTG | | | |
| 206 | TGTCCTGGCTTCCCCTCC | P | 0.041505042 | 0.013570867 |
| | CAAGGAGGATGAGGATG | | | |
| | GTGCCTCTGAGGAAA | | | |
| 207 | CCACCTCGAGAACCAAG | N | 0.013801155 | 0.002948417 |
| | GATACTTTCGGAAGAGGA | | | |
| | GCAGGAAATGTTCAG | | | |
| 208 | CTTTGTTCCTGGGGAATT | P | 0.012359302 | 0.000188549 |
| | CACTTCTCTTCCTCCCTC | | | |
| | ATGGAAGATGCAAG | | | |
| 209 | GCCATATTGGAGTAGCGA | N | 0.031803428 | 0.001028175 |
| | GGAATCTGATTCCAAGCA | | | |
| | AAAACCAGACAATG | | | |
| 210 | GCTTCAGGCGGTAAACC | N | 0.012877468 | 0.004994319 |
| | AACAGCTCACAAAGGAGA | | | |
| | AAGAGCACTACCAGG | | | |
| 211 | GAAACTGTTGAAGCTGCA | N | 0.021786768 | 0.010584883 |
| | GAACCAACGAGGTGGCC | | | |
| | GAATCCTTCTTCAGG | | | |
| 212 | GAGGGAGAAGAATAAAG | N | 0.003393734 | 0.000978005 |
| | CAGCTGCCTGGAGCCTA | | | |
| | TTCACTATGTTTATTG | | | |
| 213 | CAGGTCCTGCAGTCTGG | P | 0.042554194 | 0.024262837 |
| | CTGAGCCCTGCTTGGTTG | | | |
| | TCTCCACACACAGCT | | | |
| 214 | GGTGTCCATCAGTAACTA | P | 0.032171221 | 0.038592347 |
| | CCCCCTTTCTGCTGCCCT | | | |
| | CACCTGTGCAAAAC | | | |
| 215 | GATCCAGCCATTACTAAC | N | 0.005093561 | 5.34878E−05 |
| | CTATTCCTTTTTTGGGGA | | | |
| | AATCTGAGCCTAGC | | | |
| 216 | GGGCGGCATTTACACTGT | N | 0.017674003 | 0.00014022 |
| | GCAAGTATTGAGAAGAGT | | | |
| | GCATAAAGACAGGG | | | |
| 217 | CATCTCTGTGGCAGCGG | P | 0.015266094 | 0.009136299 |
| | CAGCTATTTACATGGCCT | | | |
| | CACAGGCATCAGCTG | | | |
| 218 | CGTGTGCCACTTGCCCA | P | 0.042064073 | 0.009794698 |
| | GCTTCTTGGGCACACAGA | | | |
| | GTTCTTCAATCCAAG | | | |
| 219 | TCTCCCAAATAAGATGTG | N | 0.015764064 | 4.09289E−06 |
| | CTGCTTACCGAGGTATCA | | | |
| | CGGGGTGGGGCTCC | | | |
| 220 | AGGGACTTTGTTTAGGCC | N | 0.003345758 | 0.000680059 |
| | AAGGAAGGAGCGGAAGT | | | |
| | AGGGCAACTCGGTCC | | | |
| 221 | CCTGCTAAGTCCGCTCCT | P | 0.02397531 | 0.000352678 |
| | GCTCCAAAAAAGGGCTC | | | |
| | CAAAAAGGCGGTGAC | | | |
| 222 | CAGCTCATGCCCTCAATG | N | 0.047966686 | 1.33729E−05 |
| | TTTATATTGTGTTATCTGT | | | |
| | TGGGTCTGGGACA | | | |
| 223 | TTGGGAGCTGAAGAATAC | N | 0.01200117 | 2.03857E−06 |
| | TGGACGGGGCTTCGGAG | | | |
| | AGGAAGGATGGTCCA | | | |
| 224 | ATTGCTCCCCAGACTGAA | P | 0.011265572 | 0.002310578 |
| | CAGAAACCTGGCCGCCG | | | |
| | GATGGGACCTCCTTT | | | |
| 225 | CCAAGGTGTTAAGGGGA | N | 0.000573704 | 0.001609945 |
| | TAGTACCTCCCAATTCAA | | | |
| | GCAGAGAAACTGACC | | | |
| 226 | GGGGCACATGTTGTAAG | N | 0.045998083 | 0.000180076 |
| | AAACTGATTGGAAGGGG | | | |
| | AAATGTGCAGCTCTCC | | | |
| 227 | ACTGCTGGCAGCGGCTT | N | 0.041263637 | 0.002590193 |
| | TCTGTATTCTGCCACACC | | | |
| | AGGGGCAGATGTTTG | | | |
| 228 | CACCCCAAGCAGTACGC | N | 0.007430483 | 0.001722221 |
| | TTGCTGGTCTAAGTCTTA | | | |
| | ACCCCAGGACTCAGA | | | |
| 229 | CTTTTCCAAGTTCCCAAG | P | 0.041075201 | 0.015325065 |
| | GCCTACAGCTGAAGCCC | | | |
| | TTAGGTACCTGTGTT | | | |
| 230 | CATACAGTAATCATGCTG | N | 0.017806575 | 0.004063292 |
| | CAGAAATTTGCAGTCTGC | | | |
| | ACCTTATGGATCAC | | | |
| 231 | CCTCTTGAGCTGGAACG | P | 0.003336886 | 0.004296026 |
| | CCTGAAACTGGAGCCTCA | | | |
| | CGAAGGGCTGCTGCT | | | |
| 232 | AGTGATTGCCTGGGCCA | N | 0.035584334 | 0.000195993 |
| | AGTGGCAGGTTGGGGAG | | | |
| | GATGGCTGCAAAGAAG | | | |
| 233 | CTTCCAGTCTTTTTAGAA | N | 0.006780813 | 0.000304009 |
| | CGTGGTGGAGGAGGGTT | | | |
| | GTGTGTGCCCCAGGG | | | |
| 234 | GGGGGGTAGAATTTAGTA | N | 0.010087694 | 0.003144485 |
| | AATATTCCAGCCGGTCGT | | | |
| | TTTATGCACAAGGC | | | |
| 235 | TGATCCGAAGGAGGAGT | P | 0.034853878 | 0.004034999 |
| | GGCGCTGGGCGCTGGAC | | | |
| | TCGCTGGTGTGAAAAT | | | |
| 236 | GAGTCTCAAGTCCGTATG | N | 0.000755288 | 0.002991841 |
| | TAAATCAGATCTCCCCTC | | | |
| | TCACCCCTCCCACC | | | |
| 237 | CAGATTTGGCACCTACTC | P | 0.004675112 | 0.001487566 |
| | CTGCCCCACAGAGCACA | | | |
| | CCACGAAACACTGTC | | | |
| 238 | GAGCTTCCCGAGAATGG | N | 0.001176973 | 0.000286601 |
| | GGCCTGGGTTTGATTCAT | | | |
| | CTGTTTTCTACAGGG | | | |
| 239 | GAGACCAGTAGATTTTCA | N | 0.041732557 | 0.000243943 |
| | ATGGGAAATGTACCTAGC | | | |
| | AAGCTGGTTCTTGC | | | |
| 240 | AACCAGGGGCCATGAAT | N | 0.034865906 | 0.000448909 |
| | CACCTTTTGGTCTGGAGG | | | |
| | GAAGCCTTGGGGCTG | | | |
| 241 | GTCCCTGTCCCTCCCAAA | P | 0.028728838 | 0.003585929 |
| | GCACAGAGCACAGAAAT | | | |
| | GAGGCCGTTTACATG | | | |
| 242 | GCAGATAGAGTGTTACCG | P | 0.005896187 | 0.000645202 |
| | ACGGGTGGAAAAGCTAC | | | |
| | GGAATCGCCAGGATG | | | |
| 243 | CAGCCATAGGTGCAGTTT | N | 0.007314375 | 0.006682156 |
| | GCTTCTACATGATGCTAA | | | |
| | AGGCTGCGAATGGG | | | |
| 244 | CCCTGGTATTGATTTCTC | P | 0.00779219 | 0.003889254 |
| | AGGACTTTGGAGGGCTC | | | |
| | TGACACCATGCTCAC | | | |
| 245 | GGCTGGCAGTCTTTGTC | N | 0.034813175 | 0.000623826 |
| | GTTGTTCATTCTGGGGAT | | | |
| | AAAGGGGAACTAGGC | | | |
| 246 | CCAGAGCCTGTGATGCC | P | 0.007285195 | 0.001073167 |
| | TCCTCAGCAGGTAGAGC | | | |
| | AGATGGAAATACCACC | | | |
| 247 | CCTGTGTTTGCATCCTCT | N | 0.005121314 | 0.008656748 |
| | GTTCCTATTCTGCCCTTG | | | |
| | CTCTGTGTCATCTC | | | |
| 248 | GGGTGCCTTCCTTGGTCA | N | 0.004561912 | 0.002998685 |
| | CCAAGGCAGTGCGTGCA | | | |
| | CGTTAGGGTTTCCTT | | | |
| 249 | CTCAAGGTCATGCAGTTA | N | 0.020310045 | 0.00517795 |
| | GTAAGTGGCAGAACAGG | | | |
| | GACTTGAACCAAGCC | | | |
| 250 | CCTCCACGTGATTCCTAC | P | 0.003557776 | 0.001323842 |
| | AGCAGTTCAAGCCGCGG | | | |
| | AGCACCAAGAGGTGG | | | |
| 251 | TGCTGCTCCTGCTGCCC | P | 0.013625029 | 0.010856486 |
| | CATGAGCTGTGCCAAGT | | | |
| | GTGCCCAGGGCTGCAT | | | |
| 252 | CTATTAACGCTACGATGC | P | 0.015462351 | 0.004802328 |
| | CTGAACCTACCAAGTCTG | | | |
| | CTCCTGCCCCAAAG | | | |
| 253 | GATGGTTCTGATGCTGTC | N | 0.017558861 | 9.16221E−06 |
| | AGCCTCTGGGTGCAAATT | | | |
| | CTGAGGGCCCGGGA | | | |
| 254 | CCCTCACGCACCCGCTC | N | 0.009263328 | 0.002613281 |
| | ACGCACCCTCGGTGAAT | | | |
| | CCTTGGTGATGATTTT | | | |
| 255 | AGTACCACTCCAAAGGCA | N | 0.007405038 | 0.001662479 |
| | AGGAACCATGATTGACAA | | | |
| | CAGTCAAGCTGTGG | | | |
| 256 | TGGAAGCCCTCACCAAG | P | 0.027769471 | 0.002064433 |
| | CACTTCCAGGACTGACCA | | | |
| | GAGGCCGCGCGTCCA | | | |
| 257 | CCCCTACTTATTGCCACA | N | 0.023488622 | 8.37796E−06 |
| | GAGGAGGGATCTTTTCCA | | | |
| | TAACTGAAGGGGAG | | | |
| 258 | GCACGACGATGAGGTGA | N | 0.004534932 | 0.000150875 |
| | CAGTCACGGCCCTGGCC | | | |
| | AACGTCAACATTGGGA | | | |
| 259 | GCACAGTTGAGGAGCCA | N | 0.014228146 | 0.002627577 |
| | GAGACTTCTTAAATCATC | | | |
| | CTTAGAACCGTGACC | | | |
| 260 | CTTTAATTCTTGGGCCTC | P | 0.001270219 | 0.001745243 |
| | CAATAAGTGTCCCATAGG | | | |
| | TGTCTGGCCAGGCC | | | |
| 261 | TACCTGGCTACAGAAAGA | N | 0.011286563 | 0.003864364 |
| | AGATGCCAGATGACACTT | | | |
| | AAGACCTACTTGTG | | | |
| 262 | CCCCTGCAAGGGTAGAG | P | 0.033071121 | 0.00057651 |
| | TCAGGTGAGAGTCCCTTG | | | |
| | GTGAGTCATTTGTAC | | | |
| 263 | GCCCAGTACTGGAGAAA | N | 0.014943906 | 5.33033E−05 |
| | ATGAAACTGGGATTGACC | | | |
| | CATCAAGATGCTTGG | | | |
| 264 | GGGACGAGACAGGTGCT | N | 0.005603143 | 0.000530127 |
| | AAAGTTGAACGAGCTGAT | | | |
| | GGATATGAACCACCA | | | |
| 265 | CCCCAGTGTGTATAAGCT | N | 0.012426241 | 0.00697227 |
| | GGCATTTCGCCAGCTTGT | | | |
| | ACGTAGCTTGCCAC | | | |
| 266 | CTGTCCCGCTGCGTGTTT | P | 0.003191835 | 0.005765734 |
| | TCCTCTTGATCGGGAACT | | | |
| | CCTGCTTCTCCTTG | | | |
| 267 | GACTCTGATGTTGGGTAG | P | 0.009787241 | 0.002360685 |
| | CTGGCCTCTGTGGGGAT | | | |
| | TGTAAGTGCCCTGAG | | | |
| 268 | CACACTGGGGCTGCCTTT | N | 0.001532941 | 0.00031371 |
| | CTCTGACTCTGTCTTCCC | | | |
| | CAAGTCAGGGGGCT | | | |
| 269 | TACCACTGCAAAGTGATG | N | 0.002811244 | 0.001328222 |
| | GAAAAGGGTGGAGAACA | | | |
| | GGGGAGTAGCCAGGC | | | |
| 270 | GCTTTCTTAGGGAAATGA | N | 0.018120486 | 0.001641551 |
| | CAGGGCAAAGCAATTTTT | | | |
| | CTGTTGGCTTTGGG | | | |
| 271 | CTACGCCATGGGACATCT | N | 0.008082882 | 0.010790438 |
| | AATTCAGAGGAAGAAGGT | | | |
| | CCATGTCTTTGGGG | | | |
| 272 | GAGGATCATTACAGAGAC | N | 0.013942164 | 0.000256697 |
| | AGACTCTCCCGAGACATG | | | |
| | GGCCACACTGATAG | | | |
| 273 | GTAACTGTAAGTTCACAT | N | 0.008931886 | 0.000713525 |
| | CAACCTCATGGGTTTGGC | | | |
| | TTGAGGCTGGTAGC | | | |
| 274 | CCTGGCCAAGTGAGGAA | N | 0.024085697 | 0.000229349 |
| | GGAAAGCAGAAAGGTGA | | | |
| | CGATTCTCACTCACCT | | | |
| 275 | CAGCCTGACGAGCTGCC | N | 0.010260699 | 0.015508533 |
| | CGAGGTGGATAACCTGA | | | |
| | CACTGGACGGGAATCC | | | |
| 276 | GCTCTGCACCATCCCTCA | P | 0.041028466 | 0.01213045 |
| | CCCAGACCGTAGACACC | | | |
| | AGGGAACCACATCTA | | | |
| 277 | CTGCGAGTTTTCGGGTG | P | 0.02703624 | 0.011983097 |
| | GGCAGACGCACTGTTGA | | | |
| | ATCTGGTAGCCAGGGT | | | |
| 278 | GAGCGTGATGATTGGGT | P | 0.000644717 | 0.001456141 |
| | GTTCATACGCTTGTGTGA | | | |
| | GATGTGCCACCCTTG | | | |
| 279 | GAAACATTCTAGTAGCCT | P | 0.001123725 | 0.000461324 |
| | GGAGAAGTTGACCTACCT | | | |
| | GTGGAGATGCCTGC | | | |
| 280 | AGGTCTCCTCTGGGAGG | P | 0.031257106 | 0.004239175 |
| | TCTTGGCCGACTCAGGG | | | |
| | ACCTAAGCCACGTTAA | | | |
| 281 | CAGGCTCATAGCAGCTAC | N | 0.00800258 | 0.004520618 |
| | TGTGTAGAAAATTCCCCC | | | |
| | TACTTCTAATTTGC | | | |
| 282 | TCTTGCTGACAGAATAGG | N | 0.009210967 | 0.003011462 |
| | TTCCGTTCTGGGCGGTG | | | |
| | GTTCTCGAGCCTGCC | | | |
| 283 | CCTCAGCAGCTGGTAATC | N | 0.006995851 | 0.013738783 |
| | TTGCTCTGCTTGACAACA | | | |
| | TCTGAGTGCAGCCG | | | |
| 284 | CATTCTGGGACTACCGTG | N | 0.003676314 | 0.001577243 |
| | AAGCCTGGAGTAGGGAG | | | |
| | AGCGAGTTTGGGAGC | | | |
| 285 | GCTGGCGTGCCCATGTT | N | 0.00154184 | 0.00204779 |
| | GCAGATATTTTCCCGAGT | | | |
| | TCCCCAGAATGGATG | | | |
| 286 | GACCTCCAGAGTGAAGAT | N | 0.001336323 | 8.76894E−06 |
| | GGGTGACTAGATGATATG | | | |
| | TGTGGGTGGGGCCG | | | |
| 287 | GGGAACTGGCATTACTG | N | 0.024336742 | 0.000719741 |
| | GAACTAATGGTTTTAACC | | | |
| | TCCTTAACCACCAGC | | | |
| 288 | CTGGGCAGTGAAGTGGA | N | 0.026178082 | 0.007555627 |
| | TATCACTGAAGGAGATAG | | | |
| | GAAGCCAGACTACAC | | | |
| 289 | AACAGCTCTGTGTGTGAA | N | 0.000598839 | 0.000670094 |
| | GGTGAGGACTCTTGGAA | | | |
| | GCAGGCCATCCTGGC | | | |
| 290 | CCATCTCCGGGACGTTCT | P | 0.046365858 | 0.032237507 |
| | CGGCTCTGCCTCATTGTG | | | |
| | TGCAGAAACTGTGG | | | |
| 291 | GGAGGCCAGACGTTGAC | N | 0.030089652 | 0.000127324 |
| | GCTGCAGGGAGAGGGTG | | | |
| | GTGGGCGCAGCCGCTA | | | |
| 292 | GGTGGGGATTCTGGAAC | N | 0.015350104 | 0.000204025 |
| | AATCATCTTAGGGGGTGT | | | |
| | GCCATGCTGTTCCTG | | | |
| 293 | AGCTTCCCAAGCTGTATG | N | 0.01447795 | 0.009585449 |
| | TGAAGCTACCTTACTGTG | | | |
| | TGAGTTGTGCAATT | | | |
| 294 | ACTGCTGCTTCCTACCTG | N | 0.003323749 | 0.000879694 |
| | CAAGACGAACAATGTATG | | | |
| | TTTCAAGGGTGAGC | | | |
| 295 | GCGCCTCCAGGCCAAGA | N | 0.024023674 | 0.002229257 |
| | AGGAGGAGTTCATCAAGA | | | |
| | CTTTATCCAAGGAGG | | | |
| 296 | GTGGAAAGGATGGGGTG | N | 0.006424061 | 6.9002E−05 |
| | GAATACAGTTGTGGGCTA | | | |
| | TTGGTAAGGTCCCAG | | | |
| 297 | TATTGCAGCCATCCATCT | N | 0.001884377 | 0.000122824 |
| | TGGGGGCTCATCCATCA | | | |
| | CACCCGGGTTGCTAG | | | |
| 298 | CGGCCCCTGAGCAAGAC | N | 0.002720947 | 0.004041925 |
| | AGTACGCTTCAACGTGCT | | | |
| | CAAGGTCACCAAGGC | | | |
| 299 | CCCAGCTGAACCCGAGG | N | 0.019928696 | 0.004179299 |
| | CTAAAGAAGATGAGGCAA | | | |
| | GAGAAAATGTACCCC | | | |
| 300 | TAGCAGCTTGGGCACCT | P | 0.013709838 | 0.001927862 |
| | CCACTCTGTGCGGTCTGA | | | |
| | TGGCCCCAGCAAGGT | | | |
| 301 | GACCGCTATGCTCAGGA | P | 0.037005567 | 0.005895429 |
| | CATGGGAGACAACTGCAT | | | |
| | TACTCAGTGATCAAG | | | |
| 302 | TGGAGGTGGTTTTGGTG | N | 0.045541181 | 0.006932617 |
| | GGAATGACAACTTTGGTC | | | |
| | ATGGAGGAAACTTCA | | | |
| 303 | ATGTGGACTGCCCTACAT | P | 0.020334873 | 0.002737801 |
| | TTGGCCTGTGCCACTGG | | | |
| | CCAACCGGAAATGGT | | | |
| 304 | TTTTGTTAACGTCTGCCA | N | 0.016459127 | 0.002365733 |
| | CCCCCACTCTCACCCCCA | | | |
| | AGCTCTAAGCCCCC | | | |
| 305 | ACTCTGGCCCCTATGGC | P | 0.00526104 | 0.000484951 |
| | GGTGGAGGCCAGTACTT | | | |
| | TGCAAAACCACGAAAC | | | |
| 306 | TCTTCCATACATTAGTTC | P | 0.018923704 | 0.008321766 |
| | CCACCATCGCATGCCCA | | | |
| | GGGACCACTGCCTGG | | | |
| 307 | AAGCTAAGGCCGCGTTG | N | 0.007036877 | 0.005840286 |
| | GGGTAAGGCCCTCACTT | | | |
| | CATCCTGCGACTAGCA | | | |
| 308 | CGACCGGCTCGTATTCC | N | 0.032215411 | 0.013902091 |
| | GATCAGTCGCTTCCATTG | | | |
| | TTAGCATCGTACACG | | | |
| 309 | AGATGTGTTTTCAGAGCT | N | 0.002118103 | 0.001911586 |
| | AGGTACAGAGGAATGTTT | | | |
| | GCTACCTTTAGCGG | | | |
| 310 | CGGGTGCAAGCCCGTGT | P | 0.006614579 | 0.002452292 |
| | GTCTGGCCTCTTTCCTCG | | | |
| | TGAAGACGATGTGTC | | | |
| 311 | CAGTGGCTACCACCTGTA | P | 0.017094823 | 0.013578455 |
| | ATCTCAGCAGTTTGGGAG | | | |
| | ACCAAAGCAGGACG | | | |
| 312 | CAAGCAAAATTGTGGGCA | N | 0.0257826 | 0.003475715 |
| | AGAGAATCCGCGTGAAA | | | |
| | CTAGATGGCAGCCGG | | | |
| 313 | GAGGGCACCAGGCACAA | N | 0.022069707 | 0.000134452 |
| | CGACATCGAGCTCTACAG | | | |
| | CCAGTACCTGGAGGG | | | |
| 314 | TCTGCAAAGGGGCGTGC | P | 0.007970418 | 0.026713487 |
| | AGCTGCTGTGTCTGATGT | | | |
| | GGGGACAGCTCTTCT | | | |
| 315 | GTGTAAGGGTCCAGCTG | N | 0.021320803 | 0.001836127 |
| | ATCAAGAATGGCAAGAAA | | | |
| | ATCACAGCCTTTGTA | | | |
| 316 | GATGGGCACCTGGATAA | N | 0.016791854 | 4.55339E−07 |
| | CTCAGGATGGGGGCTGC | | | |
| | TCACAAAGACCACATC | | | |
| 317 | GGAGCCCCTTGGAGTAT | P | 0.038277546 | 0.009228911 |
| | GGCTTTTCACATGGGCTT | | | |
| | CTATACCGCTTCGAC | | | |
| 318 | ACTGTCAGGCCAGTGCT | P | 0.020498041 | 0.003102954 |
| | GCTGCGGATGTGAGAAA | | | |
| | CCGGTGATCCGAAGGC | | | |
| 319 | CCCCTGGGCTATCATCTG | P | 0.007543595 | 0.000284438 |
| | CATGGGGCTGGGGTCCT | | | |
| | CCTGTGCTATTTGTA | | | |
| 320 | CACAAGAGTGGTCATAAG | N | 0.014947525 | 0.000279691 |
| | GGGGTTTGAACTGAGTC | | | |
| | CCACTACCTCGGGGG | | | |
| 321 | ACCCCTGGGCTACCATCT | P | 0.007981192 | 0.001868627 |
| | GCATGGGGCTGGGGTCC | | | |
| | TCCTGTGCTATTTGT | | | |
| 322 | CCCTCTCAAGTAATGGCT | N | 0.010546341 | 0.000670775 |
| | CAGCTAATAAAGGCGCAC | | | |
| | ATGACTCCCAAAAA | | | |
| 323 | GTACTTCGGGGCTCTACA | N | 0.009446875 | 0.000317343 |
| | GACAATCTGATGGATGAC | | | |
| | ATAGAAAGGGCAGT | | | |
| 324 | TTCTCAGGAATCGGCGG | N | 0.037168162 | 0.000822981 |
| | GAAGAAGCCCCCTTGAT | | | |
| | GGAGTCTGGTGGGGTT | | | |
| 325 | TGGTATTTGGGCAGCTG | P | 0.002392575 | 0.002545243 |
| | GTGATCGTTGGTCCCGG | | | |
| | CGCCCTTTCTTTACTG | | | |
| 326 | CTGTATGCCCAGGGAAA | N | 0.003513109 | 0.000731921 |
| | GTGGCGTTATAACAGGAA | | | |
| | GCAGAGTGGCTATGG | | | |
| 327 | CCAACGACTAACCCTGAA | N | 0.004462779 | 8.13533E−05 |
| | ATGGGGGTGTTCCAGCC | | | |
| | TTCAGCGAGATGGCC | | | |
| 328 | CAAGAGTGCCACAGATAT | N | 0.043049954 | 0.000963711 |
| | TCTCCTGGGGGAGGATG | | | |
| | CTGGTGTTGGGAGGG | | | |
| 329 | GAACAATGGTCGTGCCAA | N | 0.020953125 | 0.017419716 |
| | AAAGGGCCGCGGCCACA | | | |
| | TGCAGCCTATTCGCT | | | |
| 330 | CGGCCTGATGGAGAGAA | N | 0.008627467 | 0.002771479 |
| | GGAACATGTTCGACTGG | | | |
| | CTCCTGATTACAATGC | | | |
| 331 | ACTCTGTAAGGAAGTTCC | N | 0.016211841 | 0.007996184 |
| | CAAATACAAACTTATAAC | | | |
| | CCCAGCTGTGGTCT | | | |
| 332 | GTAACAGGGTGCAGTGTT | P | 0.008098257 | 0.001860315 |
| | GTTTATACTTCATTGCTC | | | |
| | CTTCAGGACATGGG | | | |
| 333 | TATGTCCTCTGATTGGGA | P | 0.003643475 | 0.000477632 |
| | CAAGGCACCTGCATTCAC | | | |
| | AGGCGGCCCTGAGC | | | |
| 334 | GGCTTGGCCACCCTGCC | N | 0.029600192 | 0.007199955 |
| | GCTGCCCAGCCACATCC | | | |
| | CTTGGTTTTGTATTTT | | | |
| 335 | TCATGGCCGCCCTCAGA | N | 0.005791868 | 0.000671519 |
| | CCCCTTGTGAAGCCCAA | | | |
| | GATCGTCAAAAAGAGA | | | |
| 336 | ATCCTCTGAGAAAACAGC | P | 0.00398372 | 0.000227825 |
| | CCACAGGACTGGGTCCT | | | |
| | CCTTATCCGTCTTGC | | | |
| 337 | AAATGACAAAGAGCGAGT | N | 0.028468123 | 0.01386108 |
| | GGCAGCTGCAATGGAAA | | | |
| | ACCCCAACTTACGGG | | | |
| 338 | AGCTCAGCGGTTACTTCG | P | 0.001345488 | 0.000396197 |
| | CGTGTCATCAAACCACCT | | | |
| | CTCTGGGTTGTTCG | | | |
| 339 | TAGAACTATTATTGACCA | P | 0.009457684 | 0.006368964 |
| | CGCCTCCTCCAAGTCCCA | | | |
| | GCGAGCCCGTGTAC | | | |
| 340 | GCACCTGCTGTAGACAG | N | 0.007478515 | 0.001297099 |
| | AAGACAGTATTCTGCAAT | | | |
| | GACTGAGAATGCAGT | | | |
| 341 | ACTGCTGCTTCCTACCTG | N | 0.002690936 | 0.002238076 |
| | CAAGACGCACAATGTATG | | | |
| | TTTCAAGGGTGAGC | | | |
| 342 | GTGCCCCTCTGTATCTTT | N | 0.015388346 | 0.006233688 |
| | TGAGAAGTGCGGAATAG | | | |
| | GTTGCTTCTACCACC | | | |
| 343 | TTGGGAGGCAGAGGCCG | N | 0.013481429 | 0.000857851 |
| | GTGGGTTGCTTTAGCTCA | | | |
| | GGAGTTGGAGACAAG | | | |
| 344 | CATATATTGCATGGAGGT | N | 0.039958262 | 0.031385449 |
| | ACCCCAATCTGAAGTCAG | | | |
| | TAAATGAACTAATC | | | |
| 345 | GTGTTTACATGTCTGTCC | P | 0.016704913 | 0.002709995 |
| | CCCCAGACTGTGAGCTC | | | |
| | CTTGAGGGCAGGGAC | | | |
| 346 | CCGTGTGCATCAGGTCCT | N | 0.037372342 | 0.022300797 |
| | TCACGGACTCCTCGGGG | | | |
| | GCCAATATTTATTTG | | | |
| 347 | GCCAGGACAGCCCTCCC | N | 0.024120571 | 0.002995754 |
| | AGCCATGAATCCTTACTC | | | |
| | AGCTACCTCGGGTTG | | | |
| 348 | CAGCAGAGAGGCCTGTG | N | 0.02458944 | 0.004630386 |
| | ACATGGGGCCCTGTACTA | | | |
| | CTGCCTGGTTCCACA | | | |
| 349 | AGAATTTCTTCACCTGAA | N | 0.043898711 | 0.043547486 |
| | TAAACCATGTGGTCAGCA | | | |
| | TTGCATCTGAGGCA | | | |
| 350 | TGTGATGACCACTACAGC | N | 0.03757579 | 0.007549704 |
| | AGAGTAAAGCATGTCCAA | | | |
| | GGAAGGATGTGCTG | | | |
| 351 | GAGGAGAAAAAGCGGTA | N | 0.0048264 | 0.009320246 |
| | CGATGCCTTCCTGACCTC | | | |
| | ACCGGCCTCCCCAAG | | | |
| 352 | AACGACACCAGCCAAAC | P | 0.028775692 | 0.004899306 |
| | CAGCAGCCCCTCAGCAT | | | |
| | CCAGCAACATAAGCGG | | | |
| 353 | AGTCTGTAGCCTCCCCGA | N | 0.023949921 | 0.022611684 |
| | TCCAAGTTCCTAGACCTC | | | |
| | ATGGCTGTCCCCTC | | | |
| 354 | TCCGCGCATCCACTTGTT | P | 0.024422559 | 0.021380902 |
| | GCAGTCCAAGTCCTCTAG | | | |
| | TGCAACGCCATAGC | | | |
| 355 | GGACTGGGAAAATCTGC | P | 0.046003869 | 0.017945159 |
| | AGCATCAGACTATGCCTT | | | |
| | TCATCCCCCAGCCAG | | | |
| 356 | AGTAATTGGCAGTGACTA | P | 0.044612313 | 0.022540253 |
| | TGGGCGCACTGCCTAAC | | | |
| | ATTTAGCCCTGCCCC | | | |
| 357 | GAGACAAAGATGGCTGC | P | 0.013299668 | 0.009092238 |
| | GAGAGTCGGCGCCTTCC | | | |
| | TCAAGAATGCCTGGGA | | | |
| 358 | TGCGTTGGTCCAGAGCG | P | 0.027915124 | 0.044845297 |
| | GAGGCTGTGTGCCTGGG | | | |
| | GGAGTTTTCCTCTATA | | | |
| 359 | GGGCCTCACAAGACAAA | N | 0.045263056 | 0.002361119 |
| | ACAGGAGCCAGAAGTAA | | | |
| | GGACTGAAGGAGAAGG | | | |
| 360 | GGGCTGTGGTAGTGGGC | N | 0.040952505 | 0.00208698 |
| | ATAGGCAGCGAGATATCC | | | |
| | AGTGGTAACAGTTGT | | | |
| 361 | CTGACAGTGAAGTGGCT | N | 0.031812492 | 0.039377154 |
| | GGTTACATCCGGCAAGC | | | |
| | GGGTGACTTCCATCAG | | | |
| 362 | ATGGAACTCAGCGCCGA | P | 0.023486826 | 0.001596429 |
| | ATACCTCCGCGAGAAGCT | | | |
| | GCAGCGGGACCTGGA | | | |
| 363 | TGTGGCGTATGCTGCTAT | N | 0.019702877 | 0.006223919 |
| | GTGAAGCAGTAGCTGCT | | | |
| | GTCATGGCCAAGGGG | | | |
| 364 | CCTGTCCTGGATGCCTCT | P | 0.00965454 | 0.033166702 |
| | GAAGAGAGGGACAGACC | | | |
| | GTCAGAAACTGGAGA | | | |
| 365 | CTACGCAGGTACAGCCG | N | 0.036186736 | 0.037343509 |
| | CCGCTTCCAGACCATTGA | | | |
| | CATCGAGCCTGACAT | | | |
| 366 | GTGCCACCTCCTGTCTAC | N | 0.026135094 | 0.020992809 |
| | TCATTGTTGCATGAGCCC | | | |
| | TGTCTGCCAGCCCA | | | |
| 367 | TTTTGGAGGTCATGGCG | N | 0.016208816 | 0.004585939 |
| | GGAGGATCACCTGAGGC | | | |
| | CAGGAGTTTGAGGCCA | | | |
| 368 | GGGGGTCCGCTGCCCGA | N | 0.036287687 | 0.000285317 |
| | GAATGGGAATTCTCTTCA | | | |
| | CTAGAATATGGAGAC | | | |
| 369 | TGCTGTTATCCCTGCCTG | N | 0.015086928 | 0.011591695 |
| | GTCCTCACACTCACCCAA | | | |
| | CAATCCCAAGGCCC | | | |
| 370 | AAACTGAGCCATGCTACC | N | 0.024163767 | 0.013934955 |
| | AGCATCCCAGGGTCTCC | | | |
| | AGCCTACAGATGAGC | | | |
| 371 | GCCTCCTGATCCAGCCG | N | 0.032812021 | 0.023593741 |
| | GGGCCCAGATTCCACTG | | | |
| | AGGTTAGAGTCCATTT | | | |
| 372 | GGCCAGTGACAGAGTTTA | N | 0.034574547 | 0.036925907 |
| | CCCTTGCCTCCTTTCTTG | | | |
| | GTCTGCCAGCTTTG | | | |
| 373 | GTGATCAGCAGGGAGTTT | N | 0.037307746 | 0.009998526 |
| | ATTTGAGGACATCAGTCA | | | |
| | CCTTTGGGGTTGCC | | | |
| 374 | GTCTCTATCTTCATGAGT | P | 0.01420409 | 0.004620793 |
| | GTGACTTGAGGTGTTGG | | | |
| | GATGGGTGAGGGAGC | | | |
| 375 | CTAGGTCCAGGGAGAAA | N | 0.035533969 | 0.00147624 |
| | AGGCAGTGGTTGGGGTT | | | |
| | ACTGGAAATTTTGCTC | | | |
| 376 | TCCCTGCTCTGGGAGCAT | N | 0.0054211 | 0.002647433 |
| | TGCTAGCCTTCTACCCCA | | | |
| | TCCCTGGATCCACA | | | |
| 377 | GGGGATATCTGCTCAGC | P | 0.006663772 | 0.004198389 |
| | CAATGGAAAATCTGGGTT | | | |
| | CAACCAGCCCCTGCC | | | |
| 378 | GGAAAGGCTGGAAGCTG | N | 0.047811244 | 0.040345325 |
| | CAGACAGGATCCCTAGCT | | | |
| | TGTTTTCTGTCAGTC | | | |
| 379 | CCCTCACCTACATTCCAT | N | 0.008188221 | 0.001371251 |
| | AGTGGGCCCGTGGGGCT | | | |
| | CCTGGTGCATCTTAA | | | |
| 380 | CTGTCATCATCTCCACAG | N | 0.027607379 | 0.033162134 |
| | CCCACCCATCCCCTGAG | | | |
| | CACACTAACCACCTC | | | |
| 381 | CCCGGGAGAAAAGACGG | N | 0.027178118 | 0.01768929 |
| | ATGGCAGGATCCAAGGG | | | |
| | GCTAGCTGGATTTGTT | | | |
| 382 | CCTGACCAAGCACCAGA | P | 0.024353366 | 0.027667304 |
| | GGACACACACAGGCGAG | | | |
| | AAGCCGTACACCTGTC | | | |
| 383 | AAGCGGGGAGAGGGTAC | N | 0.040332442 | 3.69206E−05 |
| | ACAATGGGTATCTAATAA | | | |
| | ATACTTAAGAGGTGG | | | |
| 384 | ACAAAGGGGCATGGGCC | P | 0.027479936 | 0.025075796 |
| | TCCAGCCTTTGCCCACAA | | | |
| | GTGCCTCAGTGCCCA | | | |
| 385 | CCAGAATGGAAGGGGGT | N | 0.043822125 | 0.000197108 |
| | GGGGATTTTCTGTTCCTC | | | |
| | CCTGGAGTGGGTGAG | | | |
| 386 | CATGGCAGTCGCTTGGA | P | 0.03431699 | 0.002803689 |
| | ACCCACTCACACCAATCC | | | |
| | AGTGACCGTGTGTGG | | | |
| 387 | CAGGCATGGCTTTGTTTC | N | 0.047591699 | 0.017559411 |
| | TGGTTTCAATCTGTTCTC | | | |
| | GTTCCTTGTACCGG | | | |
| 388 | TCTGGACTTGAACTCTGG | N | 0.024578957 | 0.003836375 |
| | CAAGAGATGCCAAAAGG | | | |
| | CATTGGTACCGTGTT | | | |
| 389 | GCCAGATATGCCTGTTTC | N | 0.02311552 | 0.010177508 |
| | CTTTTCCCAGCACCATGC | | | |
| | CTGTGGAGGGGACA | | | |
| 390 | AGAAAGGACCAGTGCCG | P | 0.027182494 | 0.030293534 |
| | TCACATCGCTGTCTCTGA | | | |
| | TTGTCCCCGGCACCA | | | |
| 391 | GGTCCCCATGTGCCTGTT | N | 0.011044731 | 0.006347093 |
| | GTTCAGCCCTCTCTCTTG | | | |
| | TTCCCTTTCTGAGC | | | |
| 392 | TTAATTGAGAGGGGCAG | N | 0.007626962 | 7.03433E−05 |
| | GGCTGGAGAAGGAGCAA | | | |
| | GTTGTGGGGAGCCAGG | | | |
| 393 | CCATGTGTCCCATCTCAA | N | 0.048432163 | 0.045676091 |
| | GCCACAGAGCAACTCAC | | | |
| | AGGGTACTTCACACC | | | |
| 394 | TTGCCTCCCCCAGCCCC | N | 0.004356057 | 0.006527945 |
| | CTCCCCATCAATAAAACT | | | |
| | CTGTTTACAACCACC | | | |
| 395 | GAGTTACAAGCACCAGG | N | 0.004416027 | 0.001451564 |
| | GGATGCTCTACATCAAGG | | | |
| | GATGCACCTTCAGTC | | | |
| 396 | GTGACTGCTGGCTCTGTC | N | 0.042905866 | 0.011264289 |
| | ACCTCATCAAACTGGATG | | | |
| | TGACCCATGCCGCC | | | |
| 397 | CCCTGCTTCCCGACACCA | P | 0.023332576 | 0.008044545 |
| | GCCTCATGGAATATGCAA | | | |
| | CAACTCCTGTACCC | | | |
| 398 | TGAGGTCCTGGAGTGCG | P | 0.02228292 | 0.002856177 |
| | TGAGCCTGGTGGAGCTG | | | |
| | ACCTCGCTTAAGGGCA | | | |
| 399 | GACAAGTCCCAAGATGC | N | 0.007992622 | 0.006093324 |
| | CAGAAAGGCAGTCTCCC | | | |
| | AAGGACCCACCATGCA | | | |
| 400 | GTTGCAAAGGTGGAGGG | N | 0.037410884 | 0.000373474 |
| | TTTTAGACTCTCATGCTT | | | |
| | CAGGTGCTGTCGGGG | | | |
| 401 | GTGCAGTGCTCTGAGGG | P | 0.046597272 | 0.017788559 |
| | GACAGACAAGGCTTGGG | | | |
| | TGTATATGCCAACCAG | | | |
| 402 | CGGAGAGTCACCCAACT | P | 0.043575131 | 0.000793079 |
| | GTGTGGAAGACAAGATG | | | |
| | CTCTCGACAGTTGCAG | | | |
| 403 | GGTGGACGACTGTGTTA | P | 0.039942233 | 0.023844026 |
| | CAGCCTTGGCTGCGCTA | | | |
| | GTAGCTGGCTTTCATG | | | |
| 404 | AAGGACCAGTGTCTCCCA | P | 0.033280802 | 0.000151296 |
| | GGAATCTGCAGGAGTCT | | | |
| | GAAGAGGAGGAAGTC | | | |
| 405 | AGGAAAAGTCTTGGCTG | N | 0.008672586 | 0.030940433 |
| | GACCCCTTTCCTGCTGG | | | |
| | GTGGATGCAGTGGTCC | | | |
| 406 | CTAGTGCTACAGCAACTG | N | 0.018812458 | 0.008197009 |
| | AGACAGCAACCAAGAGG | | | |
| | CAAGAAACCTGGGAT | | | |
| 407 | GGCACCCAAGGTTTCTGA | P | 0.019843061 | 0.004008385 |
| | TTCTGACCCAGCAGTGGT | | | |
| | CCTGAAGAGAGCTG | | | |
| 408 | CCCAGGGAGTGCTCGAG | N | 0.048620486 | 0.015664898 |
| | GCGCATCAGGCCCGTTTT | | | |
| | TTACCAGTTTATATC | | | |
| 409 | GGCCCTGAGGCTGTACC | P | 0.046580984 | 0.02100308 |
| | ATATCACTGACCAGGTCC | | | |
| | ATCTCTACCCCATTG | | | |
| 410 | TCATGCTGAACAGAAGG | N | 0.01430334 | 0.006971567 |
| | GCAAGAGAGGTGGATCT | | | |
| | GTGAGGGAAAAGACCC | | | |
| 411 | GCTACGTGTCCCTGGCAT | P | 0.012942887 | 0.01317341 |
| | TTTAGGTGTCGGTTGGGC | | | |
| | AGTCATGGATCAGG | | | |
| 412 | CACAGTAACTCCTGCCTG | P | 0.049853186 | 0.001586586 |
| | CAATCCCAGTACTTTGGG | | | |
| | AGGCTCGCTTGAGC | | | |
| 413 | ACAAGGTGCTAAAACAGG | P | 0.035761898 | 0.020667243 |
| | TTCACCCCGATACTGGCA | | | |
| | TCTCATCCAAGGCC | | | |
| 414 | TGCTTCCTCAGGGCCCA | P | 0.009459734 | 0.007734844 |
| | CCATTGAAGAGGTTGATT | | | |
| | AAGCCAACCAAGTGT | | | |
| 415 | GATCTTCAAAGCTGCTGC | N | 0.049569073 | 0.041894138 |
| | GGGCATTCTATGTCCCCT | | | |
| | TCCTGTCAGATCAG | | | |
| 416 | TGGGAGCGCCCGAATCT | N | 0.023760699 | 0.006556657 |
| | GGCTCGGCAGAATATCTC | | | |
| | TTCGACAAGCACACC | | | |
| 417 | CCTGCCCCTATCACTAGT | P | 0.029678174 | 0.04997287 |
| | GCATGCTGTGGCCAGAC | | | |
| | AGATGACACCTTTTG | | | |
| 418 | CAGTTCGGTTTTGGACTC | N | 0.045719947 | 0.002522644 |
| | TGAGTCAAAGGATTTTCC | | | |
| | TTTAAATGCTTGTC | | | |
| 419 | CCCCCACCCCCGAAAAT | N | 0.038002274 | 0.004756997 |
| | GTTCAATAATGTCCCATG | | | |
| | TAAAACCTGCTACAA | | | |
| 420 | CGGGACCTCAAGGTGAT | N | 0.012599874 | 0.005831922 |
| | GACAGATGTAGCCGGCA | | | |
| | ACCCTGAAGAGGAGCG | | | |
| 421 | AGCCCTTGGGCTCCCTTC | P | 0.036916791 | 0.013191742 |
| | TCTTTGATAGCAGTTATA | | | |
| | ATGCCCTTGTTCCC | | | |
| 422 | GGTTCAGAGAGGGGAAG | N | 0.032783796 | 0.000240423 |
| | TGATTGGCCTAAAGTCAG | | | |
| | GAACTAGGCAAGTGG | | | |
| 423 | TTGAGCCACGCATAGTGT | P | 0.018823519 | 0.00503824 |
| | CACGCACCTGTGATCCCA | | | |
| | GCTACTTAGGAGGT | | | |
| 424 | GCTCCAGGCCTAGGTGC | P | 0.049934442 | 0.009379965 |
| | CCAGGCTATGATGAGTCT | | | |
| | GCTTTTGAAGGAGGT | | | |
| 425 | CGCAATGAGTAGGGCTG | P | 0.022075229 | 0.036937961 |
| | GGTCTCGGCCATGGAAA | | | |
| | GCATACCTCAGTGCTC | | | |
| 426 | TCACGAACAATAGCTTGC | N | 0.008476161 | 0.005954972 |
| | GCTCTACTCTGTAGTTAT | | | |
| | GTGGATTGCCGAGC | | | |
| 427 | CAGGGGAATTCAACGAC | P | 0.038408863 | 0.021614244 |
| | CTGAGAAAGGTCACCAA | | | |
| | GGAGCAGTGGGACACC | | | |
| 428 | CCAGCAGAATGGGAATG | N | 0.047649343 | 0.000550068 |
| | GGGGAAACACAGCAGTT | | | |
| | CTTGGGTAAAAGTCCC | | | |
| 429 | GGAGGGCTGGAATCTGT | N | 0.003636844 | 0.010730638 |
| | CTTCCCTGACTCGGCTCC | | | |
| | TCAGGTCTTTAGCCT | | | |
| 430 | TGGATCAACAACTGCTAC | N | 0.043800643 | 0.042616071 |
| | TCTCGGGAAGACTCCTCT | | | |
| | ACTCACAGCTGAAG | | | |
| 431 | CTCTCTGATGCTGATTTG | N | 0.021003288 | 0.033603647 |
| | CACTCTGCTGGAATTCTG | | | |
| | CCTAGCTGTGCTCA | | | |
| 432 | ACAAATCAGCCTGGTCAC | P | 0.033117538 | 0.022037076 |
| | CAGCTTTTCGGAACAGCA | | | |
| | GAGACACAGAGGGC | | | |
| 433 | TGTGCCAGGGCCAAGGG | N | 0.042007277 | 0.001312877 |
| | GACACAGAAGATGGCAG | | | |
| | GATGACACTAATGGGG | | | |
| 434 | GCACACGTGCAGCCTATA | N | 0.033166623 | 0.017705348 |
| | TGGGAAAACCTTCCCTCT | | | |
| | GTACCTGCCTCAAA | | | |
| 435 | CATGACTCTGAACCGTAA | N | 0.036836062 | 6.98281E−05 |
| | CTGCATCATGAACTGGTG | | | |
| | ACGGGGCCCTGGGC | | | |
| 436 | TTCATCACCGAGGGCCT | P | 0.029047586 | 0.043721123 |
| | GGAGGTGCACTTCGTGG | | | |
| | AACACTACCGGGAGAT | | | |
| 437 | ATAGGTAACCAAGGAGCA | N | 0.046635012 | 0.00957964 |
| | GTGAACAGCAGCTACTAC | | | |
| | AGTAGTGGAAGCCG | | | |
| 438 | GGCGCGCGGCCAGGAG | P | 0.021029272 | 0.029965971 |
| | CACGCATGGTATTGACTT | | | |
| | AAAAGGTTCATTTTGT | | | |
| 439 | CTTTAGGGGTAGACTTAT | N | 0.023506379 | 0.000611306 |
| | ACCTTAAGTGAAGGAGTG | | | |
| | GGGGAGGAAGAAGC | | | |
| 440 | GGCTGCAAAGGGAATAG | P | 0.003613279 | 0.003245303 |
| | GCTGATGGAGCTGTTCTG | | | |
| | TATGGTACTGTGTGG | | | |
| 441 | GTGGGAGCCGTACTCTTT | P | 0.034190976 | 0.013199811 |
| | GCCCTTCTGCTGATGTCT | | | |
| | ATCTCATGTCTGTG | | | |
| 442 | GGCCGCGGGAGCCGCA | N | 0.046275311 | 0.002221781 |
| | CGCGGCGATATGGAAGA | | | |
| | GGAGGGCAAGAAGGGCA | | | |
| 443 | TCCATAAAGCTACCAGCT | N | 0.044788767 | 0.000618749 |
| | CCTCGCGAAGTGAACCT | | | |
| | GAAGGGCGGAAAGGC | | | |
| 444 | CCTAGGACGCCAAGGGG | N | 0.023231498 | 0.000667463 |
| | GAAAGGAGAGGGCGGAA | | | |
| | AAGGACCAGCGGGATC | | | |
| 445 | CAGCCCAGAGAGATTATA | N | 0.044773772 | 0.001207759 |
| | AGAACTGATGTGGCCAG | | | |
| | AGTGCCTACCCACTG | | | |
| 446 | TCATTGGAGGTTGGGAA | N | 0.036674829 | 0.006079723 |
| | GGAAGTGAGGAGAAAGT | | | |
| | GTTCTTGTTTAGTGTT | | | |
| 447 | TTCTCCCATTGACAGGAG | P | 0.018276619 | 0.001413291 |
| | CACTTGGCCCTGCCTTAC | | | |
| | CTGCCAAGCCCACT | | | |
| 448 | CCGCCACCACGCGCAGC | N | 0.009503129 | 0.005072368 |
| | CTATTCGCCGCACTAACT | | | |
| | GTGCCCGATGTGTGC | | | |
| 449 | ATGGCCAGGTGGGGCCC | N | 0.049828092 | 0.004474054 |
| | CTGGGGCAATGGCAGTG | | | |
| | GTAGAACGCTCAACTT | | | |
| 450 | CTGGAGAGCTGGACAGT | P | 0.037358989 | 0.01495552 |
| | GTTGGTTAGCTTCCTGCA | | | |
| | TTGATTGCCCCTGGG | | | |
| 451 | CCTAGACTTTGATTTCTC | P | 0.040909116 | 0.020653875 |
| | CGGCAGCCCAGATGTTC | | | |
| | AGTTCTCTTGGCCCC | | | |
| 452 | GCAAAATGACTGCAGCTC | N | 0.049921558 | 0.019239507 |
| | AGAAGGCTTTGGCTAAAG | | | |
| | TTGACAAGAGTGGA | | | |
| 453 | TTTTTGCAGGGTGCTGCC | N | 0.004556985 | 0.001659403 |
| | TATGGGCCCTCTGCTCCC | | | |
| | CAATGCCTTAGAGA | | | |
| 454 | GGTGGGTTTGCCTAGGG | N | 0.03482829 | 0.012773439 |
| | ACGTGTAACTACAGGCTT | | | |
| | TTACTAAGCCAAGGA | | | |
| 455 | CGTCAAGCATGCCTTCGA | P | 0.02353455 | 0.028088035 |
| | GATCATACACCTGCTCAC | | | |
| | AGGCGAGAACCCTC | | | |
| 456 | CCCTGCCCCCAAACTGG | P | 0.01003673 | 5.36219E−05 |
| | CTAAGACAGCTTTCAGTT | | | |
| | CCTGACTCCCCAACT | | | |
| 457 | AGGTCTCCTATGGGTGC | N | 0.023814896 | 0.005421136 |
| | CTGGGAAGTCCTTGAAAG | | | |
| | TGGACTGTTCTCAGG | | | |
| 458 | CCTTGAGGTAGAATGTGA | N | 0.009468898 | 0.006664989 |
| | GTCTCAGAAATGACTGCA | | | |
| | TTACCTGCcctttt | | | |
| 459 | GGCGGAATTGGGGGACT | N | 0.033767851 | 0.000318511 |
| | GTTTCCTGACATCCTGGA | | | |
| | CAAGGGAAGCCCACT | | | |
| 460 | AAGTCAGTGGTACACAGA | N | 0.021500535 | 0.003315181 |
| | CATTCTGTACATATCCTG | | | |
| | TGAAACGTGCTGTC | | | |
| 461 | CAAGACTGAATGGTGAG | N | 0.035483944 | 0.04277624 |
| | GCCAGGTACAGTGGCGC | | | |
| | ACACCTGTAATCCCAG | | | |
| 462 | GATGTGGGCCAAGTCCA | N | 0.029658841 | 0.021781126 |
| | CTGTCCTCCTTGGCGGC | | | |
| | AAAAGCCCATTGAAGA | | | |
| 463 | TTTATTCACGTGTTTGTTC | N | 0.038805705 | 0.011540941 |
| | CTGGTGGGCAAGATGCC | | | |
| | ATCTGAGGCTTCAG | | | |
| 464 | CCGTAGGGCATGTGGTT | N | 0.023419853 | 0.026276822 |
| | CAAAGAGAAGCAGGAGG | | | |
| | GCAAGGGAAAGTTACC | | | |
| 465 | GCTACGGCTCTGGACCC | N | 0.019002931 | 3.14784E−05 |
| | TGGAGTGGCTGCAGGCG | | | |
| | GCATGGGGCTGCAAGC | | | |
| 466 | GCTGTCCCTCCACTACAG | N | 0.044162526 | 0.005878851 |
| | AAACCTCACAGAACACAG | | | |
| | CAAAGGATAAGTGC | | | |
| 467 | GCAGCTCACTAGCCCAC | P | 0.013837108 | 0.002245382 |
| | CCCTCCTCTATTTTGGGT | | | |
| | AAGAGAATTTACTAC | | | |
| 468 | CCTGCCTGATGAGGGGA | N | 0.018119342 | 0.039635577 |
| | AACTACAGCACCTGGAAA | | | |
| | ATGAACTCACCCACG | | | |
| 469 | TGGATTTTGAAACTGTCT | P | 0.017451819 | 0.000494604 |
| | TGTACTGTCCTGGCAATG | | | |
| | GGACTGATGGTGCC | | | |
| 470 | GCCAGATGGTCATCATAG | P | 0.008787821 | 0.006574062 |
| | TCACGGTGGTGTCGGTG | | | |
| | TTGCTGTCCCTGTTC | | | |
| 471 | CAAACACCTTACAAAGTG | N | 0.031967844 | 0.000472304 |
| | CTGAGTAGGTAATAGTGA | | | |
| | CCCAACTTGTTTGC | | | |
| 472 | CTGGTGACCGCCACAGC | N | 0.024035432 | 0.017787617 |
| | CCCGCTTTGTAACCAGG | | | |
| | GAATACACAGTCATTT | | | |
| 473 | TCCTGCAAGGATATTGTG | N | 0.048483992 | 0.035045431 |
| | GCTGGAGACATGAGCAA | | | |
| | GAAAAGCCTCTGGGA | | | |
| 474 | GCATTTGCCAATTCAAGG | N | 0.032938336 | 0.008195673 |
| | TAAAACAGGGTCAGTGAC | | | |
| | ATCTGCAGTGTCCC | | | |
| 475 | CGCCTCAACTGCTGCCC | N | 0.005155787 | 0.007788042 |
| | CTGGTTGAATGTTCTCTT | | | |
| | GATAGTGCTGGACCC | | | |
| 476 | CCAATGCCAACCTCATGC | P | 0.016672504 | 0.001493406 |
| | GGAACGGGGCCGACTAC | | | |
| | GCTGTTTACATCAAC | | | |
| 477 | TTCCAAAGCAGTTAACCC | N | 0.049459764 | 0.007602317 |
| | AACTCCTAACAACATTTT | | | |
| | CGGGGGATCTGACC | | | |
| 478 | TGGGTTCCTGTTGCCCTG | P | 0.007419042 | 0.006278724 |
| | TAATTAAACTGCTGCCCG | | | |
| | TAGAGGCCTTTCAG | | | |
| 479 | CATCCAGGAACTGAGGC | N | 0.01324661 | 0.013272519 |
| | CTGAACCATTTTGCATTT | | | |
| | CCCCCTCCTCCAGCC | | | |
| 480 | TCAGGTGCCCTTATGAAA | P | 0.029857838 | 0.010754685 |
| | AGGCTTGATAGAGGGAG | | | |
| | TTTGTCCTGTGGCCC | | | |
| 481 | CTGCCATAGTTACCTGGA | P | 0.036961837 | 0.011147436 |
| | TTGTCAGCCTTGGTAGCC | | | |
| | TTTGTCTAAAGTCC | | | |
| 482 | GTAAGGGTGGCAAGGTC | P | 0.031164038 | 0.008886845 |
| | TTCACTCTGTGGTCATTC | | | |
| | CATGCAGAACATCAG | | | |
| 483 | AACACTGTGAAAGTTACT | N | 0.028568309 | 0.000463693 |
| | TGGGGAGGGTGGGCCG | | | |
| | GTGGGGCCGTAGCTCT | | | |
| 484 | TTCCTGGCCTCCCCTGAG | N | 0.01654291 | 0.027941991 |
| | TACGTGAACCTCCCCATC | | | |
| | AATGGCAACGGGAA | | | |
| 485 | TGATTTTGGGGTAGCAAT | N | 0.03525057 | 0.011430599 |
| | CCAGGAGAAGGTGCTGG | | | |
| | AGAGGGTGAATGCCG | | | |
| 486 | TCAGAGCAGTGGCTGGG | N | 0.041686823 | 4.36744E−05 |
| | GCACTGGAAGTATGTCCT | | | |
| | GGGGAGCAATGCATG | | | |
| 487 | CGCGGGATCCTTGTGCA | P | 0.032815159 | 0.004185415 |
| | GGGAAGAGCTGCCCTGG | | | |
| | GCACCTGGCACCACAA | | | |
| 488 | AGTGAGCCAAGCAGAAG | N | 0.040838073 | 0.030352253 |
| | GAGGTGGAAAACGGACC | | | |
| | CAAACCCCAGTGTGCC | | | |
| 489 | AGGCATCCGCCGCCCCG | N | 0.018038639 | 0.012964413 |
| | TGTCGCATCCTGGAATAA | | | |
| | AATGTGGCTCTGGCA | | | |
| 490 | GTTTCCTTTTTATCTCTCA | N | 0.029546481 | 0.040012925 |
| | AGCCACCAGCTGCCAGC | | | |
| | CACCACGAGCCAGC | | | |
| 491 | GCAAGCTTCCTCCCTCAG | N | 0.004607924 | 0.011592561 |
| | CCATTGATGGAAAGTTCA | | | |
| | GCAAGATCAGCAAC | | | |
| 492 | CAGTTTGATCCAAATAAA | N | 0.011465896 | 0.001926674 |
| | CAGACCCCGTCTGGCAA | | | |
| | GAAATGCATTGCAGC | | | |
| 493 | TGCCCACTCATTTGTATA | N | 0.042842123 | 0.011071869 |
| | AGTGCGCTTCGGTACAG | | | |
| | CACGGGTCCTGCTCC | | | |
| 494 | CCGGCTTCTGGGTCTTTG | P | 0.014758016 | 0.006353836 |
| | AACAGCCGCGATGTCGA | | | |
| | TCTTCACCCCCACCA | | | |
| 495 | TGTGGGCAACATCAGTCC | P | 0.047109149 | 0.023303175 |
| | CACCTGCACCAATAAGGA | | | |
| | GCTTCGAGCCAAGT | | | |
| 496 | TTCTCAATCCCCTGCTGT | P | 0.023796576 | 0.031236042 |
| | GGTAGGAACTCCAGTGG | | | |
| | TGAACGGCTTGCGCG | | | |
| 497 | CCACAAAGTGACCAAGAA | P | 0.024982993 | 0.001768943 |
| | CGTGAGCAAGCCCAGGC | | | |
| | ACAGCCGACGCCGCG | | | |
| 498 | CATGAAGCAGCTGGAGG | P | 0.006534179 | 0.000916375 |
| | AGTTGGAGGAGGAATTTT | | | |
| | GCCGCCTGAGACCCC | | | |
| 499 | CGTCTTGGTGCCTTTTGT | N | 0.022931693 | 0.04250559 |
| | GTGATGCGCCTTGCTGAT | | | |
| | GGCTTGACATGTGC | | | |
| 500 | TTGGTGGGGCTGGGTAC | N | 0.020120849 | 0.035717305 |
| | CAATGCTGCAGGTCAACA | | | |
| | GCTATGCTGGTAGGC | | | |
| 501 | GCCTTGTTGCCTCTGCCC | N | 0.046837754 | 0.012937732 |
| | TTTGAAGTCGGAACAATT | | | |
| | CCTAGCACCTGTCG | | | |
| 502 | ACCTCTTTTAACAGGAGC | N | 0.034667737 | 0.00461432 |
| | CTGAGCACAAGGTTTAAT | | | |
| | GAGGAAGCTGGGGC | | | |
| 503 | GTCCTGGGAAAGGAGTA | P | 0.026365815 | 0.012276163 |
| | CACCGAGAAGACCCCCA | | | |
| | TTTCTGAGCATGCTGT | | | |
| 504 | CAGCCAAGGGGAAAACA | N | 0.012289952 | 0.003564366 |
| | TGGCTCTTCTGCTCCAAA | | | |
| | AAACTGAGGGGGTCC | | | |
| 505 | ATGTTGGCGGTCCCTGT | P | 0.024624458 | 0.001969257 |
| | GACCTGTGGAGACACGG | | | |
| | CCAGATCTGCCCTCCA | | | |
| 506 | CCAAACACTCTCCCTACC | P | 0.042488377 | 0.0299422 |
| | CATTCCTGCCAGCTCTGC | | | |
| | CTCCTTTTCAACTC | | | |
| 507 | CACCATCATCCCAGTAGC | N | 0.010152256 | 0.019762924 |
| | TGCCCTATTCAACTGCAA | | | |
| | CAGTCTCCAGGACC | | | |
| 508 | CTGAGGAGCGAATCCGC | P | 0.046216056 | 0.007150319 |
| | AGTGGGGTCAAGAGGCT | | | |
| | GAGTAAGAGCCGCCAA | | | |
| 509 | TGTCCGCCATGGTCAGAA | P | 0.025520917 | 0.024886868 |
| | CACCTACCTCCCCTGGTT | | | |
| | ATTGTGAGGCTGGC | | | |
| 510 | GGTGGACGACTGTGTTA | P | 0.016042966 | 0.012228281 |
| | CAGCCTTGGCTGCGCTA | | | |
| | GTAGCTGCCTTTCATG | | | |
| 511 | GCACAGTCCCAGGTCCC | N | 0.006042082 | 0.001201442 |
| | AGCTCCCCTCTTATGGTT | | | |
| | TCTGTCATAATGTGC | | | |
| 512 | AACAGGGGAACTTTCCGT | P | 0.035708812 | 0.004734847 |
| | ACCTGCAGTGGGTGCGC | | | |
| | CAGGTCACAGAGTCA | | | |
| 513 | GCTGACCCCAGCTTCCA | P | 0.047054415 | 0.007023301 |
| | GGGGACTGTCACTGTGG | | | |
| | ACGCCAAAATGGCATA | | | |
| 514 | AGAGCCCCACACGGAGG | P | 0.008921035 | 0.019620598 |
| | CATCTGCACCCTCGATGA | | | |
| | AGCCCAATAAACCTC | | | |
| 515 | CATGGGCTGGGTTTTGTG | N | 0.00350231 | 0.002287415 |
| | CTTACTGTATGTTGGCGA | | | |
| | CTTGGTAGGGCAGG | | | |
| 516 | CAGTGAGCTGCCCCCAA | N | 0.037639269 | 0.04098076 |
| | ATCAAGTTTAGTGCCCTC | | | |
| | ATCCATTTATGTCTC | | | |
| 517 | ATCCCAGCAATTTGGAGG | N | 0.043034092 | 0.016140836 |
| | CTGAGGTGGGAGGATCA | | | |
| | TTTGAGCCCAGGAGT | | | |
| 518 | TGCTGGGTTCAAAGTCCT | N | 0.049871254 | 0.001679007 |
| | TAGAATTCCCTTCCTCCC | | | |
| | TCAACAAGCTGCTG | | | |
| 519 | GGGTGAGCTGCACCTGA | N | 0.013240539 | 0.018243242 |
| | TTAGTTGAAAGGCCTCAA | | | |
| | GAACAAACACTGCAG | | | |
| 520 | TTGGGGCCAAACACAGA | P | 0.018213436 | 0.001272422 |
| | ATCAGCAAAGAGGAGGC | | | |
| | CATGCGCTGGTTCCAG | | | |
| 521 | CTGTGTCTGGGTACCCTC | P | 0.007729048 | 0.003069837 |
| | TGAGTAGGCCTATAATTC | | | |
| | CTACCTTGACTGTG | | | |
| 522 | CCCTGCCCTCCACAGAAT | N | 0.023934013 | 0.031236757 |
| | TGGGTTCCAAGGGCTGTT | | | |
| | CCAGACAACTGCCA | | | |
| 523 | GTACAATGTTATCTCTGT | P | 0.02467355 | 0.022540344 |
| | GGGAGGAAGGAGGCAG | | | |
| | GCTGTGGTGGGACTGG | | | |
| 524 | GGACCGTGGAAGAACAG | N | 0.021551082 | 0.004250885 |
| | CACTTTCAAACCCACAAC | | | |
| | TGAGAATGATGACAC | | | |
| 525 | GAGACTGGGGTGCATCT | N | 0.021805161 | 0.002759933 |
| | CCAGAGCCACTCACACC | | | |
| | CTCAACCTCGTTTCCT | | | |
| 526 | GCAGAGCTGTGCTTCCT | P | 0.039666552 | 0.003300055 |
| | GGACGTGATTCCCTTTTG | | | |
| | GAAGCTGGACCTGGA | | | |
| 527 | ACTTAACCTGCTCAGGCG | N | 0.032952204 | 0.029580446 |
| | GGCCTTCGCCCAGCTGC | | | |
| | AAATAGGGATGCGTT | | | |
| 528 | TATAAGTGCCATTGTTGT | N | 0.009264582 | 0.000984511 |
| | AAGGTGGTGTTTCCTAGA | | | |
| | CCTTCCCTGATGCG | | | |
| 529 | GGGGAGCTTCCAATTAG | N | 0.021105438 | 1.79908E−05 |
| | CATACATAGACACATGTG | | | |
| | TCAGTGGCCAAGACC | | | |
| 530 | GAGGACGTCCCGGCTGG | N | 0.047966416 | 0.042357005 |
| | GATGAAGTCTGGTGGTG | | | |
| | GGTCGTAAGTTTAGGA | | | |
| 531 | GTGAGATTCGTGTTACTT | P | 0.02147264 | 0.009805861 |
| | TGGCTTTTCTGTCTCTGT | | | |
| | TGACACGGTTGCAC | | | |
| 532 | ATGTGTCACCTGGAGCTG | N | 0.015586966 | 0.017261609 |
| | GGCACTAACCATTCCAAG | | | |
| | CCGCCGCATCGCTT | | | |
| 533 | GATGTGGCGATCAGGGG | P | 0.04109581 | 0.005430416 |
| | ATAGTGAAGTTTACCAAC | | | |
| | TGGGTGATGTCAGTC | | | |
| 534 | TGAAGAGAGGAGGGGGA | N | 0.048100684 | 0.001272735 |
| | CTTTAGAGAGGGATGAAA | | | |
| | ATGAGCCCTGGGAGG | | | |
| 535 | GCAGGTCTTGTTAAAGCT | P | 0.033386333 | 0.006947321 |
| | TGCAGGCAGTGACACAC | | | |
| | AGAAGACGGCCGTGC | | | |
| 536 | CCTGGACCTTTGATGGAA | N | 0.020092936 | 6.366E−05 |
| | CAGATGGGAGGAAGAAG | | | |
| | AGGAGGACGTGGAGG | | | |
| 537 | GCAATCAGCATTCCTCCC | P | 0.000440445 | 2.08857E−05 |
| | CTGTGGATGACATAGAGA | | | |
| | GTCATGCCCAAACA | | | |
| 538 | TGGACCTGGGTCATAGG | P | 0.011505379 | 0.00307559 |
| | CTGAACCTGTTATGGACC | | | |
| | CCCAAATTCTGAGAG | | | |
| 539 | TGAGGACCTGTTCCCCG | P | 0.047900953 | 0.011956872 |
| | AGGCCAAGCAGAAACGG | | | |
| | CTTGCCAAGTCTCCAG | | | |
| 540 | TATCTTCCATTCCTCGCC | N | 0.01524656 | 0.028545498 |
| | CTGCCCCCAGAGGCCAG | | | |
| | GAGCTCTGCCCTTGA | | | |
| 541 | CGCTTCACGGAAATGCG | P | 0.026303229 | 0.001368521 |
| | CGAGATGGACCTGCAGG | | | |
| | TGCAGAATGCAATGGA | | | |
| 542 | GCAACAAAGTCCCGAGC | N | 0.019283435 | 0.015707034 |
| | AATGAAGTCATCCACTCC | | | |
| | TGCATCTGGTTGGTC | | | |
| 543 | CAGCCATAGCACTTTGTT | N | 0.003946328 | 0.000146371 |
| | CACTGTCCTGTGTCAGAG | | | |
| | CACTGAGCTCCACC | | | |
| 544 | CCAGGCTGTAAAAGCAAA | N | 0.041471932 | 0.001873204 |
| | ACCTCGTATCAGCTCTGG | | | |
| | AACAATACCTGCAG | | | |
| 545 | CCTGACACTGGAGGGCA | P | 0.04901318 | 0.02574041 |
| | GCTGTCTTGTGCATTACT | | | |
| | TGTGTTCCCAGCACC | | | |
| 546 | TTGGTGGTCCCGAGGGA | P | 0.033313644 | 0.022003999 |
| | GAACTGACCATGGACCT | | | |
| | GCACTCTTGTCCGAAG | | | |
| 547 | AGGTCTTGGGAGCTCTTG | N | 0.011121655 | 0.018991095 |
| | GAGGTGTCTGTATCAGTG | | | |
| | GATTTCCCATCCCC | | | |
| 548 | GGCTCTTATGGAGCCCT | P | 0.021014601 | 0.000290962 |
| | GGAGTTGTTGGGCAAGG | | | |
| | ATGCTGTCATTTTTTG | | | |
| 549 | TCTTGCCATGCAGCCCTT | P | 0.038103988 | 0.008797032 |
| | TTTATGGAGCAAGTCACA | | | |
| | ATACAGCAGCTTGC | | | |
| 550 | GCAGCAGCCAATTACAG | N | 0.046939746 | 0.032834718 |
| | CCCCTTTTGTAGCCGGG | | | |
| | CGTTCCTATGGTCAAA | | | |
| 551 | CTGTTGGCCTTTCTTAGC | N | 0.017576999 | 0.007364532 |
| | CTTTTTCTGTTTCCATTCA | | | |
| | GTGCTCCAAGCGC | | | |
| 552 | AGGGAAAGGGAAGTCGT | N | 0.042642576 | 0.003697907 |
| | GGAGAGGCAGGGAAAAT | | | |
| | GGTTAAGCAGCCCGGC | | | |
| 553 | ACTGGCGTTGCTGGGTG | N | 0.032734181 | 0.029268276 |
| | GCGATGCCCGTCCTCTG | | | |
| | GCTTGGGTTAATTCTT | | | |
| 554 | CCGGGGATTAACCAGCG | N | 0.046017403 | 0.03494442 |
| | TTATCAACCAGAAGCTAA | | | |
| | AGGATGATGAGGTTG | | | |
| 555 | ACCAAGGTGCAGAGATG | P | 0.003598978 | 0.013287415 |
| | GACAAGAGCAGCCAGGA | | | |
| | GACCCAGCGATCTGAG | | | |
| 556 | CTCCTTGATGGGCATGGA | N | 0.030375948 | 0.029680333 |
| | CTGGAAAGGATCCCAGG | | | |
| | AATACAAGAAGGCAG | | | |
| 557 | CTCAAGTCTGTATCTGCC | N | 0.040349518 | 0.015511437 |
| | TCCCCTGCCTTATTTCTT | | | |
| | ATGTTTTGCCACAG | | | |
| 558 | GCCAGGGCGGGGGCGG | N | 0.034459828 | 0.00226175 |
| | GGTGCATTTCCATCCTTG | | | |
| | TAAACCCTTCATAGTA | | | |
| 559 | AAAAAAGGATCAGCTGGC | N | 0.00507332 | 0.001092227 |
| | TGGGCAGGGTGGCTCAT | | | |
| | GTCTATAATCTCAGC | | | |
| 560 | CTGTGTTTAAGGCCGTGT | P | 0.028621069 | 0.00868039 |
| | CATTCAAGAGCCAGGTG | | | |
| | GTCGCGGGGACAAAC | | | |
| 561 | GCCCCAGCAGTGCCTTG | N | 0.002318217 | 0.011451138 |
| | TGCAATGTGAATGTGCGC | | | |
| | GTCTCTGCTAAACCA | | | |
| 562 | TGCCTTCCTTGACCATCT | P | 0.048912293 | 0.019934095 |
| | ACCTTGAACTAACCCACT | | | |
| | CCCAGCTCCCAGCC | | | |
| 563 | AGATACTCTTTGTGGGGA | N | 0.03332572 | 0.000651867 |
| | AGAGGGGCTGGGGCATG | | | |
| | GCAGGCTGGGTGACC | | | |
| 564 | CCACCCAAGGTATCAGC | P | 0.018610192 | 0.019657433 |
| | CGCAGTTGTGCCGCCAT | | | |
| | CATAGCCTACCTCATG | | | |
| 565 | GGAGGCCCTTCCCAAGG | N | 0.006884547 | 0.006288022 |
| | TGTGGTGACTGTGCCTTA | | | |
| | CTGTACATGCTCGGA | | | |
| 566 | GGTGGGGGCCGTTGCAG | N | 0.009732155 | 0.001598404 |
| | GTGTACTGGGCTGTCAG | | | |
| | GGATCTTTTCTATACC | | | |
| 567 | GCCTTTGGGTGGTGCAG | P | 0.022216512 | 0.003686331 |
| | TTCCCTCCGAAGACATGA | | | |
| | AATGACTCACACTGG | | | |
| 568 | AAATGGAGCCCTGAGGC | P | 0.011882824 | 0.001815474 |
| | ATCAGCTATTATACTTGG | | | |
| | GACTCTACCTCTCAC | | | |
| 569 | CCAGCTAAGCCCAGACC | N | 0.029137484 | 0.028129597 |
| | CCGTGGATTCTAGATAGA | | | |
| | TTTTAGAGGCAGCAG | | | |
| 570 | GTGATCATGCCACTGCAC | P | 0.013477333 | 0.000408422 |
| | TCCAGCCTGGGTGACAG | | | |
| | AGTGAGACCCTGTCT | | | |
| 571 | GGCAAAACACGCCCCCA | P | 0.014296774 | 0.006276019 |
| | TCTGCTGCCTTTTCTATT | | | |
| | GCCCTGCAACGTCCC | | | |
| 572 | TTATTTCTACTGTACATTG | N | 0.047780308 | 0.017617555 |
| | TTTTCTTTGTCCCAAGTT | | | |
| | GACCTAGGGTGAC | | | |
| 573 | CCTAGGGCCTTTTGTGGA | P | 0.035913481 | 0.017574484 |
| | TTGACAGTAGTCCCCTCC | | | |
| | GTAGGAGCTCACAG | | | |
| 574 | GAAGGGCATGGGGTGCA | P | 0.039267682 | 0.011593442 |
| | GCTAGAACAGTGTAGGTT | | | |
| | CCCTCAATAACCCCT | | | |
| 575 | TGGCCCGCACAACTTCC | P | 0.014196954 | 0.002359389 |
| | CCCTCGGGCTCCACTGC | | | |
| | CAGGTCAGATGCTGCT | | | |
| 576 | CTCTGAGCAGTCAGCGG | P | 0.012542104 | 0.005260003 |
| | CTCCAGTTTGGGCCCGAT | | | |
| | AAGGAAGTTCTCCGT | | | |
| 577 | AAGGAAGTGAACAGGCC | P | 0.042631636 | 0.021942582 |
| | TGACCCTGATGCCCAATA | | | |
| | ACGGGCAACCCTAGG | | | |
| 578 | GTCCACGTTTTCGGCAGA | N | 0.036290447 | 0.009871918 |
| | AGTAGTGAGTCAGTGTG | | | |
| | GAAGAGAGGTGAGGG | | | |
| 579 | GGTACCCGGCCAACATC | N | 0.040668273 | 0.008626021 |
| | AAGTGACTTTATAGCTGC | | | |
| | AAGAAATGTGGTATG | | | |
| 580 | AATGCCACTGACCCTTCT | P | 0.018093647 | 0.001122555 |
| | GCCCGCACGCTGACCCA | | | |
| | CTACAAGTCAGCTGT | | | |
| 581 | GACCCTAGCACTGGCTG | P | 0.04900488 | 0.002334043 |
| | TGACATGCTGCTTGGTGC | | | |
| | TGCCTCTGGTCCTGA | | | |
| 582 | GCTGGAGCCCGCACCCT | P | 0.031880914 | 0.00912872 |
| | AAGCATCCTGCTGCCTTC | | | |
| | CCACAACATTAAACT | | | |
| 583 | GGTGGTAACTCCCCAAC | N | 0.048370423 | 0.004896163 |
| | CTGACATTGGTACTGTGC | | | |
| | AATAAAGACACCCCC | | | |
| 584 | CCTCAGGATGGGGAGCT | N | 0.00703963 | 0.009747108 |
| | CACTCCGAGAACAGGAG | | | |
| | AAATCAACATTGCAGT | | | |
| 585 | CCCTCATGCTCCTTGTTT | N | 0.028886778 | 0.007616024 |
| | ATAGTCACAACCTCTCCT | | | |
| | CAGCCCTAACCCTT | | | |
| 586 | AACTGCTGGCCAACTCTT | P | 0.001857117 | 2.78336E−05 |
| | ACATCCCCAGCAAATCAT | | | |
| | CGGGCCATTGGATT | | | |
| 587 | CCCTCACAGCCCCCAAAA | P | 0.039339724 | 0.017153019 |
| | AATCTGCAACCCAGTTTA | | | |
| | CCGGTCGCTACCAT | | | |
| 588 | CCGGCCCAGCCAGGCCA | N | 0.023073918 | 0.001903273 |
| | TCTCACGTGTACATAATC | | | |
| | AGAGCCACAATAAAT | | | |
| 589 | GGCCACACGCAGAGGAG | P | 0.014794988 | 0.000543661 |
| | AAATGGTCTTATGGGTGG | | | |
| | TGAGCTGAGTACTGA | | | |
| 590 | GCGGTAACCAGCGTGAG | P | 0.036364137 | 0.017309332 |
| | CTCGCCCGCCAGAAGAA | | | |
| | TATGAAAAAGCAGAGC | | | |
| 591 | CCCAGAACACACATCTGA | N | 0.031578554 | 0.012764959 |
| | GACAGGACCATAATTATT | | | |
| | GTAGCCCCACCAAG | | | |
| 592 | GTCAGAGCAGTGCCACC | P | 0.043475944 | 0.007226452 |
| | TCCTGTCTCAGTTCTTCA | | | |
| | GAGAGCTTCCACCAG | | | |
| 593 | AGTGCCACATTTGGCAGT | N | 0.034104006 | 0.015924288 |
| | ACAAATGAGTCTGAGTGT | | | |
| | AATAGCCCAGAGAT | | | |
| 594 | GCCCTGGTGTCCTGGGT | N | 0.039047457 | 0.009406113 |
| | TTTCGTGATGATCTTTGC | | | |
| | TCTGTTTCCAGTGGG | | | |
| 595 | TTGGGGAGAGAAGAAAG | N | 0.034275174 | 0.004299453 |
| | GGGGTTCAGAGGCCGGT | | | |
| | ACCTCCCCTACAGCAG | | | |
| 596 | CTGCCTGCTGCATCTTTT | P | 0.012433872 | 0.001085221 |
| | CTGTTGCCCCATCCACCG | | | |
| | CCAGCTTCCCTTCA | | | |
| 597 | GCATGGGTTTTTCTGCAG | N | 0.025540155 | 0.008487738 |
| | CTTATTGTGAATACCTTG | | | |
| | GTTCTGTTCAATAG | | | |
| 598 | GTCCACGCAAAGCTTGG | P | 0.0056957 | 0.000592579 |
| | GGATTGTATTTGGACCTA | | | |
| | CCCTTCTGCGAGCTG | | | |
| 599 | GGTCCTGTACGACATTTA | N | 0.015088545 | 0.002437683 |
| | CTGGTCTGAGGAGATGG | | | |
| | AGGACCGGCTGCAGG | | | |
| 600 | CAGAAAGCCTGCTGGGG | P | 0.015476971 | 0.000810364 |
| | ATGGTGCCAGCTGTGCC | | | |
| | TTGGCTGTTGTATTTG | | | |
| 601 | GGTTTCCTTCAGACAGAT | N | 0.002087964 | 0.002531764 |
| | TCCAGGCGATGTGCAAG | | | |
| | TGTATGCACGTGTGC | | | |
| 602 | GCGCTGGGCAGAAAGGC | N | 0.039780854 | 0.023882913 |
| | TACCATCACCGCACTGAG | | | |
| | ATCAACAAGAAGATT | | | |
| 603 | TGACTCAAGGGCTGTAGA | P | 0.026592536 | 0.015754478 |
| | TGTTCCCTTTCCACCCCC | | | |
| | CACACTTGGTGCGT | | | |
| 604 | CGACAGCAGGACATACAT | P | 0.040247578 | 0.049282971 |
| | GTTGGTGTGAAGACTGG | | | |
| | GACGACACTGGGTAG | | | |
| 605 | CACCCTGTTCTTCCCTGG | P | 0.018338871 | 0.021118585 |
| | TATGTTGGCAATTCCCTG | | | |
| | CGCATGCTAAGAAA | | | |
| 606 | GTTAGAGGCCAACAATTC | N | 0.026696397 | 0.002804317 |
| | TAGTATGGCTTGTTGGCA | | | |
| | AAGAGTGCTACACC | | | |
| 607 | GCGCCTCAACTGCTGCC | N | 0.011833184 | 0.006401904 |
| | CCTGGTTGAATGTTCTCT | | | |
| | TGATAGTGCTGGACC | | | |
| 608 | CCTTGATACCCACTTTTT | P | 0.023692962 | 0.016952204 |
| | GTGAATACCTACCCCCTT | | | |
| | CTGGCCACGGTGCC | | | |
| 609 | ACCAGGTCCAATGTGGG | N | 0.039784026 | 0.000485212 |
| | GAGAAATATGAAGGAGGT | | | |
| | AGCAGCCCTGGGTTC | | | |
| 610 | AATGTGTAGGAAAAGCCT | P | 0.047807766 | 0.000887484 |
| | TCTGGCCACCCAGAGAG | | | |
| | CCGGAGCCCTGCTTG | | | |
| 611 | GGGACTATCCAGATCTTG | N | 0.019925486 | 0.023122196 |
| | TGTGGCATGATGGTATTG | | | |
| | AGCTTGGGGATCAT | | | |
| 612 | CATGCACCTACACTCCAG | N | 0.019590875 | 0.014811948 |
| | CCTGGGTGACAGGGCCA | | | |
| | GACTCTGTGAAAAAA | | | |
| 613 | CGTAGACAGAGCTAAAAG | P | 0.016167098 | 0.005508736 |
| | GAGTGGTGTGGCGTACA | | | |
| | TTGCGGCTCCCTCCG | | | |
| 614 | GCAGCTCCCAAGGACAC | P | 0.045662136 | 0.003180791 |
| | AAGCTGTTGGGATGCTAC | | | |
| | TTCTCAGCTTCACGC | | | |
| 615 | GCCACAGTCTAATGTCAT | N | 0.033271306 | 0.034462768 |
| | TCACTTCATTTGATGGGG | | | |
| | TCACTTGTTAGCTG | | | |
| 616 | GACCTTGCTAAGGCTAAA | P | 0.047412948 | 0.024480004 |
| | GAATCCCTGAAACAGGC | | | |
| | GCGTCATTCTCTCTG | | | |
| 617 | CCAGTGCCTTGGAACCT | P | 0.033210931 | 0.013227704 |
| | GCTGCCTTGGGGACCCT | | | |
| | GGACGTGCCGACATAT | | | |
| 618 | ATCTGCTGCCTATTAGGT | P | 0.010454101 | 0.001023498 |
| | TCTTCTGTGACATGTGCC | | | |
| | TCCCAGCAGTGAAC | | | |
| 619 | GCTCTTGGCTCCCTTGAG | N | 0.017690891 | 0.014305978 |
| | GTTCTGCTAGTGGTGTTA | | | |
| | GGAGTGGTTACAAC | | | |
| 620 | TGGCCCACCAACCCGCC | N | 0.018951587 | 0.005594844 |
| | CACCTTGACTGCCCCCA | | | |
| | GAAGTGTGTCTTGAGA | | | |
| 621 | GGCTGCCCCTCTTGAAC | P | 0.024962034 | 0.007363553 |
| | CACCCACATGCTTAGCCC | | | |
| | CAGCTTTTTGGAAGA | | | |
| 622 | CGCCAGTCAGAACCAATC | N | 0.047887627 | 0.003069205 |
| | CGAAAAGAATGTGTGTTG | | | |
| | ACTCAGGTTTGGAG | | | |
| 623 | CCTGCCCCAAACCGATAA | N | 0.029184491 | 0.017082703 |
| | GTGCATGACGGAACAATA | | | |
| | GGACTCCCCAGGGC | | | |
| 624 | ATCTCTCTTTGTCTTGAG | N | 0.02072694 | 0.000130379 |
| | GGGGCTGTTGAGTGGTC | | | |
| | GCGGACCTGGGCTCT | | | |
| 625 | GTTGACCAGAATAGTTGG | N | 0.030104875 | 0.023521738 |
| | TAACTCTGCCAGAGCCTG | | | |
| | TACTTACCTGCCAA | | | |
| 626 | GTTCCTGTCTCTTGCCAA | P | 0.032096251 | 0.004901309 |
| | CAAGAGGTTACCAGTGAA | | | |
| | AAGAGCTGCTGTCC | | | |
| 627 | GGAGAGTGCAGAGAAGG | P | 0.011986695 | 0.003276807 |
| | AGATCGGCTTGTGGTTTC | | | |
| | ACCCTGAGGAACTGG | | | |
| 628 | GATGGGGTACTGCCGGT | P | 0.014637429 | 0.003246485 |
| | CTGTGTTGTCTTAGAAGT | | | |
| | AGATGTGTGATGGCC | | | |
| 629 | GCCGACTCCCAGCCCGG | N | 0.048334671 | 0.046887347 |
| | CCAAAAAGACAAAACACA | | | |
| | TAGACGCACACACTC | | | |
| 630 | CTCCTCTTCCTTTCTCCG | N | 0.018512639 | 0.003766475 |
| | CCATCGTGGTGTGTTCTT | | | |
| | GACTCCGCTGCTCG | | | |
| 631 | ACAGGAAGCAAACTAAGC | N | 0.017028378 | 0.010897747 |
| | CCCCGCTGTAATGAAACA | | | |
| | CCTTCTCTGGAGCC | | | |
| 632 | GGGAGTACAGTGCCATTA | P | 0.038865142 | 0.009213826 |
| | GGACCAGCAAGTGACAC | | | |
| | AGGAATTCTGAATCC | | | |
| 633 | AAGGCTCGATCCTGCGA | N | 0.011236173 | 0.024519108 |
| | GAAGGAAGTGGTCTCTG | | | |
| | CCCAGCCTGCCACCTT | | | |
| 634 | GAACCCCAGGAAAAGGA | N | 0.021001888 | 0.013420666 |
| | AGAGGTCGAACCAACCC | | | |
| | TGCGGAAGGAGCATGG | | | |
| 635 | TTTTTAATCTGGAGCGGG | N | 0.035319468 | 0.000116512 |
| | GTGGGGAGTGGGAACCG | | | |
| | GAGAGAAAGCAAAAT | | | |
| 636 | GCCGCCGGGCGTGGTTT | P | 0.036581556 | 0.004069903 |
| | GCTTCTCTCAGTCACTGC | | | |
| | TGGCGCTTTCTTAAT | | | |
| 637 | CACCTGTTATCACAGCAC | N | 0.024220194 | 0.003865777 |
| | TTTGGGAGGCCAAGGTG | | | |
| | GGAGGACTGCTTGAG | | | |
| 638 | GCGCCCCCTTCTTCCAGA | N | 0.026812018 | 0.023037715 |
| | TGTAATAGAAAGCTCTGC | | | |
| | CCTATCACAAGGGG | | | |
| 639 | CCATGCTTGGGAGAATG | N | 0.020797587 | 0.000260101 |
| | GGGCTGGGACATGCACT | | | |
| | GAGTGTTGCACTTTTA | | | |
| 640 | CCAAACATGAGGAGGAA | N | 0.042239012 | 0.008205958 |
| | GAATGGACTGATGACGA | | | |
| | CCTGGTAGAATCTCTC | | | |
| 641 | GGCTTCAAGAGGCGGGC | N | 0.049462336 | 0.010042642 |
| | GTGCCCTCTGGAGTCCC | | | |
| | CTACCATGACTGAAGG | | | |
| 642 | ACATCATCCCAGAGGTG | P | 0.031955969 | 0.029382214 |
| | GTGTTCAGTGTCAGACCT | | | |
| | CTTAATGGGCCAGTG | | | |
| 643 | GCTTTCAAGGAGAGGCA | N | 0.026271755 | 0.017401357 |
| | ACGAGAAAGTTGGCAGG | | | |
| | AAAGTGACGCCATCCC | | | |
| 644 | CTTACTCTACTGATTTCC | N | 0.025293598 | 0.028612508 |
| | CCCCAGACTGTGATTTTT | | | |
| | GAACTTCCTTGCCT | | | |
| 645 | GGTGGATAAGGTGACTC | N | 0.028555911 | 0.007898531 |
| | AAAGGAAAGACGACTCAA | | | |
| | CCTGGAACTCAGAGG | | | |
| 646 | ATTTCCACATTTGGGGGC | N | 0.038788638 | 0.000556117 |
| | TATTCTAAGGTGACTATG | | | |
| | CCAGCCAACCTGGG | | | |
| 647 | GCAGAAGTGGCTGCTAG | P | 0.019876771 | 0.023622651 |
| | ATCTCTCTCCTTTACCAC | | | |
| | CATGCAGGAACAGAC | | | |
| 648 | GAGGAAGCCAGGACACG | N | 0.043002325 | 0.002980164 |
| | GAAGTGAGAGACACTAAA | | | |
| | GAAGGTGTGGGCCAG | | | |
| 649 | TTCATCAGCCCGCCAAGA | P | 0.033189724 | 0.018430306 |
| | TGGCGATGCAAGCGGCC | | | |
| | AAGAGGGCGAACATT | | | |
| 650 | CATCGTCTATGCTTCCCT | N | 0.007159022 | 0.003174055 |
| | TGCCCTCTCCAGCTCCAC | | | |
| | CTCACCCAGAGCAC | | | |
| 651 | GTGAACACAGGCATGGC | P | 0.040192458 | 0.006633996 |
| | GGCAGAAGTGCCAAAAG | | | |
| | TGAGCCCTCTCCAGCA | | | |
| 652 | CCTCTTGTCAGAGATCCT | N | 0.007334167 | 0.005849462 |
| | CTACCACAGACATTAATA | | | |
| | GCTGAGCAGGAGCC | | | |
| 653 | GTCACCCTGTTGCCTATG | N | 0.018396204 | 0.028552569 |
| | GGAGGAGGTGGAAGGAT | | | |
| | TTGGCAAGCTCAACC | | | |
| 654 | CCTGAGACTGGCAAGGG | N | 0.049033322 | 0.000573786 |
| | AGGAGGCTGAGCAGAAG | | | |
| | GAGTCATCATGGAGGA | | | |
| 655 | TGATCAGCTCTGAGGTGC | N | 0.036101964 | 0.002977882 |
| | AACTTCTTCACATACTGT | | | |
| | ACATACCTGTGACC | | | |
| 656 | GTCCAAGCTGTGCCTCG | P | 0.013805766 | 0.039331078 |
| | ACACATCCTCATCCCCAG | | | |
| | CATGGGACACCTCAA | | | |
| 657 | CCACCATGACCCTCTTCC | N | 0.026316937 | 0.000370002 |
| | TCATGCTGAACTGCATTC | | | |
| | CTTCCCCAATCACC | | | |
| 658 | GCCCTCCTGCATTGCTGC | N | 0.031465018 | 0.035461566 |
| | TGCGTGGGTATTTGTCTC | | | |
| | CTTAGCCATCAGGT | | | |
| 659 | TCTCCGCTCTGACTTGTG | P | 0.035874589 | 0.007190978 |
| | GCTCAGGACTACTTTCTG | | | |
| | GGTCGTGCTCCTGC | | | |
| 660 | GCAGGGGCTTAAATTCAC | P | 0.014094762 | 0.000684551 |
| | TGGAATCCACCCTGACTT | | | |
| | TTCCTGCCAGTACT | | | |
| 661 | AAACAACCCTGAGCCCA | P | 0.026292222 | 0.005231064 |
| | GGGCCAACCCCTACGGA | | | |
| | ACACCACTACTTTACC | | | |
| 662 | GCTTTCATGTCCCAGAAC | N | 0.001915146 | 0.007299795 |
| | TTAGCCTTTACCTGTGAA | | | |
| | GTGTTACTACAGCC | | | |
| 663 | CCGTGAGCAAAGATACTT | N | 0.024730379 | 0.03395056 |
| | CTTGGAATGGCTGCAGT | | | |
| | GAGGCCGTGTCATTG | | | |
| 664 | ATATGTGGTCCTCGTTCA | N | 0.033162464 | 0.017629 |
| | TCGTGCCGCCTGTGGTG | | | |
| | ATGCGTGCAGTGACG | | | |
| 665 | CCCAGGGCAGGTTTGCT | P | 0.025468392 | 0.021295769 |
| | TGACCTCTGCCTCAGTTC | | | |
| | TCGACTCTAAAGGAC | | | |
| 666 | CAGAGTTGAAAGCCACA | N | 0.037458876 | 0.007652731 |
| | GAGTTGAAAGCCACAGA | | | |
| | GTTAAGTGACCTCAGG | | | |
| 667 | CAGTACACATCCTATGCC | N | 0.004984238 | 0.011955861 |
| | ATAAGTGGTCCCACAGTA | | | |
| | CAAGGTGGCCTCCC | | | |
| 668 | CCTCTGAGTCATTGTGAG | P | 0.02879657 | 0.016233118 |
| | CTGTGTGGTAGGTTGGA | | | |
| | CATTGGCATAGTTGG | | | |
| 669 | GCCATACCTGGTGTCCAA | N | 0.033848292 | 0.030034111 |
| | AGAACTCATGAGCCTTGT | | | |
| | GTCTGGGCTGCTGC | | | |
| 670 | AGTGCCATTCACCACTGC | P | 0.034730466 | 0.00680122 |
| | GTCCTGGGCTTTACGAGA | | | |
| | CCATGCAAGACGGG | | | |
| 671 | CTGCCAGGATGGACTCG | P | 0.048331808 | 0.04348284 |
| | CTGCTCATTGCAGGCCA | | | |
| | GATAAACACTTACTGC | | | |
| 672 | ATCACCCGGACACACATC | N | 0.024107496 | 0.023689683 |
| | ATGCTTAAGATTCAACTG | | | |
| | GGAGCATACCAGGG | | | |
| 673 | GAAGACAGAAGAGTTCTT | N | 0.007514321 | 0.000131333 |
| | CTCTGTGGTGACTACAGA | | | |
| | CTAGAGGAATGCTC | | | |
| 674 | GAGCCAGATCCGCAGTG | N | 0.046493762 | 0.018187287 |
| | GTGGAGAGTTCTAATGTT | | | |
| | GACTGTTTGCAGGCC | | | |
| 675 | AAAGTCACTGAGGAAGAA | N | 0.02027623 | 0.004621778 |
| | AATAAGGGTTCAGGTACA | | | |
| | GGTGCAGCCGGTGC | | | |
| 676 | GTCACTGTGCCACTTGGA | P | 0.023850554 | 0.000597694 |
| | CAGGGCGTTTTCTCTGAA | | | |
| | TTGAAGGGAAAGCC | | | |
| 677 | TGCCTTCAGCCATTGAGT | N | 0.00714724 | 0.012463499 |
| | GGAAGCTGCCCCAGGCC | | | |
| | CTTACCAGGTGCAGA | | | |
| 678 | ACTTCTACTTGCCAACAT | P | 0.039625143 | 0.01205671 |
| | CTGCCTTGCTGGACTTGT | | | |
| | ATGGGATTGTCTCC | | | |
| 679 | GCTATGAGTTTGTGCCTT | N | 0.010550497 | 0.025286942 |
| | TGCTGAGGACACTAGAAC | | | |
| | CTGGCTTGCCTCCC | | | |
| 680 | TGAAGAAGTGCATCAGGT | P | 0.04541531 | 0.00171692 |
| | GCCAGGTGGTCGTCAGC | | | |
| | AAGAAACTGCGCCCA | | | |
| 681 | TGGGGGAGGAGACCCTT | P | 0.041700662 | 0.006501658 |
| | GGAAAAGTCCTCTCTTCC | | | |
| | CAGCTCCTGATTCTG | | | |
| 682 | GAGCTTGCCAGTGGTGA | N | 0.017926633 | 0.003860015 |
| | CTGCCAGGAACGTCCTAT | | | |
| | GATCCACTTTGTTGG | | | |
| 683 | GTCTGCATTTTGGAGAGT | N | 0.038703549 | 0.021196778 |
| | CCACACCACGGACCAGG | | | |
| | TTTTCCCCCAAGGCT | | | |
| 684 | GTCACATTGTCAGAACAG | P | 0.017221878 | 0.021757129 |
| | GTGGCTGCTGTGTGGTG | | | |
| | CCATCGAGTCCCTGC | | | |
| 685 | GTCACCTCTGAGGTGCCT | P | 0.018234848 | 0.018727928 |
| | GCTGGCATCCTCTCCCC | | | |
| | CATGCTTACTAATAC | | | |
| 686 | TGCACTGACTGGGCCAC | N | 0.035001782 | 0.005222941 |
| | ATCTTGAAAACTCGTGGA | | | |
| | AAGGGAAAGGGGAGG | | | |
| 687 | TCGGGGTCAGTTAAGCCT | N | 0.049510203 | 0.011185124 |
| | CAGTATTCTTAGCTTTTGT | | | |
| | TGATTTTGGCACT | | | |
| 688 | CAGGTGGCTCAGTTCCT | N | 0.044438194 | 0.008047993 |
| | GAAGGCGGCTGAGGACT | | | |
| | ATGGGGTCATCAAGAC | | | |
| 689 | TTTCTATTGGTCCTGGGT | N | 0.026599568 | 0.000220576 |
| | ACCGAGCATGGGCGCTG | | | |
| | CGTCAGTGCGCGCTG | | | |
| 690 | GTCCTCTCCATCATCCTC | N | 0.001283646 | 0.003138194 |
| | AGTGTGAGTCCTCAGAG | | | |
| | CCTCCATCTGCCAAG | | | |
| 691 | GGGGAAGGATAGGGTGA | N | 0.00664446 | 0.00391409 |
| | TGTTCCGAAGGTGAGGA | | | |
| | GCTTGAAACCCGTGGC | | | |
| 692 | AACTCTACAGATGGCATA | N | 0.011045234 | 0.003419594 |
| | CCTGTGCCTGCTTCTGG | | | |
| | GGTTGGAAGTGTGAC | | | |
| 693 | GACGAGCCCAGCTGCTA | P | 0.022483531 | 0.005532782 |
| | GATATCAATGGGAAGCTG | | | |
| | CGGGAGATGCTGAAG | | | |
| 694 | CGTACACACATAAACACA | N | 0.01777347 | 0.022420049 |
| | CCCACCAGTGCAGCCTG | | | |
| | AAGTAACTCCCACAG | | | |
| 695 | GCCTTACTCTGGAAGCG | P | 0.035452489 | 0.001688661 |
| | GCGAGCCGAGGCAGCCC | | | |
| | TTGATGCCCTTGACAA | | | |
| 696 | TGGACCCTTCCTATTGGT | N | 0.034302376 | 0.000905278 |
| | CTGTCCTGGGCCAACTG | | | |
| | GTGGGTGATCTCTGC | | | |
| 697 | CTGAGCCTGGGTGCTCA | N | 0.004168755 | 0.006982257 |
| | CTGTGGCGGTCCCCGTC | | | |
| | CTGGCTATGAAACCTT | | | |
| 698 | GGCTGAGGTGTTTTGAG | N | 0.020654317 | 0.003198734 |
| | GTGCATCGAAGTGTTCCA | | | |
| | AGCTGTGACTTACCT | | | |
| 699 | GGATTCCTGAGTTACTGT | N | 0.02072767 | 0.004364026 |
| | TTTGTTCCTCCCCACTGC | | | |
| | TTCCCATTCCTGAG | | | |
| 700 | CGTATAAAACTAAGCTGT | N | 0.029692664 | 0.001704682 |
| | GCCCCAACCACGCTGAC | | | |
| | CATGTCATCAGGACC | | | |
| 701 | AGGGTCACCACTGCCAG | P | 0.014082881 | 0.004438034 |
| | CCTCAGGCAACATAGAGA | | | |
| | GCCTCCTGTTCTTTC | | | |
| 702 | GTTCAGATGACAGCGAC | N | 0.016728142 | 0.004693716 |
| | CGCCTTTTCATTCCCCCC | | | |
| | GCCACCTGTACTCAC | | | |
| 703 | GCATTTCAGATGCTGTTG | P | 0.009719871 | 0.00526514 |
| | GACTTCATGTCCCCAACC | | | |
| | TAGCTTGGTGAGGG | | | |
| 704 | TCAGGCTCATTTGTACTC | N | 0.034663126 | 0.025017401 |
| | TCTTCCCCTCTCATCGTC | | | |
| | ATGGTCAGGCTCTG | | | |
| 705 | TTCAGTACTGTATATTTCA | N | 0.015558832 | 0.007106174 |
| | CCCTGTGTAATGGGGCC | | | |
| | CCCTCTCCTTTCTC | | | |
| 706 | GGTGCAACTTTGAGTCCT | P | 0.042286127 | 0.043739041 |
| | TGGCTTGACTATACAGGC | | | |
| | CTTGAACTTCATGG | | | |
| 707 | TCTGAATTTCCACTGCTT | N | 0.025554074 | 0.007973937 |
| | TGGAGAGTCCCACCCAC | | | |
| | TAAGCACTGTGCATG | | | |
| 708 | GGCCACCATCACAATACT | P | 0.048200787 | 0.025584934 |
| | AAGGGGCTCAGATGTGT | | | |
| | CTTGTGCCCACCTCT | | | |
| 709 | GGAGAACGTGCCCTATTC | N | 0.005323906 | 0.00886515 |
| | ACACTCTGGGAAGACGC | | | |
| | TAATCTGTGACATCT | | | |
| 710 | GCACGTGACACAAGCTG | N | 0.037138581 | 0.011351082 |
| | ACCTCAAGAGCTCCACGT | | | |
| | TTTGGCTTCGAGCAA | | | |
| 711 | TCGACTTCTGCGATCCCC | N | 0.027230804 | 0.016978713 |
| | TGGAAAACCAACCACTCC | | | |
| | CCCTGGGACGGTAA | | | |
| 712 | GTGTGATCTGGTCACTAT | N | 0.032492029 | 0.021879388 |
| | GTGACTGCCTTTACGGTT | | | |
| | TCTCTCCATGTGCT | | | |
| 713 | ATGCGGGTAGTATTAGCC | N | 0.001306922 | 0.00026264 |
| | ACCCCCCTCCATCTGTTC | | | |
| | CCAGCACCGGAGAA | | | |
| 714 | GCCTGGGTTCAAATCTGC | P | 0.035505176 | 0.012950353 |
| | ATCTGCCATGCACTTGTT | | | |
| | TCTGACCTTAGGCC | | | |
| 715 | GACCAACAGCAGAGATAT | P | 0.04288474 | 0.035207827 |
| | GCCTTTCTCATTCTTGGC | | | |
| | TACAGCAGTGGGAC | | | |
| 716 | CTTCCCCCTCACCCCCCA | N | 0.034683728 | 0.013940908 |
| | CTCTTAGGTATGTATGAT | | | |
| | GCTAATCTTGTCCC | | | |
| 717 | TGGCTGCCCTGATTCCAA | N | 0.031621213 | 0.01701817 |
| | GTGCTCTTATCGCCTCTG | | | |
| | TGTGTGGATCGCCC | | | |
| 718 | GAAAAGCTGTGTCGTGTT | P | 0.03683236 | 0.022216857 |
| | CCCTGTGAAACTGAGCA | | | |
| | GGTGTGTGTTGGCGC | | | |
| 719 | GATGAAAATGGCAAGTTC | P | 0.015751246 | 0.020770691 |
| | CCTGGCTTTCCTTCTGCT | | | |
| | CAACTTTCATGTCT | | | |
| 720 | AGGCAGAGGTTGCAGTG | P | 0.046732112 | 0.03925511 |
| | AGTCGAGATGGTGCCATT | | | |
| | GCTCTCGTTTGGGCA | | | |
| 721 | TCTTCTAGGTGATGAGTT | N | 0.034602071 | 0.00675393 |
| | TCTACTTCCTCTGGTTTTT | | | |
| | ACAACAGGAAATG | | | |
| 722 | GCTCACATGTTTACACAC | P | 0.041850185 | 0.031515402 |
| | TCAGTGCCCTAATTTCCC | | | |
| | CTGAGGGAATCGCT | | | |
| 723 | GCTGACCCAGCATCAGC | P | 0.008671832 | 0.03263513 |
| | CACACTCTGGGTTGGAAA | | | |
| | ATGTTTGCCTGTTGG | | | |
| 724 | TTACCCTGCCTGAGATTC | P | 0.047454629 | 0.001118826 |
| | CTCAGGAGAAAAGGCAA | | | |
| | CCTGCCTCCAGCCTG | | | |
| 725 | TACACGCTCACCGGCTAC | P | 0.010419999 | 0.000379399 |
| | CAGATCGACATCACCACG | | | |
| | GAGAACCAGTACCG | | | |
| 726 | CCCAGAGTCAGAGGACG | P | 0.024689974 | 0.030980339 |
| | AAGAGGAGGCTTTACCTT | | | |
| | GCACAGACTGGGAGA | | | |
| 727 | GGAAGCCAGGTGCCTTT | N | 0.022061472 | 0.0131397 |
| | AATCCACTGTAACCTCAC | | | |
| | AACTCCAAGTCCACA | | | |
| 728 | GACTGGAAGATGCAGAC | P | 0.023917358 | 0.00661157 |
| | CTTGGTTCCTGTTAGTGG | | | |
| | AAACACTGTAAGGTC | | | |
| 729 | CCTCCTTGCACCGGCCC | N | 0.00220858 | 0.001458275 |
| | TTCCTGGTCTTTGAATAA | | | |
| | AGTCTGAGTGGGCGG | | | |
| 730 | ATCATTTCCCTCTCCTAT | N | 0.005126006 | 0.00141001 |
| | CCAGAGCCCCAGCAG | | | |
| 731 | TAGGAATGAGTTCTTATC | N | 0.034267148 | 0.005906864 |
| | TAGTGTTGCAGGCCAGC | | | |
| | AAATACAGAGGTGGT | | | |
| 732 | GGTTGCACACCGGAGAG | N | 0.012260838 | 0.004125697 |
| | AAACCCTACAAATGTGGA | | | |
| | GAATGTGGCAAAGCC | | | |
| 733 | CTTGATGGGGCCTGGGT | N | 0.049931872 | 4.94551E−06 |
| | TTGTTCCTGGGGCTGGAA | | | |
| | TGCTGGGTATGCTCT | | | |
| 734 | GGTGCGGATAGTCTGAC | P | 0.049144414 | 0.032345664 |
| | TAGTTTAAGGAGACTGGC | | | |
| | CGAAGCTCTGCCCAA | | | |
| 735 | GGCCACGGCGCTTGGAA | P | 0.019159719 | 0.007783775 |
| | TCCTGGTTGTTGCTGGAT | | | |
| | GCTCTTTTGCGATTA | | | |
| 736 | CGATGGGAGGTATGTGTT | P | 0.022168071 | 0.012220665 |
| | CCCAGAACAGCCAGGAC | | | |
| | AAGAAGGTCGGTTAG | | | |
| 737 | CTGGAGAAAGTTTGCAAC | P | 0.032361446 | 0.025732387 |
| | CCCATCATCACCAAGCTG | | | |
| | TACCAGAGTGCAGG | | | |
| 738 | AGGCTCCTGTTGCTCCTT | P | 0.027511801 | 0.00431974 |
| | CACACAGACCTGGATGC | | | |
| | CCCAGAGCAAGGTCT | | | |
| 739 | CAGAACACATAGAGCTGT | P | 0.0258469 | 0.024225355 |
| | GAATGAAGATCCAGCCG | | | |
| | GCCTTGGGAGCCTGG | | | |
| 740 | CAGAGACAGCGGCTTGC | N | 0.012695134 | 0.02339725 |
| | AGTTTCCTCAAGAGGAGA | | | |
| | GAACTTAGTCCACCA | | | |
| 741 | AGGGACCAATCTGGGGC | N | 0.025320816 | 0.008456866 |
| | TGGAAATGTTAGGAGGTT | | | |
| | GCCTTGGTGCTGCCC | | | |
| 742 | AGCAATCACAAAGCCAGA | P | 0.04069892 | 0.007912336 |
| | GAAGCTGTAAGCTGCCT | | | |
| | GCCGGGCCTGAGGAG | | | |
| 743 | GGGGGGCCAGTAGTTCA | N | 0.043198983 | 0.00203468 |
| | GTGAGAATGTTTATGTTT | | | |
| | ACAACTAGCCTTCCC | | | |
| 744 | CAGTCAGCTTCAGGGCA | N | 0.039853223 | 0.006993295 |
| | GCTTCCTGCCACAGCAG | | | |
| | CATTAAATGAAGTTGG | | | |
| 745 | AGTGTTGGCAAACGAGA | N | 0.049866306 | 0.026487457 |
| | CTTTCTCCTGGCCCCTGC | | | |
| | CTGCTGGAGATCAGC | | | |
| 746 | CCGCTGAAGCTGTAGGA | N | 0.011533719 | 0.016868601 |
| | AGCGCCATTCTTCCCTGT | | | |
| | ATCTAACTGGGGCTG | | | |
| 747 | ATCCTGATGGCAAGAGCT | P | 0.031292682 | 0.000665341 |
| | ACAGCAGCGGCGGCGAA | | | |
| | GATGGTTACGTCCGT | | | |
| 748 | GTGCTCTGAGTTTCGGGT | P | 0.044136757 | 0.020429722 |
| | TCTGCTCCTACAAAGAAC | | | |
| | GTGCGGTGCTGCGG | | | |
| 749 | GGGCTAATTCTGGGAAG | N | 0.015832624 | 0.00036558 |
| | GGAGAGTTCTTTGCTGCC | | | |
| | CCTGTCTGGAAGACG | | | |
| 750 | AATATGACTATTCTAAAG | N | 0.028254109 | 0.004164029 |
| | GCTGTGAGGCCATGGGG | | | |
| | TATTGGTTAAGTTGC | | | |
| 751 | GCCTTTTTCTTCTTGAGC | N | 0.049026226 | 0.002235333 |
| | GAAGCTGTTTGAGTAAAC | | | |
| | CTGTTGAAGAGTGT | | | |
| 752 | CGGGAGGCACGGCCGA | N | 0.040972485 | 0.020278071 |
| | GATGTACACGAAGACAG | | | |
| | GAGTCAATGGAGATTCT | | | |
| 753 | GCCATGTAAGGGAGCCA | P | 0.003691716 | 0.000462364 |
| | TCTTGGAAGCAGATCCTC | | | |
| | CAGCCTCCAGTCAAG | | | |
| 754 | AGCGTTTGGTGTTACCTT | P | 0.012669954 | 0.002008159 |
| | CTCCTGGGAGGTCCTGC | | | |
| | TGCAACTCAAGTTCC | | | |
| 755 | ACAATTGCCTGGAGGCTT | P | 0.04641729 | 0.023132206 |
| | CTGTGAGATCGGGAGAG | | | |
| | GGAGGAGAGGCAGTC | | | |
| 756 | GGAGCAAGTGTTCCTGCT | P | 0.006016724 | 0.00197791 |
| | GCCAGTTCTTTCCTCTTT | | | |
| | AGGCGTGGTTGAGA | | | |
| 757 | GTAAGGTTGTCTACTCAG | N | 0.018715249 | 0.02146388 |
| | GAGGCTAAGGTGGGAGG | | | |
| | ATCACTTGAATGCCA | | | |
| 758 | GCACTCTGATTTTCTGTA | N | 0.038454737 | 0.011431254 |
| | GGTACAGTTCAAAGCCCT | | | |
| | AAAGGGAGTCTGGC | | | |
| 759 | ATCCAAAGGCCTGGAACA | N | 0.010171621 | 0.012384035 |
| | CAATGGTACTCAAAAACA | | | |
| | TAGCTGCCTCGGGG | | | |
| 760 | AGTCCCTGCCTCTCCTGC | P | 0.048684571 | 0.014032325 |
| | CTCCTCCAGTGGGGCAG | | | |
| | ACCAGAGACTCCCAT | | | |
| 761 | GTCCCTAGACCACTTTGT | P | 0.026735181 | 0.007043026 |
| | ATGACCGTTTGCAGTCTG | | | |
| | AGCAGGCCAGGGGC | | | |
| 762 | CTTGCGCAGGTGCGAGT | N | 0.031444328 | 0.022456957 |
| | GGCCAGCAGAGGTCACG | | | |
| | AATAAACTGCATCTCT | | | |
| 763 | GGAGTATGTCACCTTCCT | N | 0.013375119 | 0.01814678 |
| | GGGGGCCTTGGCTTTGA | | | |
| | TCTACAATGAAGCCC | | | |
| 764 | ATGGCCACAACATTGCCA | N | 0.040280123 | 0.03959956 |
| | GCAAATACTGCCTTGGCA | | | |
| | TCACTCAGCAGAGG | | | |
| 765 | GCCTATGATCACCTTGCA | N | 0.04484767 | 0.029280309 |
| | TGGACAGCAATCCTGTAA | | | |
| | ACATCACAGAGTGG | | | |
| 766 | GTGGCTTCTCTGTGAATT | P | 0.020299449 | 0.010809418 |
| | GCCTGTAACACATAGTGG | | | |
| | CTTCTCCGCCCTTG | | | |
| 767 | TGGAGTCTAAACGGGGC | P | 0.020393121 | 0.024710439 |
| | AGGATCTGTGCCAAAAGA | | | |
| | GCCTCTCTCCGGAGT | | | |
| 768 | GGTGCAGCTCAGTGGAA | N | 0.023709653 | 0.005153136 |
| | GATGATGACAACCAGAAG | | | |
| | ACATGAGCTAAGGGT | | | |
| 769 | TAGTGGGTTTGCTTGAGG | P | 0.009503835 | 0.008459012 |
| | TGGTAAGGCTTTGCTGGA | | | |
| | CCCTGTTGCAGGCA | | | |
| 770 | TGCCGCTTTGGACACCAA | N | 0.012436491 | 0.009907799 |
| | CACTCCCTTCTCCCAGGG | | | |
| | TCATGCAGGGATCT | | | |
| 771 | GAGAGGCCCAAGGTGGC | N | 0.024561726 | 0.003739645 |
| | CTCGCCAGCCCTGCAGT | | | |
| | ATTGATGTGCAGTATT | | | |
| 772 | TGCCCTGAGGACCAGTG | P | 0.035220257 | 0.000303077 |
| | AAAGACAGATCATAGGAG | | | |
| | AGACCCTTTTGCTGC | | | |
| 773 | GGGCCAGCAAAGAGGAG | N | 0.036389942 | 6.61113E−06 |
| | GGGTCCAGAGAACAGCT | | | |
| | GAAATACTGTCACTAG | | | |
| 774 | CTAGAGAAGTAGTGACCA | N | 0.01183771 | 0.008299415 |
| | GAACAGGGCAGAGTAGG | | | |
| | TCCCCTCCATGGCCC | | | |
| 775 | CCTCGTGTTGATTGCAGG | P | 0.02530623 | 0.009529634 |
| | AGGAGTCGGAATTAACCC | | | |
| | TCTGCTTTCCATCC | | | |
| 776 | GGAGTACGATGTGTAAGT | P | 0.032334457 | 0.012561906 |
| | GCCCATTGGGTGGCCTG | | | |
| | TTGGTCACTGTGCAG | | | |
| 777 | GTGCTCACCACCCCCAT | N | 0.039108375 | 0.044621227 |
| | GCACACGCCATCTGTGTA | | | |
| | ACTTCAGGATCTGTT | | | |
| 778 | TCACCGCTGTTGCCTGCC | N | 0.042460173 | 0.047567269 |
| | GCCTTGCGCAGTTGACTC | | | |
| | GTGTCTGAGGAAAC | | | |
| 779 | GGGAAAGTCTGAGTGAA | N | 0.044086344 | 0.011470692 |
| | AGGATGGCCTCATTCTCT | | | |
| | TTCTAATCTTGCTGG | | | |
| 780 | TCCAGAAACTGGGGATG | P | 0.034848772 | 0.049976851 |
| | GAATCTAGACTTGTGAGC | | | |
| | GGCGGTGGTGCCTGC | | | |
| 781 | CATCTGTGTGGATGTCAA | N | 0.019562795 | 0.016572468 |
| | TGACAACAACCTGGCTTA | | | |
| | CCTGGAGGCCATTC | | | |
| 782 | GACGGGGTTTTCCTTGCT | N | 0.006351665 | 0.018514432 |
| | CCTGCCAGGATTAAAAGT | | | |
| | CCATGAGTTTCTTG | | | |
| 783 | GTCATGGCCGCCTGCCT | N | 0.003787171 | 0.007482726 |
| | GTCATTCCTGACTCACCA | | | |
| | CCGTCCCCAGGTGAA | | | |
| 784 | CTGCAGCCTTTGTTACTT | P | 0.012140736 | 0.001747504 |
| | GCCCCAACGAGAAGGTC | | | |
| | GCCAAGGAGATCGCC | | | |
| 785 | GAGTGTTGCTGCTGAAG | P | 0.040163532 | 0.012613141 |
| | CACATCCTTGCAATGTGG | | | |
| | GAGTGCACAGGAGTC | | | |
| 786 | GCAAAAGCCCAAAGGTTC | N | 0.028081951 | 0.024643045 |
| | CTAAGCCTGGCTGCAAA | | | |
| | GAAGAATCAACAGGG | | | |
| 787 | GTTCTTTTGGGTCAAAGG | N | 0.010530532 | 0.003906186 |
| | AGCAGGCTAATGCAAAG | | | |
| | CTTTTGGAGACTGCT | | | |
| 788 | GGTTCCCTTCCTATTCCA | N | 0.027449757 | 0.038576162 |
| | AGCTTCCATAGCTGCTGC | | | |
| | CCTAGTTTTCTTTC | | | |
| 789 | CACGGAAAGTGCCTGCA | N | 0.013197407 | 0.015287943 |
| | AAAACAGAGGTGGATAC | | | |
| | GAGGACAGGTTGGAGC | | | |
| 790 | GCCCCACGGAACACTATT | N | 0.024911614 | 0.009952658 |
| | CCTATAAGATAGCTGAAA | | | |
| | GAAGCTGCTGTGAG | | | |
| 791 | AGGGAGGCAGCAGACTC | P | 0.013989999 | 0.026934677 |
| | AGGCCCTCCATGGTCCT | | | |
| | CTTTGTCATTTTGTTG | | | |
| 792 | CTTGGGGTTGGGGTAGG | N | 0.042843205 | 0.00245116 |
| | TAGATACCAAATGAAACA | | | |
| | CTTTCAGGACCTTCC | | | |
| 793 | CCATTTCCTGTGCCAGAA | N | 0.043176536 | 0.01756898 |
| | TCACTGCTCTATTCCATA | | | |
| | CCGTGCCATGGAGG | | | |
| 794 | AAAAGAGCTGCTGTTCCT | P | 0.017443962 | 0.002877675 |
| | AAGTAACGCGAACCCCTC | | | |
| | GCTGCTGGAGCGGC | | | |
| 795 | CCGCAACCACCTGCAAA | N | 0.025690215 | 0.003268216 |
| | CCAGAACGACTCTAGAAT | | | |
| | TTCCTTCCCCGCCCC | | | |
| 796 | CTGGGGACGAGACAGGT | N | 0.047850661 | 0.000918596 |
| | GCTAAAGTTGAACGAGCT | | | |
| | GATGGATATGAACCA | | | |
| 797 | TCCTCGGTTTCCTTGCCT | P | 0.025086836 | 0.014097738 |
| | CACCCGCGGAGAGCGCT | | | |
| | GAACCTGGACAAGCA | | | |
| 798 | CAGGCTACTTTCCGTCCA | N | 0.001323442 | 0.003324442 |
| | TGTACCTGCAAAAGTCGG | | | |
| | GGCAAGACGTGTCC | | | |
| 799 | AGTGCTGTCCCTGAAGCA | P | 0.034012703 | 0.003756254 |
| | GCTTCTGTTTCCGGCGGA | | | |
| | GGAAGACAATGGGG | | | |
| 800 | CCTGCTCTCCACAACTGT | N | 0.016670439 | 0.019570671 |
| | CCCTCCTTACCCCATGTA | | | |
| | GCTCGATCCGAAGC | | | |
| 801 | GATTGCAGGGTCCGCCT | P | 0.035011254 | 0.022838961 |
| | TCTCAAACCCCACTTCCT | | | |
| | GGACCACATCATCCA | | | |
| 802 | CCAACAAAGATGAAGTTC | N | 0.011304826 | 0.003680198 |
| | CCTATCTACGGAAAGGCA | | | |
| | TGACTGGGAGGCCC | | | |
| 803 | CAGCAGTACCTCTTTGAC | P | 0.014149474 | 0.016795126 |
| | CGCCTTGCCCACGAGATT | | | |
| | GAAGCACTGAAGTC | | | |
| 804 | GTATTTAGTGGGGAATGG | N | 0.034151123 | 0.01121221 |
| | AAAGAGTTGCCCTTGTTG | | | |
| | CAAGTAATGAAGCC | | | |
| 805 | GGCAGTTGTGCCAAGGG | N | 0.03880811 | 0.007638642 |
| | AGGAGGGAGGAGGTAAA | | | |
| | AGGCAGGGAGTTAATA | | | |
| 806 | CCAGCTAATTGGAAGGGT | N | 0.039815243 | 0.001162328 |
| | GAGGCGGGAGGATCGCT | | | |
| | TGAACCTGGGAGGCG | | | |
| 807 | GGCCCTGAAGAGGAGGG | N | 0.022026664 | 0.001204616 |
| | AGACTCTGCTGCTATAAC | | | |
| | TGAGGATGAGGCCGT | | | |
| 808 | AACTAGGATAACTTGTTG | N | 0.042843773 | 0.03912133 |
| | CTTTGTTACCCAGCCTAA | | | |
| | TTGAAGAGTGGCAG | | | |
| 809 | CCCACGACTCAGCAATAC | N | 0.032829614 | 0.035198951 |
| | CCGCCCCACCGGCTGTG | | | |
| | ATGCTCCAATAAACT | | | |
| 810 | GCCCAGCAGGCAGTCAA | N | 0.005265154 | 0.001483816 |
| | GAGAACAGCACATTAGTT | | | |
| | CCAGAAGAAAGATGG | | | |
| 811 | GAAGTCTATGATGTAAAC | N | 0.008167908 | 0.00995517 |
| | ACTTTGCCTCCTGTGTAC | | | |
| | TGTGTCATAAACGG | | | |
| 812 | GGAGGCTGAGGCGGGG | N | 0.038099237 | 0.014716403 |
| | AGATCACAAGGTCAGGA | | | |
| | GATCGAGACCAGCCTGA | | | |
| 813 | GGACCCCTGGATCCTTG | N | 0.026418502 | 0.02653536 |
| | CCATTCCCCTCAGCTAAT | | | |
| | GACGGAGTGCTCCTT | | | |
| 814 | CAGGGACAGATCTGATG | N | 0.010210457 | 0.014152462 |
| | ATCCCAGGAGGCTCTGG | | | |
| | AGGACAATCTAGGACC | | | |
| 815 | CCTGGCTCTGTCACCGC | P | 0.045672709 | 0.037065183 |
| | CATGCAACTCCATGCCTA | | | |
| | TTTACTGGAAACCTG | | | |
| 816 | GGATTGCGGATATTTACC | P | 0.009035123 | 0.007263223 |
| | TCTGTCCCCAAACGCTGA | | | |
| | CCACGCCCTGGCTG | | | |
| 817 | GGGTGTAGAGAGAATGG | N | 0.039707073 | 0.000605566 |
| | AGGGGACCAAAAAGAGT | | | |
| | CCTTCCTGGGGTGTGG | | | |
| 818 | ATCTCTGGCTGAGGGAT | P | 0.027889355 | 0.018760835 |
| | GACTTACCTGTTCAGTAC | | | |
| | TCTACAATTCCTCTG | | | |
| 819 | CCCCAGAGGGAGAGTTT | P | 0.034155899 | 0.004658483 |
| | GTGTCCATGGGTGTTATC | | | |
| | TCTGATGGCAACTCC | | | |
| 820 | CAGGGACCATGCTTCATT | P | 0.047737316 | 0.012015057 |
| | CGTGGCTGTGTCCCCAT | | | |
| | CTGAGGGCCTGGTAT | | | |
| 821 | GCTGCGTTACTGTGCTGA | N | 0.041866968 | 0.034034898 |
| | GAGGTACCCAGAAGGTT | | | |
| | CCCATGAAGGGCAGC | | | |
| 822 | CCGTCCTCCTTTCCCTGA | P | 0.029394005 | 0.005213005 |
| | GCACCTTCATCACCAGAG | | | |
| | GCTTGAAGGAACCC | | | |
| 823 | GATATGGTGCCCTGTGTA | N | 0.005289391 | 0.002880231 |
| | TCCCAGAGATGCTAGAAA | | | |
| | ACTGTTCTTTGCTC | | | |
| 824 | GAAGCTGAGGCAGGAGA | N | 0.030017106 | 0.035896652 |
| | ATGGTGTGAACCCAGTGA | | | |
| | GCCGAGATCGTGCCA | | | |
| 825 | TATGACCTTGATGCTTGG | P | 0.03575271 | 0.029689069 |
| | AGCATTCTCATTCGAGAG | | | |
| | GCACAGAATCAACC | | | |
| 826 | TGCTCGAGGCGCATCAG | N | 0.044198265 | 0.012908628 |
| | GCCCGTTTTTTACCAGTT | | | |
| | TATATCACGGTCTTC | | | |
| 827 | AGTCCAAGGAGAAGAAG | N | 0.041310503 | 0.000473461 |
| | AGGCCTAGCCTGAGCCA | | | |
| | AAGAGAGAGTACGGGC | | | |
| 828 | GTGAATGTGCCTGAGGA | P | 0.010916884 | 0.018668589 |
| | GTCTCGGAACGGAGAAA | | | |
| | CCAGTCCCCGAACCAA | | | |
| 829 | CTGCTATTAGAGCCCATC | P | 0.048607138 | 0.012326096 |
| | CTGGAGCCCCACCTCTG | | | |
| | AACCACCTCCTACCA | | | |
| 830 | GGCCAAAGCACATGCAG | N | 0.029137179 | 0.013186845 |
| | GCTCCTGGTTGTTCCTCT | | | |
| | CAAACCTGTGCTGAC | | | |
| 831 | CGGGATTGAGGAAGGTC | N | 0.012386232 | 0.010112348 |
| | CGCACAGCCTGTCTCTG | | | |
| | CTCAGTTGCAATAAAC | | | |
| 832 | CACCCCAGAAGGTTCTCT | N | 0.032636734 | 0.014138626 |
| | TGTATACCTGCTCAGTCA | | | |
| | GTTCCTTTCACTCC | | | |
| 833 | GCTAATGCCCTGGCCCA | N | 0.000590606 | 0.000716289 |
| | CAAGTATCACTAAGCTCG | | | |
| | CTTTCTTGCTGTCCA | | | |
| 834 | CGACTTCAAAGAGGGCTA | P | 0.02917516 | 0.007150569 |
| | CCTGGAGACAGTGGCGG | | | |
| | CTTATTATGAGGAGC | | | |
| 835 | TCCGCAGAGGAACTGAT | N | 0.029974336 | 0.037015486 |
| | GAGTGTGCAATTGAGAG | | | |
| | CATAGCAGTGGCAGCC | | | |
| 836 | GGCCTTTACCGGCATTGA | P | 0.043421923 | 0.025208697 |
| | TGTGGCTCATGTTTCAGG | | | |
| | CAGACTTGGGGTCC | | | |
| 837 | AGTCAGTACCGGAAGAG | N | 0.007172716 | 0.001320173 |
| | CCTGATGTGAGGGCAGG | | | |
| | GTGGGGTCTGGAACTT | | | |
| 838 | AAAGCTGCCTTCCAGGCT | P | 0.028498426 | 0.024230581 |
| | CTTGGACACTGCCTTGG | | | |
| | GAGCATCCTGCAGCT | | | |
| 839 | TGAGCCCAAGGAAGAAT | N | 0.047683302 | 0.000588721 |
| | GAGTCACCCCAGAGCCC | | | |
| | TAGAGGGTCAGATGGG | | | |
| 840 | TGTGTTGAGAGCTTCTCA | N | 0.048572176 | 0.020873162 |
| | GACTATCCACCTTTGGGT | | | |
| | CGCTTTGCTGTTCG | | | |
| 841 | TCACTGCCTTACCTCCCT | P | 0.007905519 | 8.14783E−05 |
| | CACGGTTGTTGTGAGGA | | | |
| | CTGAGTGTGTGGAAG | | | |
| 842 | GTAATCAGCTTGTTGTAG | P | 0.029274115 | 0.031032143 |
| | TGATGCTGGCCAAATGGT | | | |
| | GCTCAGCAGGTGAG | | | |
| 843 | CTTCCATCTGGCTGCACT | N | 0.028841562 | 0.01119674 |
| | CCAAGGCCCCCTCTGTC | | | |
| | CTTTTCAGAACACAT | | | |
| 844 | TCCCTCCCTTACCCCCAT | N | 0.042282802 | 0.011360043 |
| | CCTTAACTTTGTATCCTG | | | |
| | GCTTATAACAGGCC | | | |
| 845 | TGGCCTTTGGGAAAGATC | N | 0.027599427 | 0.011795299 |
| | AGAGAGGCAGAGGTGGC | | | |
| | ACAGGACAGTAAAGG | | | |
| 846 | GATGCCCCTGACATCATC | N | 0.036143648 | 0.045925012 |
| | ATTCTTGTGGGAGACAGC | | | |
| | AGCCTGTATGTGGT | | | |
| 847 | CAATGAGAAGCCACAGG | P | 0.003955926 | 0.00043235 |
| | TGATCGCGGACTATGAGA | | | |
| | GCGGACGGGCCATAC | | | |
| 848 | CCCTTGGCCTGCCACTTT | P | 0.024191337 | 0.012090949 |
| | CCAGGTGTCCTTTATCAC | | | |
| | TTTGACGGGACTCT | | | |
| 849 | ACCAAGATCGCGGCGCT | N | 0.023301321 | 0.008267617 |
| | GCACTCTAGCCTGGGTG | | | |
| | ACAGAGTCAGACTCCG | | | |
| 850 | AGAGGAGTGGTTTGTGA | N | 0.013545538 | 0.025236758 |
| | CAAGCGGAATCCAAATG | | | |
| | GCATTCGAGTGGCTCC | | | |
| 851 | CCTTCAGGAGACTTGATC | P | 0.02178259 | 0.013947278 |
| | CCAGTAGACTGAGGTCTT | | | |
| | CCCTTTCAGCAGAA | | | |
| 852 | TGCTATGGGGCTTAGGC | N | 0.037494378 | 0.000185732 |
| | CATGCTCAGTGCTGGGG | | | |
| | ACAGGAGTTTTGCCCA | | | |
| 853 | GGTAGAGATGGGCGGGT | N | 0.019826375 | 0.00035875 |
| | TTGTGCTATGTGCAGGGT | | | |
| | GGAAGGGAGGGAAGT | | | |
| 854 | CTCCCCATCCCAACCAGA | P | 0.033817525 | 0.000227676 |
| | GATGGCTCACTTCGGATC | | | |
| | GAGGGTTGACTACA | | | |
| 855 | CGCTCTTTCTAGTGCAAG | N | 0.03397391 | 0.015933777 |
| | AAACTGCAGGCTGGATCA | | | |
| | GTAGTTCAACAGCT | | | |
| 856 | TCTGGGAGCTGGGATGA | N | 0.022801912 | 0.007160103 |
| | TAAAGATGAGGCTTGCG | | | |
| | GCTGTGGCCCGCTGGT | | | |
| 857 | TAGGAGGATCGCTTGAG | P | 0.02266909 | 0.014980681 |
| | CCTGGGTAGAGGCTGCT | | | |
| | GTGAGCTGAAATGGCG | | | |
| 858 | ACTTGAGCAAGACTGATA | N | 0.044949264 | 0.019344398 |
| | CCACCTGCGTGTCCCTTC | | | |
| | CTCCCCGAGTCAGG | | | |
| 859 | AGTCCTGGCCTCCGCAG | N | 0.026590931 | 0.025600931 |
| | ATGCTTCATTTTGACCCT | | | |
| | TGGCTGCAGTGGAAG | | | |
| 860 | GGGAAGTCTGAGCGAGT | P | 0.040004869 | 0.037373453 |
| | CTCCTAAATACTCTGGGC | | | |
| | TTTAGCTTCTCCAGC | | | |
| 861 | CTGGCATGGTTTGCGGA | N | 0.039245771 | 0.00549941 |
| | GGTTAGATTTACTGGAAA | | | |
| | TGTATTCATACTGTG | | | |
| 862 | GCACCGGGTGGCAGATG | N | 0.042456323 | 0.010691492 |
| | TTCTATGCAGTGTGGTTC | | | |
| | AAGTTTCTTTGACCG | | | |
| 863 | AGCAGCGACCGAGACCC | N | 0.00857263 | 0.006048358 |
| | GGTGGGACACTCCCCTT | | | |
| | CTCCCCACTTTCACCT | | | |
| 864 | TCTGATCTTGAGTCTGGA | P | 0.018214521 | 0.002465285 |
| | ACTGACAAGTTGTGTGAC | | | |
| | CCTCAGCAAGTCAC | | | |
| 865 | AGTGCTGCCCTCTGGGG | N | 0.012925546 | 0.005394539 |
| | ACATGCGGAGTGGGGGT | | | |
| | CTTATCCCTGTGCTGA | | | |
| 866 | GGGCCCCTGGGCAGTGG | N | 0.033484652 | 0.010538807 |
| | GTTTTGGGCAAATTCCCT | | | |
| | TTCTTTGCATCCACA | | | |
| 867 | GAAATTCTGCCTGAGGAC | N | 0.04280588 | 0.001361253 |
| | AGCAGCCCAGTGCTTGG | | | |
| | CGAGAGTTCCTGACA | | | |
| 868 | GCGCTGCCTTTCTTCAGC | P | 0.025676175 | 0.00031795 |
| | AACAGACCCTCAAACCAA | | | |
| | GAGGAAGCTAGATG | | | |
| 869 | CCCTGGGGGAGAGACTA | N | 0.041302023 | 0.023645188 |
| | GAAAACACAGAAGGAAG | | | |
| | CAGCACAGGGAGACCC | | | |
| 870 | GGATTTTCACTGTTCTAA | P | 0.020557499 | 0.012563284 |
| | GCTCCCCGTGACCTGTG | | | |
| | GTGAGGCGAAAGGGA | | | |
| 871 | TGTCCTGTGACTGCCCCA | N | 0.014536437 | 0.001596642 |
| | CAGAGATAAGGGGCCAG | | | |
| | GAGGGATTGAAAGGC | | | |
| 872 | TGCTGTAGCGTGGATAG | P | 0.043733371 | 0.000485558 |
| | CTGTGATTGGTGAGTCAA | | | |
| | CCGTCTGTGGCTACC | | | |
| 873 | GTGCAAACAGACATTCCA | N | 0.015987559 | 0.019668438 |
| | GAGAGCCTGATCCACATC | | | |
| | CAGCAGCAGAGCCC | | | |
| 874 | TTCACTGACTGCGGCATG | P | 0.013164047 | 0.005274099 |
| | TCCTCGTGTCTTCTCTGA | | | |
| | TTTTGTGGTACATG | | | |
| 875 | ATGAAGAGGGACAGCGA | P | 0.017327441 | 0.000675956 |
| | TTCCGAGGGTGACTGAG | | | |
| | GCTACAGCTTCTATCA | | | |
| 876 | CCTGTGGTAAGCAACCTG | N | 0.010120249 | 0.030845743 |
| | GGCATCTTAGGAAGCAGT | | | |
| | CCCTGGAGAAGGCA | | | |
| 877 | CATCAGTCCCAACAAGAT | N | 0.024961523 | 0.029863546 |
| | GGCCTAGAAATCGCATTC | | | |
| | TCACCTCGCCTTGC | | | |
| 878 | TCTCTCCAGAGTTGCATG | N | 0.02280555 | 0.012293663 |
| | TAGATAGCATTTATTTCTG | | | |
| | TGCCCTTAAACCC | | | |
| 879 | CCAGCCCAAATGTAGTCT | P | 0.016997695 | 0.004433253 |
| | GCCTTGAAAAGTCTTTCA | | | |
| | GCTGTGACTGCAGG | | | |
| 880 | TAGTATATGCCCTAAAAC | P | 0.008860115 | 0.005066752 |
| | GTCAGGGGCGCACTCTG | | | |
| | TATGGCTTCGGCGGC | | | |
| 881 | CTCACCCCTAGACGTTGC | N | 0.036282748 | 0.003518607 |
| | CAACCAGAACTGACGTGT | | | |
| | GACCTCCTGGGTGT | | | |
| 882 | GTTCGCTCAAAATACTCA | N | 0.01386742 | 2.03851E−05 |
| | ACAGGGGAATAGGCAGC | | | |
| | GGACAGTCAGAATGG | | | |
| 883 | AGAACAGATGGCTGTGAA | N | 0.019638256 | 0.003774624 |
| | AATTACACCCATGCACAG | | | |
| | AACAAGCCACAGGA | | | |
| 884 | CGATGAGAAGGTTTACTA | N | 0.040313587 | 0.038737835 |
| | CACTGCAGGCTACAACA | | | |
| | GTCCTGTCAAATTGC | | | |
| 885 | CACAGTGGAGAAGACCC | N | 0.034984627 | 0.028433625 |
| | TGCATCAGGGAATGTGG | | | |
| | AAATGACTTTGCTGAA | | | |
| 886 | CTCTTTGGCTTAAAATGT | N | 0.019885992 | 0.002207904 |
| | TCAGCAGAATTGGGCAGT | | | |
| | GGGGGTGACTTTTC | | | |
| 887 | CGCTTCGTACCCAGCCA | N | 0.017609595 | 0.016017299 |
| | GCACTATGTGTACATGTT | | | |
| | CCTGGTGAAATGGCA | | | |
| 888 | ACTCTAGGTTTCTACTTG | N | 0.02408877 | 0.003818878 |
| | ATTTTTCCCCCATGTATA | | | |
| | CCTTTCATCTGTTC | | | |
| 889 | GCTATTAATTTCCATCCTT | N | 0.039578239 | 0.048732936 |
| | TAGCAGGCTGGGCCCTA | | | |
| | GGCAGGAAGCTGGC | | | |
| 890 | GGACGAAGAAGATTACG | P | 0.013639774 | 0.002190215 |
| | ACTCCTAGCGCCTTCTGC | | | |
| | CCCCCAGACCATAGC | | | |
| 891 | GGGCCAAGAAAGCAACT | P | 0.04844356 | 0.021975351 |
| | TGAGCCTTGGGCTAATCT | | | |
| | GGCTGAGTAGTCAGT | | | |
| 892 | GCAGAGAGGATTTTCTGT | N | 0.029902089 | 0.001160177 |
| | CATGGAAAAAGCTTGGG | | | |
| | GCATTCGTTTTGCTC | | | |
| 893 | GCTGCTGTAACAGGGAC | N | 0.007616866 | 0.010017932 |
| | TAGCACAGACACACGGAT | | | |
| | GAGTGGGGTCATTTC | | | |
| 894 | CTCACCCAACAGATCTTT | P | 0.025291125 | 0.015883315 |
| | CCAGAGGTCCATGGTGG | | | |
| | AAGACGATAACCCTG | | | |
| 895 | GGTCTGGTAGCCAACAA | N | 0.046730735 | 0.034653685 |
| | CTTGGCAACTTCCACTCC | | | |
| | TTCTCACCTCGTGAG | | | |
| 896 | GAGCATTTTTTCATGTGC | N | 0.018285113 | 0.011366685 |
| | CAGAGCCTGTACTGGAG | | | |
| | GCCCCCATTGTGCAC | | | |
| 897 | ACCAGGTGCAGACACGC | P | 0.002861999 | 0.001024792 |
| | AGTGCTGATGAGCCCAT | | | |
| | GACTACCTTTGTCTTA | | | |
| 898 | TCTGCCAACCCCACCAGT | P | 0.031227636 | 0.033115566 |
| | GATGAAAATTAACTGTGG | | | |
| | GCCACTCGCTGCAG | | | |
| 899 | GTGCTCTTTGTTCATCAT | N | 0.006169618 | 0.007467555 |
| | TGGCCCTCATTCCAAGCA | | | |
| | CTTTACGCTGTCTG | | | |
| 900 | CCTGTGTCTTGTGCCTGG | P | 0.000692635 | 0.003296845 |
| | GAGAGTGGGATGAAACG | | | |
| | CCACAGAGCAGCCTG | | | |
| 901 | CCTCAGCCATGGAGACC | N | 0.032624981 | 0.010520608 |
| | ATGTCATGCAGAATTAAC | | | |
| | AAGGTAGCACCGAGC | | | |
| 902 | GGATCCTTCCTGCAGTG | P | 0.037477009 | 0.008674557 |
| | GCTCGGGTGAGATGGTA | | | |
| | TGCCGAGCAGACAGCT | | | |
| 903 | AGGGCTGCAGGGCCTCC | P | 0.041918417 | 0.028533727 |
| | CACCTTCCAACAGACAGG | | | |
| | CTCTGCTGTATCTGT | | | |
| 904 | TGGGGGATTTTTCAGTGG | N | 0.037770679 | 0.026011238 |
| | AACCCTTGCCCCCAAATG | | | |
| | TCGACCAGCCCCCA | | | |
| 905 | GGTGCAGCTCCTCAGCG | N | 0.006296763 | 0.004801343 |
| | GCTCCAGCTCATATGCTG | | | |
| | ACAGCTCTTCACAGT | | | |
| 906 | GAACTGTCAAGGGAGGT | N | 0.036673266 | 0.017594555 |
| | GCTGGAGAGGGATTAAC | | | |
| | CTGTGCTGCCTGGGAC | | | |
| 907 | GCCCGCACCCACCATGG | P | 0.037946296 | 0.002266569 |
| | CCACAGTTCAGCAGCTG | | | |
| | GAAGGAAGATGGCGCC | | | |
| 908 | ACAGCCCTCAGCGAGAG | P | 0.038720375 | 0.004336818 |
| | TGCCAACCAGGCCTTCCT | | | |
| | GGGCTTCACATACGT | | | |
| 909 | AGGAATTCATCTTCAGTC | N | 0.010753369 | 0.006934658 |
| | TACCAGCCCCCGCTGTG | | | |
| | TCGGATACACACTCG | | | |
| 910 | TCTCTGGAATTGTGGAAG | N | 0.034620304 | 0.017278882 |
| | TGGTTGGAAGAGTAACC | | | |
| | GCCAAGGCCACCATC | | | |
| 911 | CTCCTTTCCCCACAGCAG | N | 0.016336887 | 0.006998385 |
| | CTTTCTTTCCTGTCAACTA | | | |
| | GAAAGGAGCAGGA | | | |
| 912 | AGCTGACCAGATCCCAG | P | 0.003880796 | 0.003404287 |
| | GTGTTCCAGAGCGAGTTC | | | |
| | TTCAGCGGACTCATG | | | |
| 913 | ACGGCGTTCCTGGCTCT | N | 0.005571444 | 0.005861409 |
| | CCTGCCCACAGGATGAA | | | |
| | CATTTTCGGCTTCCTT | | | |
| 914 | TGTGGGTGTAGATGGGG | N | 0.03596499 | 2.79435E−05 |
| | TTCGAGCTTTCCTACAGA | | | |
| | CCTATTCTCAGGAGT | | | |
| 915 | CACGCCTCCGTGGGCTC | N | 0.005382881 | 0.002722711 |
| | CATTCTGTAGCATTGCCA | | | |
| | GCGTTCTCTTCACGT | | | |
| 916 | GACCATCCCAAAAAGGAA | N | 0.011972906 | 0.000135103 |
| | GTGCACCTTGGAGCCTG | | | |
| | TGGAGCTCTCAAGAA | | | |
| 917 | CGGAGAAGACGAGGAAG | P | 0.015850098 | 0.001624045 |
| | AGGAGGAGCAGTTGGTT | | | |
| | CTGGTGGAATTATCAG | | | |
| 918 | TGTGATTCCAGCCACCGC | N | 0.034925394 | 0.045413684 |
| | CTGACCATCCGCCATTCC | | | |
| | GACTGCTAAAAGCG | | | |
| 919 | GTACACGGACTGAATCTG | N | 0.020710609 | 0.020040368 |
| | CACAGAGCAAGATGCTG | | | |
| | AGTGGAGTCGGGGGC | | | |
| 920 | CGCTGTTTCGTCAAAGCA | N | 0.01130778 | 0.00224005 |
| | CGAGGGCCGCCTGTGGC | | | |
| | CTTAATTCCTAACGG | | | |
| 921 | GAATCCTTAGGCGTGGTT | P | 0.019426966 | 0.000212645 |
| | GTGGCCGTCTTGGTCAC | | | |
| | CTGTGTGCCACTTGC | | | |
| 922 | GGGCCGAGACCCAGACG | N | 0.031733655 | 0.011597688 |
| | AGGAGTGAGGAATGAGA | | | |
| | GAGACCAAAGTTCCTG | | | |
| 923 | GAATCGTGATGTCCAATA | P | 0.010891107 | 0.008327588 |
| | CAGAGGCAGAGTCCGGG | | | |
| | TCCAGCTCAAACAGG | | | |
| 924 | CACGGACATGGGGCAAG | N | 0.014365736 | 0.000296075 |
| | CCAGGGCCCAGAGCCTT | | | |
| | TGGCTGTACAGAGACT | | | |
| 925 | GCTGAACAAGGCGGCAT | N | 0.039738483 | 0.020462205 |
| | GCACATGCTACTCCAGAC | | | |
| | GCTGAAGTGGGAAGA | | | |
| 926 | GGGCCATCATCCTCTTCA | N | 0.004941223 | 0.002725446 |
| | TCATCCTCTTCATCCTGC | | | |
| | TGCTGTTCCTGGCC | | | |
| 927 | GACACTTGCACAGCATG | N | 0.012321686 | 0.030362709 |
| | GCTCTGCCTCACAATGAT | | | |
| | GCAGTCAGCCACCTG | | | |
| 928 | ACGCCAGCTGGGCGTCA | N | 0.00747404 | 0.011171192 |
| | GACCCCACCGGGGCAAC | | | |
| | CTTGCAGAGGACGACC | | | |
| 929 | CTGTGCCAGGACTGTGTT | N | 0.013492037 | 0.027035952 |
| | TTTAGCCCTTCACCTCTC | | | |
| | AGCTTTAGCAGGAC | | | |
| 930 | TGGACTGTGCCACACAC | P | 0.043660171 | 0.043426569 |
| | CCAGTGATCCATCCAGAA | | | |
| | ACAAGGACTGCAGCC | | | |
| 931 | TCTCACGCTGATGGCTTG | P | 0.042477216 | 0.004328097 |
| | GCAGAGCACCTTCGGTTA | | | |
| | ACTTGCATCTCCAG | | | |
| 932 | TTGGCTGCCGTCTGGCC | N | 0.031528303 | 0.014147322 |
| | GGGCTCTCATGGTACTTC | | | |
| | CTCTGTGAACTGTGT | | | |
| 933 | GCTGGAGTATATCCTGAC | N | 0.046688854 | 0.005319417 |
| | CCAGACCTACGACATTGA | | | |
| | AGATTTGCAGCCGG | | | |
| 934 | GGTGCTAAGCCCTCTCTC | P | 0.013768335 | 0.000441332 |
| | CACAATGCCAAGACGGA | | | |
| | GACCACAGCCTACAC | | | |
| 935 | GGGCTGCCCCTCCCCCT | P | 0.042018362 | 0.039643108 |
| | GCACAGTAGTTTGTCCTG | | | |
| | TGGTTTATTTTGTAT | | | |
| 936 | CAGTTTTGCCTCCAGTGG | N | 0.041220957 | 0.030446149 |
| | AAGCAGAAAGGGTTTTTT | | | |
| | CAGCTGTTAAATCC | | | |
| 937 | TATACACTTCTGGCTCAC | N | 0.022609471 | 0.010260427 |
| | AGGAAAGTGTCTGCAGTA | | | |
| | GGGGACCCAGAGTC | | | |
| 938 | GCATGCCAAGCAGCATG | P | 0.04194826 | 0.010699579 |
| | CTCAGTGGGGTTTTAGGC | | | |
| | TGTCACATGCAGCTG | | | |
| 939 | GGGCTTAACTTTACCTCC | N | 0.045065213 | 0.002960463 |
| | TTGAAAATGACATGGACT | | | |
| | TGGGTGGATGGTTC | | | |
| 940 | CACTGCATTTGGGCACCA | P | 0.048587397 | 0.045924989 |
| | TCTCAGCTCCCTTGCATC | | | |
| | CAGGTGCAGCATGG | | | |
| 941 | CCTGTGGTAGTGCTCCCA | P | 0.020828888 | 0.00670402 |
| | GTCTGACCTCTGTAGACC | | | |
| | TTCAGTACTCACTC | | | |
| 942 | ACTGTAGAGGAGCCCCT | P | 0.033557961 | 0.03705894 |
| | GGATCTTATCAGGCTCAG | | | |
| | CCTAGATGAGCGAAT | | | |
| 943 | GCTCTTGGAGGAACGAG | N | 0.027462016 | 0.010188812 |
| | CAAAACAGAAGCGGTGC | | | |
| | ATACCTCAGAGCCTGG | | | |
| 944 | TGAAGGATGCCAAGAATG | N | 0.027069273 | 0.008634204 |
| | AGAAAAAGCAAGGGGTTT | | | |
| | GTCCAGGTGGCCCC | | | |
| 945 | GGCCTGGCTTCTGGGCT | N | 0.028348338 | 0.023469084 |
| | GATGGGTCAGTTGGGCC | | | |
| | TTCATAAACACTCACC | | | |
| 946 | GCATGCATGGGAGGAAT | N | 0.026025811 | 0.019766904 |
| | TCATCTTCAGTCTACCAG | | | |
| | CCCCCGCTGTGTCGG | | | |
| 947 | GACTTCTGTTTGATGGCT | N | 0.037119518 | 0.00723518 |
| | TACAGCAACCAGTACTCA | | | |
| | ACAAGCAGCTGACT | | | |
| 948 | AGCTCACATGCAGTAGAC | N | 0.027029627 | 0.000170759 |
| | TTGGGCAGGCAAAGGGG | | | |
| | GCACCAAGGGCACAG | | | |
| 949 | GACTCTGGAGGCGCGAA | N | 0.048065742 | 0.000910947 |
| | TCAATAGAGCCACGAACC | | | |
| | CCCTGAACAAGGAGC | | | |
| 950 | CGGCATCATCCCATCTCT | P | 0.031448195 | 0.000405012 |
| | AATTTCCCCTCTGTCCTC | | | |
| | CATCCAGCGGCTTC | | | |
| 951 | CACTAATGCCAGGCTGAC | P | 0.030641996 | 0.003857552 |
| | GTGTCTTGGAGTGTGGCT | | | |
| | AGACAAAGTGGCAG | | | |
| 952 | GTTTCTCTTTGATGACCA | N | 0.04106078 | 0.043701727 |
| | GGAAGAAATCCCAGCAC | | | |
| | CCCAGCCACAGGCTG | | | |
| 953 | TGCTGAGAACAAACCCAC | N | 0.010110761 | 0.013252603 |
| | CTGAGCACCCCAGACAC | | | |
| | CTTCCTCAACCCAGG | | | |
| 954 | GCACTAGTTAGACTCTTT | N | 0.021722118 | 0.009267607 |
| | AGAATACTCCAAGAGTTA | | | |
| | GGGCAGCAGAGTGG | | | |
| 955 | TTTGCAAAGGGCCAAATT | N | 0.002820511 | 0.001666937 |
| | TCCCCAAACTGAACGGG | | | |
| | CTCAGGAAATGTTCC | | | |
| 956 | TGGGAAAGTGTGAGTTAA | N | 0.026632411 | 0.00172759 |
| | TATTGGACACATTTTATC | | | |
| | CTGATCCACAGTGG | | | |
| 957 | GCGGGAAAATGGGAAGT | P | 0.038032656 | 0.01438077 |
| | CCCTCTGCCTAAAGTACG | | | |
| | TGCCCAGGGAGAAAC | | | |
| 958 | GGAGTTGTTTTCGGCAG | N | 0.006793701 | 0.000320843 |
| | GGGCCTTGTCTCTCACTG | | | |
| | CATTTGGTCAGGGGG | | | |
| 959 | TCTGCTGCTCTGGATGGC | P | 0.029544576 | 0.016662422 |
| | TGAAGGCTCCTGGGCCA | | | |
| | TCTTCATGTGCTGCT | | | |
| 960 | GCTCTGTATTAGAAAGCC | P | 0.011441511 | 0.038042021 |
| | CCTCAGAACTGGGAAGG | | | |
| | CCAGGTAACTCTAGT | | | |
| 961 | CTGCATGCTGGGTTCTGC | N | 0.042641217 | 0.036195401 |
| | ACAGCTGGCCTCCCGCG | | | |
| | TTGGGCAACATTGCT | | | |
| 962 | CTTGAGCCCATTGAAACT | N | 0.028074176 | 0.038617203 |
| | GATCTTGAGCTCCTGGCC | | | |
| | TCCAGAATTGCAGG | | | |
| 963 | CCAGGGCAGCATGTGAT | P | 0.039886125 | 0.024997349 |
| | TCATTTGGGGATGGAAG | | | |
| | GAATCTGTCCCGCATC | | | |
| 964 | CCTGGCAACCAGTGGGA | N | 0.018132036 | 0.00014155 |
| | AAAGAAACATGCGAGGCT | | | |
| | GTAGGAAGAGGGAAG | | | |
| 965 | TTGTGCCACTGCACACTC | P | 0.006183295 | 0.004821666 |
| | CAATCTGGGTGAAAGACC | | | |
| | GAGACTCCGCCTCA | | | |
| 966 | ACTCAAAGCTAAGGAGCA | P | 0.040367681 | 0.015697891 |
| | GTCAGGAACCCAGATAA | | | |
| | GAAAGCCATCCTAGT | | | |
| 967 | AAGCAGGTCAGCAACATC | N | 0.028710755 | 0.001207445 |
| | GGTCGCAAGGACTACCT | | | |
| | GGCCCACAGCTCCAT | | | |
| 968 | CAGTGAGCCGTCATCGC | N | 0.014674459 | 0.004849601 |
| | GCCACTAAGCCAAGATC | | | |
| | GCGCCACTGCACTCCA | | | |
| 969 | TCCAGTGGGCCCTCGGT | P | 0.022442696 | 0.000733978 |
| | GCCTGCTGTGAACTGCTT | | | |
| | TCCCTCGGAATGTTT | | | |
| 970 | CAGTGAAGCTGACAAAAT | P | 0.015762306 | 0.001668159 |
| | CAAAGTGGCCCAGGGAG | | | |
| | TGTCTGGTGCTGTGC | | | |
| 971 | GTTCGTTTCATCAGGCTC | P | 0.031640521 | 0.002964041 |
| | TGTTCCTCAATGGCCTTT | | | |
| | TGCTACGTGCCTCC | | | |
| 972 | CAGGGACCTGAGAGTAA | P | 0.019919102 | 0.007317436 |
| | GCACATGACAGCGTCTG | | | |
| | CTTGCGTTGTGTCTGT | | | |
| 973 | GATGATCCTACTGCTCCC | P | 0.025290991 | 0.006065518 |
| | AGCAACCTCTACATCCAG | | | |
| | GAATGAGTCCCTAG | | | |
| 974 | GATTCTCCCCGGACTCTC | P | 0.043150649 | 0.005204634 |
| | CGTCATGGGCGTGTGCT | | | |
| | TGTTGATTCCAGGAC | | | |
| 975 | CTAATTCAGAGGTCTCAT | P | 0.043645757 | 0.007879374 |
| | GCCTGCCCTTGCCCAGA | | | |
| | TGCCCAGGGTCGTGC | | | |
| 976 | GAAAAGGTGTTTGTGCTC | N | 0.026600349 | 0.000886913 |
| | CGTTTTGTTTCTGCTCAG | | | |
| | TAATATAGTCAAGC | | | |
| 977 | ACGGGTCCAGTGTGTGC | P | 0.030101967 | 0.00543662 |
| | TTGGCGTGTTTTCAGGGA | | | |
| | GGCAGAGAAAGGCTC | | | |
| 978 | TTTAAGGACTGCTGATGC | N | 0.007121695 | 0.002736018 |
| | CCCCTCAGGCCTCCCCC | | | |
| | AAGTTTGCTGGGCTT | | | |
| 979 | CCAGGTACTAGGGAGGC | N | 0.035228862 | 0.006746677 |
| | TTTTGAACCCAGGAGGCA | | | |
| | GAGGTTGCAGCGAGC | | | |
| 980 | CAGTTCCCACAGGGCAT | P | 0.011374124 | 0.026387276 |
| | GTGACTTTGAAAGAGACT | | | |
| | AGAGGCCACACTCAG | | | |
| 981 | GCCCAGGAGACAGACCA | N | 0.032154728 | 0.006946941 |
| | CTTGCCACGCTGTTGTAA | | | |
| | AAACCCAAGTCCCTG | | | |
| 982 | AAGGACGTCACGGGCCC | N | 0.04462393 | 0.015818302 |
| | CTCTAAAGGATTCGTGGT | | | |
| | GCTCATCCCCAAGCT | | | |
| 983 | TGTAGGGTTGAGCCACA | P | 0.041129768 | 0.006420567 |
| | GACAGCTCTTCAGCCCA | | | |
| | GTAGCAGTGGAGCAGG | | | |
| 984 | GCATTGCTGAGAACAAAC | N | 0.024155195 | 0.031464057 |
| | CCACCTGAGCACCCCAG | | | |
| | ACACCTTCCTCAACC | | | |
| 985 | GTAGGGGTTTCCAGCTTC | P | 0.02324507 | 0.006830172 |
| | CCCAGGCTCCGGCCTTG | | | |
| | TCAGTCTCTTTGCAT | | | |
| 986 | GAGGGACGCTATGCCTC | N | 0.016013033 | 0.013273944 |
| | ATGCCCGTTTTGGGTGTC | | | |
| | CTCACCAGCAAGGCT | | | |
| 987 | AGGTGTGATTGCGCCACT | N | 0.035006357 | 0.011413734 |
| | GCATTCCAGCTTGGGCG | | | |
| | ACAGAGCGAGACCCA | | | |
| 988 | CATGCCTCTGTGCCTTCG | N | 0.009855212 | 0.017387359 |
| | CTCATGCTGTTTCTTCCG | | | |
| | ACTGGAATGCCTTC | | | |
| 989 | GATGACACCTTTGAGGCC | P | 0.045584996 | 0.018950627 |
| | CTGTGCATCGAGCCGTTT | | | |
| | TCCAGCCCGCCAGA | | | |
| 990 | CTTGGCCCGAGCCCCTC | N | 0.011899783 | 0.003284773 |
| | CGTGAGGAACACAATCTC | | | |
| | AATCGTTGCTGAATC | | | |
| 991 | TGGGGCAGCAGTTGGGG | N | 0.041027677 | 0.000546288 |
| | AAGTGTCTGCTGAGAATA | | | |
| | TCAAGGGGAAGAAGC | | | |
| 992 | GTGCATCACACTTAACTC | P | 0.032283297 | 0.001907383 |
| | ATCTAACTGCTTCCCCGG | | | |
| | ACACCCTCCACCTC | | | |
| 993 | TCACACTGGCGCTAAGC | P | 0.026547392 | 0.010405859 |
| | CCTACAAGTGTCAGGACT | | | |
| | GTGGAAAAGCCTTCC | | | |
| 994 | ACGGTCAGGGTCTTCTTG | N | 0.00173334 | 0.004520524 |
| | CGACCCGGCCCGCTCCA | | | |
| | GATCCCCACAGCTCT | | | |
| 995 | GCCCTCCCTCAATTCCCC | N | 0.019745264 | 0.048802485 |
| | TGTAACATTCCTGAAGCT | | | |
| | GTTCCCACTCCCAG | | | |
| 996 | GCTCGAGATATGAGTTCT | N | 0.039396138 | 0.042365573 |
| | GCAAAAGGTGGTCCGCA | | | |
| | TCCTTGGCCCTCTGG | | | |
| 997 | AGAAACCTCTGGGAGACT | N | 0.010262207 | 0.000442073 |
| | GGAAACCTGATTGGAGC | | | |
| | ACTGAGGAACAAGGG | | | |
| 998 | TCTCTGCAGCACGATTTC | N | 0.043448304 | 0.003918278 |
| | TCTTTTGATAATGCCCTTT | | | |
| | AGGGCACAACTAG | | | |
| 999 | AATGCTGCAGTTCCTGAT | P | 0.016318933 | 0.00122668 |
| | GAGATCCCCCCTCTCGA | | | |
| | GGGCGATGAGGATGC | | | |
| 1000 | CCTGATGTGGAAAGCAG | N | 0.022532293 | 0.014238884 |
| | GGGTTTCTGGTCTACTGG | | | |
| | CTAGAGCTAAGGAAG | | | |
| 1001 | ATAACTCGTCTGTCCAGG | N | 0.015485874 | 0.006106456 |
| | GTTTTGGTGGCTGGCGA | | | |
| | AGCTGAGGGCGTGTC | | | |
| 1002 | GACCCTGTGGAGAAATTC | N | 0.0492634 | 0.00546858 |
| | GTTGTTCCCACTGAAATG | | | |
| | GACTGACTGTAACG | | | |
| 1003 | CTATCTGGGGGAATAGAA | N | 0.020224544 | 0.000349189 |
| | AGCCCACAGTCTTCTGAG | | | |
| | TTGTGCTACACCAA | | | |
| 1004 | CTTGGTGCTGATGGCCT | N | 0.031848209 | 0.000296378 |
| | GAAGGGGCCTGAGCTGT | | | |
| | GGGCAGATGCAGTTTT | | | |
| 1005 | GTTGTGTCTGGAGAAGAA | N | 0.048323313 | 0.02965325 |
| | GCTGGGTCAGGGGTGTT | | | |
| | TCGCTGAAGTGTGGC | | | |
| 1006 | AGGCAGGCCTCATTTCAT | N | 0.029296873 | 0.045010304 |
| | CACGCAGCATGTGCAGG | | | |
| | CCTGGAAGAGCAAAG | | | |
| 1007 | CCCTGCACCTGGTCCTG | P | 0.002688107 | 0.000250415 |
| | CGCCTGAGGGGTGGCTG | | | |
| | TTAATTCTTCAGTCAT | | | |
| 1008 | TCTGTGCCGCGGAAACC | P | 0.033515535 | 0.007802703 |
| | GATGTGGAAGACCCCGA | | | |
| | GGTGGAGTGTGGCTGA | | | |
| 1009 | GAGTGCCTCCGGCCTCC | N | 0.017487111 | 0.003872454 |
| | CCATCCACCTCTGCCTAA | | | |
| | GTAAATCTGCTCTCA | | | |
| 1010 | TGACCCCAGCACACCTCT | N | 0.028604961 | 0.029255316 |
| | GGCTAACCCATACCCCAC | | | |
| | ACCTGCCCAGCTCT | | | |
| 1011 | CTTGAGAGATGAGCACCA | P | 0.019566551 | 0.000613113 |
| | GTTACACAAGGACTTCTT | | | |
| | TATCCGAGCGCTGG | | | |
| 1012 | GCGTAGTCAGCCCTTGC | N | 0.014976383 | 0.016759227 |
| | GCTCAGTGTAGAAACCCA | | | |
| | CGTCTGTAAGGTCGG | | | |
| 1013 | GGGGGGCTGGCGCCAC | N | 0.027227473 | 0.009130125 |
| | CGAACCTGCACATCTCAA | | | |
| | CTTGTAACTCAATAAA | | | |
| 1014 | GCCCAGCCAGCACGCCT | P | 0.004597134 | 0.000218954 |
| | CAAGGTAGATGGAATCCC | | | |
| | CACTGGTCAGAGAAA | | | |
| 1015 | GAATCCCTATGTATGAGA | P | 0.009152623 | 0.001434882 |
| | GGAGGGAGGCAGGCTGC | | | |
| | AGCTTCAGCCACAGA | | | |
| 1016 | GCAGCTATTGAAAGGTTA | P | 0.049606162 | 0.024172653 |
| | CTGGGCTCCCAGCCATC | | | |
| | ATAGCAGCATTTCTG | | | |
| 1017 | TGGCCCCAATACCCATTT | N | 0.025466104 | 0.000592227 |
| | TGGAAGCCCCTGTGGCC | | | |
| | GTGTGGATGTCGGTA | | | |
| 1018 | GCTTCTCCTATGAGGTGC | P | 0.039537068 | 0.003530351 |
| | TTAGGGCTGCATCTTGGT | | | |
| | TTTAGGACCACTGT | | | |
| 1019 | GACTGGCAAGGTTTCCTA | N | 0.038431498 | 0.045929737 |
| | GAGCTCTACTTACAGAAC | | | |
| | AGCCCTGAGGCCTG | | | |
| 1020 | TTCCCAGGCTGGAACCA | N | 0.025665689 | 0.017387411 |
| | GGGTCTCTCTTTACCTCC | | | |
| | TACCCCATGGTGGCA | | | |
| 1021 | GCTACAGAAACAAGGTC | P | 0.01326295 | 0.01077719 |
| | GTCGGCTGGCGGAGCGG | | | |
| | CTTGGAAAAAGACCTT | | | |
| 1022 | CGAAATTCCCCAGAAATT | N | 0.032498303 | 0.005482439 |
| | AGTAGTAAGTGGGGTCTT | | | |
| | TGTGGGTTGGGAAG | | | |
| 1023 | GCAGCTGGTTTCTTTAAA | N | 0.049311193 | 0.003275167 |
| | GGTGTTGGGAAAGGTTTA | | | |
| | GTAGGAGCGGTAGC | | | |
| 1024 | AGATTGTGGAATGGGTGT | N | 0.045081493 | 0.007970505 |
| | AAGACAATTGGTAGGGG | | | |
| | GTGAAAGTGGGTTTG | | | |
| 1025 | TCGGTCCCGAGACGTTC | P | 0.024879954 | 0.00026266 |
| | CGCCAGCGTTTCCGGCA | | | |
| | GTTCCGCTACCAGGAT | | | |
| 1026 | CTGTGTTTCTGCAAGTGC | N | 0.013613554 | 0.003696673 |
| | CATCCTTGTACAGTGTTA | | | |
| | AGAGGGTAACATGG | | | |
| 1027 | CTCGGCCATACTCACTGC | N | 0.004495385 | 0.002711004 |
| | CCCCCTTGGGCACCCAC | | | |
| | TCACCCTAGAATAAA | | | |
| 1028 | CCGTGGTACATACTGGGT | P | 0.038077447 | 0.015747273 |
| | CAGGCACTAGCATGGAG | | | |
| | GAGGGTCACAGAGTG | | | |
| 1029 | ACTGGGTTTGGCCTGGA | N | 0.003754139 | 0.006775698 |
| | CAGCACTGATTTGTGGAT | | | |
| | GTGGATGGGGGCACG | | | |
| 1030 | GCAGGGGATCGACATTG | N | 0.00428251 | 0.005859953 |
| | AGACCAAGATGCACGTC | | | |
| | CGCTTCCTTAACATGG | | | |
| 1031 | ATGGATCATCTGAGCCTC | N | 0.017390796 | 0.003412525 |
| | AGGAGGTTGAGGCTGCA | | | |
| | GTGAGCTGTGACTGC | | | |
| 1032 | CCAGGAGTTTGAATCCAT | P | 0.019137014 | 0.043400312 |
| | CCTGGGCAGCATACTGA | | | |
| | GACCCTGCCTTTAAA | | | |
| 1033 | CTACCCATGGTAGACTCA | P | 0.028370217 | 0.001500458 |
| | CAGCTGCCTGTGGTGAA | | | |
| | CTTTGGCTCCCTGCC | | | |
| 1034 | GCTTGGGTACACTTCTCT | N | 0.041813078 | 0.017724472 |
| | TAAGTGGTCTAGTCAAGG | | | |
| | AACCTCMGTCATG | | | |
| 1035 | AGCCCTTCAGCTGCCTG | P | 0.02589747 | 0.00970553 |
| | CACAACCCCTGACATTGG | | | |
| | CTGCTGGTGACTCAA | | | |
| 1036 | ACTACACCTTATTTGGTC | P | 0.019617455 | 0.002051209 |
| | GCAGCTACTGAGGGATG | | | |
| | AACGAAAGCCCCCTC | | | |
| 1037 | CCCATGAAGAAAGCCCCT | P | 0.009051906 | 0.004414306 |
| | CGTTGCCCAGCACTGTCT | | | |
| | GCGTCTGCTCTTCT | | | |
| 1038 | CCCCAAGACCTAAGGGTT | N | 0.029101462 | 0.017192608 |
| | TTATCTCCTCCCCTTGAA | | | |
| | TATGGGTGGCTCTG | | | |
| 1039 | CACTTGAGGACCCTGGG | N | 0.025548744 | 0.000413143 |
| | GAGAGATGGGGGCGGG | | | |
| | GAAAATGGAGGTATGAA | | | |
| 1040 | ACCTAGGATGGGGTTTCT | N | 0.034390037 | 0.000189729 |
| | CTAATTGCTAATCACAAC | | | |
| | CCCACTGGGTCATG | | | |
| 1041 | GAGTGCTATCCACCAGG | P | 0.022535845 | 0.015026122 |
| | CATGAAAGTCCAAGTGCG | | | |
| | GTATGGACGAGGGAA | | | |
| 1042 | TCCTTGGGGGCAGGGCC | N | 0.023540873 | 0.001212794 |
| | TTTGTCTGTCTCATCTCT | | | |
| | GTATTCCCAAATGCC | | | |
| 1043 | GACCATCCGAAACCTGC | N | 0.00587747 | 0.00734318 |
| | GTCCCTGGTGATGTTCTC | | | |
| | AAGCCTCGGAAGTGG | | | |
| 1044 | GTGTTCCTGAAGCTGCTG | P | 0.033438847 | 0.010382953 |
| | TGTCCTCTAGTTGAGTTT | | | |
| | CTGGCGCCCCTGCC | | | |
| 1045 | GCTAGTCGCATACCCGG | P | 0.024351103 | 0.004537936 |
| | AGTAACACCTGCCGCCAT | | | |
| | CATCAATCTGCTGAG | | | |
| 1046 | AGCCCTGCTGCAAAGAT | P | 0.027911092 | 0.026951183 |
| | GGTCAACGTACCTAAAAC | | | |
| | CCGAAGAACCTTCTG | | | |
| 1047 | GATCAGAAAAGCAGAAAG | N | 0.039055523 | 0.00266941 |
| | AGAGAGTGGCCGGATGG | | | |
| | GGCTGAGGGGAGAAA | | | |
| 1048 | CTATTTGCAGGATGAGTT | P | 0.049297126 | 0.005131774 |
| | GGGCAGGGAAAAGGGTC | | | |
| | AGGGTTCATCAGGTG | | | |
| 1049 | TCTGTGCTACCTTATTAA | N | 0.018181769 | 0.008090838 |
| | CTCACAGCAGGCTTACTG | | | |
| | AATGGCTTCATTTC | | | |
| 1050 | CACATTCTTTTTTGGTGTT | N | 0.044161672 | 0.005928323 |
| | CATAGCTTCTTCTCATAC | | | |
| | AGGTGCCAGACAC | | | |
| 1051 | GCTCCCTAGAGGCCCAG | N | 0.029680593 | 0.000117339 |
| | CGCAGCCGCAGCGGACA | | | |
| | AAGGAGCATGTCCGCG | | | |
| 1052 | AGTCCAGGTTCAAGACTA | N | 0.034317358 | 0.034047835 |
| | GCCTGGGCAACATGGCA | | | |
| | AGACCCTGTCCCTAT | | | |
| 1053 | CACCTCCACTGTGATGTA | N | 0.045534716 | 0.045835854 |
| | TGTCCGCTCCCTCGTCTG | | | |
| | TTCCCCCAGGATCT | | | |
| 1054 | CATGTTCGGGGCCACGT | N | 0.039472934 | 0.006554487 |
| | TGTTGTATGTATTGATGT | | | |
| | ACAGCCTTGAATGTG | | | |
| 1055 | AGCCTTAGTCCAGGGGT | N | 0.037499714 | 0.00515636 |
| | GTGGCTCTGTCCGGGTG | | | |
| | CAGTATGCAGTCATGT | | | |
| 1056 | GTCCCTGTGGTAGAAAAC | N | 0.022645668 | 0.004143538 |
| | TTACTCTTTATGCCTGGT | | | |
| | GCAGTATAATTCCC | | | |
| 1057 | CCAGTATTACGGTGCCTC | N | 0.038685845 | 0.028206087 |
| | TTCTCTGCCCCCTTTCCC | | | |
| | AGGGTATCTGTGGG | | | |
| 1058 | GATTGTGCCACCGTACTC | N | 0.023020868 | 0.027602551 |
| | CAGCCTGGGCGACAAGA | | | |
| | GTTAGACCCTATCTC | | | |
| 1059 | CAATTTTGGCCTCTGTGA | N | 0.020169682 | 0.00510351 |
| | TCCTCTTCGCCAATCCCA | | | |
| | TCAGCCCCATGCAG | | | |
| 1060 | AGGCCGAAGCCAGCGCC | P | 0.047913941 | 0.018372791 |
| | CAGCTTTCCTCACTGTTC | | | |
| | CTGTGGAGGATGTCT | | | |
| 1061 | GATCTCCAGGCTTGGCCT | N | 0.018301749 | 0.049741543 |
| | CCAGAGCAGCCCACACC | | | |
| | AACCCCAAAATAAAA | | | |
| 1062 | CTACAGGTCCCCTCTGAG | N | 0.009233746 | 0.00424888 |
| | CCCTCTCACCTTGTCCTG | | | |
| | TGGAAGAAGCACAG | | | |
| 1063 | TGTGTCACAGCCAGAGG | N | 0.047297434 | 0.023687073 |
| | GACAAAGTGTGGGTGAT | | | |
| | CCTGGAGACGCCAGTT | | | |
| 1064 | CTGGGGCCTGTGTAGCC | P | 0.031505737 | 0.003700105 |
| | AGTGGGTGCTATTCTGTG | | | |
| | AAACTAATCATAAGC | | | |
| 1065 | ATGGTCTGGGAGCTGTTC | N | 0.037376141 | 0.000835667 |
| | TGGGGCAGGGGGAATAT | | | |
| | GCAAGCTAAAGCCCC | | | |
| 1066 | GAGGTGGGGAGTTCGAG | N | 0.039959638 | 0.00728954 |
| | ACCAGCCTGATCAACATG | | | |
| | GAGAAAACCTGTCTC | | | |
| 1067 | GAAGGCCAGACTTACTCA | N | 0.047431494 | 0.017758564 |
| | TTTTTCTCCCCCAAGTGA | | | |
| | GCTGCAAGAGGCCC | | | |
| 1068 | GGGCCTCTCTGGTATGG | N | 0.024793526 | 0.000222487 |
| | GCAATAGGCAAGCTCCT | | | |
| | GGGGTCTGGTTATGTG | | | |
| 1069 | CTCCCTGCCCCTGGAGG | P | 0.021793134 | 0.024454086 |
| | TTGTCTTCAAGCTGTGGA | | | |
| | CTTCTGGGATTTGCA | | | |
| 1070 | GGCCGAGAACTGGAAAC | N | 0.048520596 | 3.14646E−05 |
| | AGCCTTTCCCTCATTTTC | | | |
| | TGTGTATTGGTGATG | | | |
| 1071 | GATTAGGCCCTGTTCAGC | P | 0.023407336 | 0.002686615 |
| | CATGCAGGGGTGTTGGT | | | |
| | TTATGCGTGCTGCAG | | | |
| 1072 | GCGACTCTAGTGGCCTG | N | 0.043836203 | 0.002869152 |
| | AGGAGATGTATTTATAGG | | | |
| | CCCCCAGCAGGGCTG | | | |
| 1073 | GGCCGCACACTGGTGGT | P | 0.028329248 | 0.000436968 |
| | CCATGAAAAAGCAGATGA | | | |
| | CTTGGGCAAAGGTGG | | | |
| 1074 | CCTCACCAGTGCTTCATA | N | 0.028442468 | 0.009376793 |
| | TACCATGATATAATCTGA | | | |
| | AAGGGGCAGATTAA | | | |
| 1075 | CACTCAAGAGACTTATAG | N | 0.026412581 | 0.03446177 |
| | CCACACAACCAATCTCTG | | | |
| | CTTCAGACTCTGGG | | | |
| 1076 | AAGAGTGAGTCTGAGCA | N | 0.045662901 | 7.13847E−07 |
| | CGAGTTGCAGCCAGGGC | | | |
| | CAGTGGGAGGGGGTTT | | | |
| 1077 | GAGGTAGTCAGTGGCGC | N | 0.044737703 | 2.43603E−05 |
| | ACAAAGGGTAACAAGCA | | | |
| | GTGATAGTGGGGATGC | | | |
| 1078 | GGGCCCTCATGCTGGCT | P | 0.028313626 | 0.023945809 |
| | TTTCACCCCAGAGGACAC | | | |
| | AGGCAGCTTCCAAAA | | | |
| 1079 | AGGCTCAGAGGACCATA | N | 0.024634501 | 0.001973366 |
| | GGAGGTTTTAAGATTTAT | | | |
| | GTTTAGTCCGATAGG | | | |
| 1080 | AGGCCGTGTCAGCACGA | N | 0.026470289 | 0.005900536 |
| | TGGACCCCAAACAGACC | | | |
| | ACCCTCCTGTGTCTTG | | | |
| 1081 | TAGGAGAGCCTGTGCTG | P | 0.032231481 | 0.020076301 |
| | GGTGCCAAGATGGAGAC | | | |
| | AGCGGCTACCTTGCTA | | | |
| 1082 | GCGGAGAGTTCACGAAC | N | 0.045607507 | 0.044178243 |
| | TGTGCCCAACGCATGTTA | | | |
| | TAGCCAGGGTCCTAC | | | |
| 1083 | CTCCTCTTCCGGGTCCGT | P | 0.001482729 | 0.000168775 |
| | GGGCGAGTCTTCATCTAA | | | |
| | GGGACCAAGATACT | | | |
| 1084 | CACTTGGACCTGGGAGG | N | 0.025813389 | 0.010101332 |
| | CAGAGGTTTCAGTGAGC | | | |
| | CCAGATCGCGACACTG | | | |
| 1085 | CAGTTCTGCATCTGATAC | N | 0.020933213 | 0.03245218 |
| | CGTCTCCTTTCCCTGAAG | | | |
| | TCTGGCACACCATG | | | |
| 1086 | AAAGGCTTGCTTGAGGG | P | 0.049588259 | 0.012252992 |
| | AGCTTATAACTTGCACCT | | | |
| | AGAGGGTTTACCCAC | | | |
| 1087 | CTCAGCGTCTCCCCATGC | P | 0.046286293 | 0.021964029 |
| | TGGGCTCACTACATGGG | | | |
| | CCAGCCCTTGCTCTA | | | |
| 1088 | GTGACAGTGAAGACATGA | P | 0.043809066 | 0.043383402 |
| | AGATGAGAGCTAAGCAG | | | |
| | CTCCTGGTTGCCTGG | | | |
| 1089 | CGGCACCATTGAGTACAT | P | 0.022772857 | 0.002906623 |
| | GCGAGACCCTGACGACC | | | |
| | AGTACAAGCTCACGG | | | |
| 1090 | ACTCAAGGGTGGTCAGC | N | 0.025117718 | 0.002101885 |
| | TCAATGCTACACAGAGCA | | | |
| | CGGACTTTTGGATTC | | | |
| 1091 | TGCAGATGAGATCCAGGT | P | 0.046739135 | 0.000475238 |
| | TGGCTTTGGCCGGGTAG | | | |
| | GCAAGCACTTCTGGG | | | |
| 1092 | GCTGCCCTGTGGGTCTT | P | 0.032740791 | 0.009199183 |
| | GCTCAATACTGTTCATAC | | | |
| | CTGGAGAGAGAAGGT | | | |
| 1093 | ACATCCAAAGACGCACAA | P | 0.011204926 | 0.000961497 |
| | GACCAGCCACTGCTACC | | | |
| | GCATCACGTACCGCC | | | |
| 1094 | GAGCGAATGCCACCCCG | P | 0.030449768 | 0.004061836 |
| | AAAGGATAGCATACACGC | | | |
| | TGGTGGGCCAATGAA | | | |
| 1095 | TTGAGAGGCCGAGGCTG | N | 0.043089869 | 0.02241793 |
| | GCAGGTCACTTGAGGCC | | | |
| | AGGAGTTCAAGACCAG | | | |
| 1096 | GGGAAGACTGGAGCCTA | P | 0.043548037 | 0.006514981 |
| | AGCTGCCTGCTACTGGG | | | |
| | CTTTACATGGTGACAG | | | |
| 1097 | CATGGTCACACATAAAGT | N | 0.039705325 | 0.010220149 |
| | TGCAGTTAGGAAAGGGAT | | | |
| | GGGCAGGGAAAAAC | | | |
| 1098 | GCAGAGCATTCAGTGCC | P | 0.015576617 | 0.004235995 |
| | ACGGTTTAGGTGAAGTCG | | | |
| | CTGCATATGTGACTG | | | |
| 1099 | GCAGAAGAGGGTGTGTT | N | 0.048310539 | 0.033571502 |
| | TGAAATCATCGGAGTCAG | | | |
| | CCAGGAGCTGTCACC | | | |
| 1100 | ATCAACAAGGTGGTGTGA | P | 0.037717417 | 0.005415172 |
| | TGGCTCCTGCACAGGCC | | | |
| | CGACATAGGATGAGG | | | |
| 1101 | GTATGTCAAACTGCCAGT | N | 0.019365062 | 0.014179763 |
| | AAGCCAGCCCCTCACCC | | | |
| | TCTGATAGATATTCC | | | |
| 1102 | CAGTCGCAGCTCTTTGGA | P | 0.027055544 | 0.00263818 |
| | GGTGACTCGTGTTCCAG | | | |
| | GTGGATCCCTCTCTG | | | |
| 1103 | AGCAGCTTGTCTGGCGT | P | 0.006306624 | 0.000845437 |
| | CAACTGGCTTTCAGAGTG | | | |
| | CTGACCCCTCATCAC | | | |
| 1104 | TGGAGGAAGTTCTACACT | N | 0.034466407 | 0.010019144 |
| | CGCCTCACCAACAGCCG | | | |
| | ACACGGTGAGACCAC | | | |
| 1105 | CTGTGAGTGTCTCTAGGG | N | 0.046000559 | 0.002303766 |
| | TGATACGTGGGTGAGAAA | | | |
| | GGTCCTGGTCCGCG | | | |
| 1106 | CCTCAGTCGGTGAAGAA | P | 0.025131185 | 0.024227633 |
| | CAAGGTTCTGGAGGTGA | | | |
| | AGTACCAGAGGCTGCG | | | |
| 1107 | GGCCATGCCTCTGCTCC | P | 0.01350372 | 0.003204862 |
| | ATACTTTGGAAAGGAAGA | | | |
| | ACCCTCAGTGGCTCC | | | |
| 1108 | GCTTCAGCTTTCGGACTC | P | 0.027575924 | 0.008663292 |
| | TGGTTCTTGGATCGTGTC | | | |
| | CTCTCCCCCTCGCC | | | |
| 1109 | ACCGCTTAAACCTGGGA | N | 0.045532763 | 0.019081339 |
| | GGTGGAGGTTGCAGTGA | | | |
| | CCCGAGATCGAGATCA | | | |
| 1110 | GAGGGACATGCTTCCCC | P | 0.005399088 | 0.000599491 |
| | TTGTCCACCTTTGCAGCC | | | |
| | TGTTTCTGTCATGTA | | | |
| 1111 | CTCCAGCCCACGTTCTCT | N | 0.004696751 | 0.005733364 |
| | CTGCCTGTGAGCCAGTCT | | | |
| | AGTTCCTGATGACC | | | |
| 1112 | TACACTAGGGGGTCCTAC | N | 0.047550849 | 0.000472868 |
| | AGCTACGTGGCCGTGGG | | | |
| | CAGTACTGGGGGCGA | | | |
| 1113 | GGACAGCATGTCCCTGC | P | 0.03097545 | 0.00643237 |
| | TCTTCCGCCTGCTCACCA | | | |
| | AGCTCTGGATCTGCT | | | |
| 1114 | CGACACTGTGGACTGAA | N | 0.039877769 | 0.004742872 |
| | CACACTGAAGCTCTGATG | | | |
| | GGAAAACCTGGTGAC | | | |
| 1115 | GAGTGGCACTGATAACTG | N | 0.012106144 | 0.00707376 |
| | GTGAAGCCTACAGCCATC | | | |
| | CGCCCAAAAGTCTG | | | |
| 1116 | CGAATGTGATTGGAACAT | N | 0.014422232 | 0.00304009 |
| | TTGGGGAGCACCCAGAG | | | |
| | GGATTTCTCAGTGGG | | | |
| 1117 | GCAACCATGCAAAAGAAA | N | 0.031803103 | 0.002697089 |
| | TTAATTTGGCCAGGCACA | | | |
| | GTGGCTCATGCCTG | | | |
| 1118 | AGTGGCACTCGACGAAA | P | 0.019666667 | 0.01243194 |
| | AGGAGACTATGCCAGTTA | | | |
| | CTACCAGGGCCTATG | | | |
| 1119 | GGATCTTTGTCTTCTGGC | N | 0.041751715 | 0.01183193 |
| | TGGAGGTGCTTTTGGAG | | | |
| | GTTGGGTGCTGGGCA | | | |
| 1120 | GCTCTGCGTGTGGTCCG | N | 0.022619007 | 0.026271866 |
| | TATGGAAAGCCTGGTAGC | | | |
| | CCTGCGAGTTAAGTA | | | |
| 1121 | TGCTGAAGTTTTTGGCCA | P | 0.014993772 | 0.008550214 |
| | GCTTTAGTTTGAGGACTC | | | |
| | CTTGATAAGCTTGC | | | |
| 1122 | TGCAGTGAACTCCAGAGA | N | 0.024405392 | 0.00555678 |
| | CCTAGGGGATGTGGCTG | | | |
| | TGTCGGCAGCAAGAG | | | |
| 1123 | AAGGAAAAGGTCAGTGC | N | 0.015265932 | 0.004918118 |
| | AGTCAGGAGAGACAGGT | | | |
| | CCCGAAAGACGCCCTC | | | |
| 1124 | TCGGGGAAACTGTGTGT | N | 0.026870945 | 0.027170535 |
| | GCTGAAGAGTACGTGGG | | | |
| | AGCTCTCTGTGCTATC | | | |
| 1125 | AAGAGGCTGCGGTGAGC | N | 0.046323914 | 0.0144836 |
| | CAATTTAGAGCCCAAAGA | | | |
| | GCCCCGAGGGAACCT | | | |
| 1126 | TGTGCCCGATGCGTGCC | N | 0.034773849 | 0.027149099 |
| | CAAGGACAACGCCATTAA | | | |
| | GAAATTCGTCATTCG | | | |
| 1127 | AGCAGTTCCTGACGGAG | P | 0.045122451 | 0.024123594 |
| | CTGACCAGACTTTTCCAG | | | |
| | AAGTGCCGGACGTCG | | | |
| 1128 | GGTGATGTATGGCTAAGA | N | 0.009866158 | 0.001858793 |
| | TTTCACTTTAAGCAGTCG | | | |
| | TGAACTGTGCGAGC | | | |
| 1129 | TCAGCATGAGGTGGAGC | N | 0.01409167 | 0.048823964 |
| | AGTGACCAGGTGGAGCA | | | |
| | GTGACCAGGACGCCTC | | | |
| 1130 | CCATCTGCTTAACCCTTG | P | 0.015169214 | 0.002204865 |
| | GCTCCACCATAAGGCACT | | | |
| | GGGACTCGGATTTC | | | |
| 1131 | AACAGTCTCTCCGCCCC | P | 0.006295555 | 0.017049578 |
| | GCACCAGATCAAGTAGTT | | | |
| | TGGACATCACCCTAC | | | |
| 1132 | CCTCTGTTGCAGTCTTTT | N | 0.041125294 | 3.35379E−05 |
| | TAAGGGGTGGGCCAATC | | | |
| | ATAATGAAGAGGGGC | | | |
| 1133 | TTCCCAGGGCAAGGCTG | P | 0.021135453 | 0.019288379 |
| | ATCTGTTGCCGTATTAGT | | | |
| | CCGTTTTCACACAGC | | | |
| 1134 | CTACCCTCATTAACAATT | N | 0.023930555 | 0.011891939 |
| | AGCAGGGCACTGGCCAG | | | |
| | AGTTTGTACCCTGTG | | | |
| 1135 | GCGCAACACCTAGGAGC | N | 0.006433886 | 0.003532166 |
| | CCAAAAATAAGCAGCACG | | | |
| | ACGGAACTTTCAGCC | | | |
| 1136 | TCTAGTGGATTGGTTTTC | N | 0.008539893 | 0.002553882 |
| | AACATCGTGCCTGCCGAT | | | |
| | ATGCCTACAGAATC | | | |
| 1137 | AGCCTGCTCGGCTGTAT | P | 0.041600108 | 0.012386311 |
| | GTTTCTCGCACGCTCACC | | | |
| | CGCTTCAGTGCGGCT | | | |
| 1138 | CATCACTGGGAAGCAGG | N | 0.036852633 | 1.13163E−05 |
| | CAGTGTCTTGGGTGGGG | | | |
| | GCTTGGTCAGTATCCT | | | |
| 1139 | CGCCCATTGAGCAGGAG | N | 0.035787476 | 0.004099986 |
| | CCATCAAAGAAGCAGAAG | | | |
| | AAGCAACATGAGGGC | | | |
| 1140 | GACCTGGACGCAGAGGC | P | 0.044975177 | 0.001936395 |
| | CCGTCATCTGGCGGATG | | | |
| | AGGCTAAGAATCTTGT | | | |
| 1141 | GGAGCTGCCAGGGATGC | P | 0.02867681 | 0.005464334 |
| | TTTACAGGGATTTAAGAT | | | |
| | CACACCGTCCCATGC | | | |
| 1142 | CCCCGCTTGTGTCTGAG | N | 0.01146418 | 0.002141017 |
| | GTCGTGTATGTCAAAAAT | | | |
| | AAAGCCGCTAGAAAC | | | |
| 1143 | GCACTTTGGGAGGCTGA | N | 0.034930505 | 0.012013477 |
| | GGCAGACAGATCACGAA | | | |
| | GTCAGGAGATCGAGAC | | | |
| 1144 | GCTGGGAGCAGTTGCAG | P | 0.048953115 | 0.022353363 |
| | GCCACAGTGAAGTGTGTT | | | |
| | GCTTCTGTCACTTTA | | | |
| 1145 | GGACTTCCAACCTTGACT | P | 0.036163817 | 0.011749739 |
| | GCTGAGCTCCTGGCTTA | | | |
| | GCTTCTTGGGTTCCT | | | |
| 1146 | CAGCACTTGTGAAGGATT | N | 0.046604194 | 0.000938006 |
| | GAATGCAGGTTCCAGGT | | | |
| | GGAGGGAAGACGTGG | | | |
| 1147 | GGCCCTGGGGGACCCTC | N | 0.02735808 | 0.029529244 |
| | TGAAGCATTTCTGCCTCA | | | |
| | CTTTATGTCATCTGC | | | |
| 1148 | TAACTTCCAGGAGTTCCT | N | 0.002639909 | 0.015542989 |
| | CATTCTGGTGATAAAGAT | | | |
| | GGGCGTGGCAGCCC | | | |
| 1149 | CTCTTAGGGTGTTGTAGT | N | 0.037777493 | 0.005047962 |
| | AGCTGAAACATGGAGATG | | | |
| | CGTAGCTGTCATGC | | | |
| 1150 | CTCTGCCTGGATGCTGTT | N | 0.001769912 | 0.000740642 |
| | TGTGGTTACCTTGTTGAG | | | |
| | CTCCAGTCTATGAG | | | |
| 1151 | GCAGGATTCTGCAAAATG | P | 0.028372725 | 0.011371306 |
| | TGTCTCACCCACTACTGA | | | |
| | GATTGTTCAGCCCC | | | |
| 1152 | CGCCCAGGGCGGCGTTT | P | 0.014131092 | 0.013805369 |
| | TGCCTAACATCCAGGCC | | | |
| | GTTCTGTTACCAAAGA | | | |
| 1153 | CCGAGCCTCTTGAAGCC | N | 0.027464042 | 0.02086608 |
| | ATTCTTACAGATGATGAA | | | |
| | CCAGACCACGGCCCG | | | |
| 1154 | CCCAACCCTGCTGTTAGG | P | 0.001787264 | 0.000725567 |
| | CCTGCTGTTCCCTTTGCT | | | |
| | CTTGATTAGGAGAG | | | |
| 1155 | TCCGGAGCCGCCCTCCA | P | 0.039149351 | 0.014771689 |
| | TTGTGGGTTCCTGAGAGT | | | |
| | AGGACACATTGCCAT | | | |
| 1156 | CAGGGAGCAGTCTTCCAT | N | 0.032287036 | 0.006937537 |
| | CATGCTGAATTTTGTCTT | | | |
| | CCAGGAGCTGCCCC | | | |
| 1157 | GGGATGGACCTGGAAAC | P | 0.023853484 | 0.011460922 |
| | AAGCACCTCCCCAAACAC | | | |
| | ATCACCACTCCCTAG | | | |
| 1158 | TGAGTGAGGAGATGCTT | N | 0.006336264 | 0.033454534 |
| | GCCGTGATGACGCTGGG | | | |
| | CACAGAGGGTCAGGTC | | | |
| 1159 | CTGCCCAGTGAGATGGA | N | 0.025729022 | 0.016988936 |
| | GGACGCTAGAGAAAGTG | | | |
| | CTGAGTGTCCCGAGAG | | | |
| 1160 | GTAACTCCCCCCAGGTAC | P | 0.011518269 | 0.001629918 |
| | GATAGGGACTGAATATGG | | | |
| | ACCCTGCTGAAAGC | | | |
| 1161 | GCTCTAAGTAATGTGATT | N | 0.025187047 | 1.92381E−05 |
| | CTTCTAAAGCAAAGTCAT | | | |
| | TGGATGGGAGGAGG | | | |
| 1162 | CTGGAGTTTGAGACCAG | N | 0.028802543 | 0.029385666 |
| | CCTGAGCAACATGGTGA | | | |
| | GACCCCATCTCTACAA | | | |
| 1163 | CAGTGGAGTGTTCTGCAA | P | 0.029151815 | 0.003673068 |
| | AGCCCGATTCTCTGCAGC | | | |
| | TTTAAGACTGGACA | | | |
| 1164 | GTTGCATTTCATGGGCCT | N | 0.029561039 | 0.000297704 |
| | GGGGGTTTCCTAGCAGA | | | |
| | GGATATTGGAGCCCC | | | |
| 1165 | GCTCCCACCCCAACGAA | N | 0.027068674 | 0.002725252 |
| | GGCTCATAGGAAAACAGT | | | |
| | GCATGTGCTTGGTGG | | | |
| 1166 | CTGGCTCTGAAGACCACA | P | 0.033503443 | 0.036059277 |
| | GATGCAAGCAATGAGGA | | | |
| | ATACAGCCTGTGGGT | | | |
| 1167 | TTGCTGTGCGGAGGGCC | N | 0.020947489 | 0.012152277 |
| | TGCTATGGTGTGCTGCG | | | |
| | GTTCATCATGGAGAGT | | | |
| 1168 | TCTGAGCCTCCGTCGCC | P | 0.010030101 | 0.004147422 |
| | CCTCCTGTTGGGTAAGG | | | |
| | GTGTTGAGTGTGACTT | | | |
| 1169 | TCTCAGCCCCCAGGCTG | N | 0.03709215 | 0.000968344 |
| | TGAGCTCCTTGGGGGCA | | | |
| | GGCCCTCAATAAATGT | | | |
| 1170 | GCGGAGCTCGGGATTGG | P | 0.031497049 | 0.016714108 |
| | CTAAACTCCCATAGTATT | | | |
| | TATGGTGGCCGCCGG | | | |
| 1171 | GGTGATAGTCAGAGAGT | N | 0.033152343 | 0.000146544 |
| | GGTGTTTTTGTTCAGGTG | | | |
| | GGAAGGATTGGAAAC | | | |
| 1172 | TCTGGGGCTGTGGTCAC | P | 0.02529593 | 0.017219564 |
| | CCTCGAATGCGTGGAGA | | | |
| | AGCTGATTCGGAAGGA | | | |
| 1173 | CTAACCAAACCCCAGACA | N | 0.022507591 | 0.002843893 |
| | TAGGGAGTCATTTGGAGA | | | |
| | AAGCCTGTATGTGG | | | |
| 1174 | CAGTCTAGCTGATTGTTC | N | 0.02765978 | 0.018657201 |
| | CACCAAAGAATCCAGCCT | | | |
| | GCTGCTTATTCGAG | | | |
| 1175 | AGTGTGTGTCCTCTGAGG | N | 0.015335541 | 0.041677816 |
| | TGCTTGAGAAAGTGTACA | | | |
| | CTGCAGAACTGCCC | | | |
| 1176 | TTCTGGTTGCCAGGAGAC | N | 0.026451997 | 0.028367603 |
| | AGCAAGCAAAGCCAGCA | | | |
| | GGACATGAAGTTGCT | | | |
| 1177 | CCCCTTCCTAGCTGTATG | N | 0.025493746 | 0.025166976 |
| | ACCTTGATTGTGTGCCTT | | | |
| | AACCGCTCTGTGAC | | | |
| 1178 | GATTCCCCGCTGCGTCTA | N | 0.047061367 | 0.014429807 |
| | AAATCAAAGCGCCAATCT | | | |
| | CATAAGTACCAGGC | | | |
| 1179 | GAGGAAGTCCCAAAAAG | N | 0.007547103 | 0.01085825 |
| | GTGCTGTCACTTTAAGTT | | | |
| | CTGGACTTGGGGTTC | | | |
| 1180 | AATGAGGACAGAGAACCT | N | 0.036887891 | 0.019287674 |
| | CAGGTGTTCTTATGCTAG | | | |
| | TGCTTGCTGAGTGC | | | |
| 1181 | CTGTTCCAGTGTCAACTG | N | 0.032742601 | 0.012789267 |
| | CCATGTGCTCTGCTTCAA | | | |
| | GGGGGAACTAGCCT | | | |
| 1182 | GCAGAGGCAGTCTATTG | P | 0.028013548 | 0.004046822 |
| | CAAGGACCTTCTTTGCTG | | | |
| | CCAGTTATCATAGGC | | | |
| 1183 | TCCCACCTGGCATTGCAT | P | 0.025873241 | 0.005245702 |
| | CGTGGGGAGGAACTTCG | | | |
| | GTAGTTATGTGACAC | | | |
| 1184 | GCCAAATCTGAGCATCAG | P | 0.01750223 | 0.005931921 |
| | AAGTCTTTCCAGTCTACC | | | |
| | TGATGCATGATCTC | | | |
| 1185 | CCCTGGGGATAGCTGGG | N | 0.012578813 | 0.000905615 |
| | GCATTTGTCTAGCTGGGC | | | |
| | TACCTTCTAACACTT | | | |
| 1186 | TCTCTTTTCTGCCTCTTAC | N | 0.025537822 | 0.018142309 |
| | ATGTGAATGTTGAGCCCA | | | |
| | CAATCAACAGTGG | | | |
| 1187 | GCTCTCTCTGCCAGAATT | P | 0.008064735 | 0.000749642 |
| | GTGTGCACTCTGTAACAT | | | |
| | CTTTGTGGTAGTCC | | | |
| 1188 | CTGCCAGCTGTTTTACCA | N | 0.041584156 | 0.002256447 |
| | GGGATCCAGAGACATAG | | | |
| | AGGAAGTAGGGGGTG | | | |
| 1189 | GTGCCTGGTCCAATGTG | P | 0.026957527 | 0.001978261 |
| | CTGAGAGGCATGGGCGG | | | |
| | TGCTTTTGTATTGGTG | | | |
| 1190 | CAACTGCTGCGTCCGTC | P | 0.03344237 | 0.02780037 |
| | CTGCCCCGTCTTCTGTGT | | | |
| | TAGATTGAAAGGGAG | | | |
| 1191 | CCAGCCCTGGGAGAACT | P | 0.046611568 | 0.047325681 |
| | GGGTAGCAGGTGGCTGA | | | |
| | CTTCTTTAAGCACCTT | | | |
| 1192 | CCAGGTTTTCCTGGTCTC | P | 0.040747666 | 0.014133667 |
| | AGACCTATGATGACTTGT | | | |
| | CCCTTTGATGTCAC | | | |
| 1193 | AGCCTTTTCTCAAAGCCC | N | 0.048828958 | 0.028695649 |
| | TTTCAGTTACAACCACCC | | | |
| | CACTATGGAATCAG | | | |
| 1194 | AGTTCTGGATGGATTTGG | N | 0.02257594 | 0.005858182 |
| | TGGCCTGACATGATACCC | | | |
| | TGCCAGCTGTGAGG | | | |
| 1195 | CCCTTCCTACTCCCAGAC | N | 0.020856349 | 0.044268054 |
| | ACCCACCCTCGCTTCAGC | | | |
| | CACAGTTTCCTCAT | | | |
| 1196 | GACCAGATCATGCTCCAT | N | 0.011092874 | 0.005313112 |
| | CCAGCCCCACCCAATGG | | | |
| | CCTTTTGTGCTTGTT | | | |
| 1197 | TGCCCACTCGGCCCGGA | P | 0.046970996 | 0.010641627 |
| | ATGACTCGACCAGACAGA | | | |
| | TAAGGATAGAGGGGA | | | |
| 1198 | CATTGGACGGCAGCAAC | N | 0.011880355 | 0.013027233 |
| | TGGGGGCAAGAACAACG | | | |
| | GGAAGATCACCTGTGC | | | |
| 1199 | TCCTTCGACCTCCACTGC | P | 0.036007318 | 0.00928651 |
| | GCCCCACCTCCCTGCCT | | | |
| | GTGTGTGTTATTTCA | | | |
| 1200 | TCTATGAAGCCCACTCAC | P | 0.039220283 | 0.014917512 |
| | TTGCCATTCCAGGGCCAA | | | |
| | AGGACCGGAGGTTT | | | |
| 1201 | CCATACGGGTTGGTTTCA | N | 0.021732006 | 0.008344053 |
| | CCTCCTCAGTCCCTTGCC | | | |
| | TACCCCAGTGAGAG | | | |
| 1202 | CAGAGGCCACGACATAA | P | 0.015830619 | 0.00291066 |
| | AAATTCAGTCCCTTTGTC | | | |
| | CTTCCCCGTGCCTCC | | | |
| 1203 | TGGGGGTAGTTGGAAGG | N | 0.033447401 | 0.000982633 |
| | GACTGAAATTGTGGGGG | | | |
| | GAAGGTAGGAGGCACA | | | |
| 1204 | ATTACATGGGTTTCCCAG | P | 0.048593504 | 0.000654233 |
| | CTGTTTGCGCGGCCTTG | | | |
| | GAGCACCCACAGAGG | | | |
| 1205 | AAACCCGTCAATGTACTA | P | 0.013130837 | 0.003189037 |
| | GGATACTGCTGCGTCATT | | | |
| | ACAGGGCACAGGCC | | | |
| 1206 | TGTGTGTTTTCTGCGGCC | P | 0.020322652 | 0.003959982 |
| | CTGGATAATGCTGTAGCA | | | |
| | TTCAGGGTCGATTG | | | |
| 1207 | ACCTGAGCGCCCCCGTT | N | 0.037945224 | 0.022206464 |
| | ACCTTGAACTTGAGGGAC | | | |
| | CTGTTCTCCACCTTC | | | |
| 1208 | GCCTGTTCTCTGCCATTC | P | 0.010516259 | 0.003830891 |
| | CCTAGTCATCCTGTGCCT | | | |
| | CACCACAGCTTGCT | | | |
| 1209 | ACTTGAGCTGAAAACCCA | P | 0.022069663 | 0.005412735 |
| | GATGGTGTTAACTGGCC | | | |
| | GCCCCACTTTCCGGC | | | |
| 1210 | ATGGGCCCTACAGTCCCT | N | 0.013090539 | 0.00477988 |
| | GGGCTACACCTGCTACA | | | |
| | GCCGGGGTGTCATCA | | | |
| 1211 | GTGTCCAGCCCACCGCC | P | 0.014188321 | 0.007451265 |
| | TGCCGACTTGTGTCATGC | | | |
| | CCTACGTTGGTATAA | | | |
| 1212 | GACTGTCATGTAAGAGGT | N | 0.020822363 | 0.034381021 |
| | GCTCTCCTGGCACCCAG | | | |
| | AGAAAAGGAGCATCC | | | |
| 1213 | CAGCAAGGGTTCCAAATT | N | 0.024933029 | 0.004316736 |
| | AAGAGGAAGCAAAACGC | | | |
| | TGCCCAGATCCTGAG | | | |
| 1214 | CCCACCCCTCCTCCAGG | N | 0.028036265 | 0.018455146 |
| | GCAACCCCTTGGTCCTAC | | | |
| | AGCAAGAAGCCAGAA | | | |
| 1215 | CCCGTCAGGACGTTGAG | N | 0.03956246 | 0.020514495 |
| | GACTTTTCGACCAATTCA | | | |
| | ACCCTTTGCCCCACC | | | |
| 1216 | GTGAACGCGTGCCTAGC | P | 0.02721104 | 0.006264687 |
| | AGAAGAGCTCCCGCACA | | | |
| | TCCATGCCTTTGAACA | | | |
| 1217 | GGTTCTGACAACAGTACC | N | 0.037504888 | 0.046613892 |
| | CATCCCCCACAGTACCCC | | | |
| | TTCAGCTCAGTTTC | | | |
| 1218 | GCCATAAGCGTCTGTGC | N | 0.005596769 | 0.009112082 |
| | GTGGAGTCCCCAATAAAC | | | |
| | CTGTGGTCCTGCCTG | | | |
| 1219 | CCCTGGCCCACCCCCAC | N | 0.008387788 | 0.003693751 |
| | TTTCCAGGGCAAAAAGG | | | |
| | GCCCAGGGTTATAATA | | | |
| 1220 | ATCCCCGTGTATGGCCC | N | 0.026117037 | 0.004148005 |
| | CCCTGCACCTCCTTGTCT | | | |
| | CATCCCCGAAGATCC | | | |
| 1221 | TTAGGAGGGAGGATGTA | N | 0.004261005 | 0.013495366 |
| | AATAGCCGCACAAAGGG | | | |
| | GTCCAACAGCTCTTTG | | | |
| 1222 | TGGGCTGGATATCTTTGT | P | 0.01406002 | 0.00273231 |
| | AGATGTGGACCACCAAG | | | |
| | GGGTTGTTGAAAACT | | | |
| 1223 | ACAAAATACCAAGTCTCC | N | 0.028404503 | 0.044473069 |
| | CCTCTTCATGGGAAAAGT | | | |
| | GGTGAATCCCACCC | | | |
| 1224 | GCATCCTCCTGTGTATGG | P | 0.011820661 | 0.02519089 |
| | AAGAGACAGGTGACCGC | | | |
| | TCCAGGTTGGGTGCT | | | |
| 1225 | CATGTCTTGCCTCAGACC | P | 0.048495659 | 0.007669068 |
| | CTCACACACTGTCCTCTC | | | |
| | TGCCTGCAACACTC | | | |
| 1226 | TTTTTTGAAGATCAGCTC | P | 0.000525348 | 0.002117839 |
| | CGTGGGGCTGGTTTTGG | | | |
| | TCCACAGCATAACAG | | | |
| 1227 | GCATGGGAAGTATGAGA | N | 0.044450639 | 0.002604668 |
| | AGGTGCTTGTGGAAGGG | | | |
| | GGCCCGGCTCCCTAGG | | | |
| 1228 | AGCTGCCATACTTCGACT | P | 0.042172196 | 0.033118877 |
| | TATCAGGATTCTGGCTGG | | | |
| | TGGCCTGCGCGAGG | | | |
| 1229 | GGCCAGGTGCAGACCTT | N | 0.044322403 | 0.003547524 |
| | GGGGGAAGACTTTAAAC | | | |
| | CACCTAGTTCTCCCCG | | | |
| 1230 | TGTGGAATGCACAAAATT | N | 0.014724414 | 0.00068294 |
| | GTGTAGGTGCTGAATGCT | | | |
| | GTAAGGAGTTTAGG | | | |
| 1231 | ACAAGTGAAGGCCATCAA | N | 0.042744632 | 0.01125372 |
| | AGAATTGGGTGACCACGT | | | |
| | GACCAACATGCACG | | | |
| 1232 | AAGTCTCAGGTGGCTGC | N | 0.03983545 | 0.023115908 |
| | GTGTGGTGGCTCATGCC | | | |
| | TGTAATCCCAACATTC | | | |
| 1233 | GAACTTGCCAGATGCAAA | N | 0.020008078 | 0.003789389 |
| | TACCACAGACTCCAAGAA | | | |
| | AACCCGAGTTGGGG | | | |
| 1234 | GAAGGGCCTCCTGCAAA | P | 0.031882036 | 0.008347754 |
| | ACATCCTTCCTTGAAGCC | | | |
| | TAGCACTGAAGTGGA | | | |
| 1235 | CACTTTCCTGCTCCTCTC | N | 0.045671779 | 0.017334654 |
| | TGTCTCTAGCACACAACT | | | |
| | GTGAATGTCCTGTG | | | |
| 1236 | CAAGTCAGTGACCAGAAA | P | 0.031498757 | 0.005550791 |
| | AATCCCACCCCTTGCCCT | | | |
| | TTCCCCAAAGGACC | | | |
| 1237 | AGTTGCTCCTGCCCCCTC | P | 0.028283634 | 0.010012459 |
| | CCTGAACTATTTTGTGCT | | | |
| | GTGTATATCACTGC | | | |
| 1238 | CAGTTGGTCATCAACTAT | N | 0.037606876 | 0.00712266 |
| | TTTCCCTTGACTGCTGTC | | | |
| | CTGGGATGGCCTGC | | | |
| 1239 | GAGTCCCTAAAGGCAGC | P | 0.026323651 | 0.038482504 |
| | AGCTCAAGGATGGCACT | | | |
| | CAGATCTCCATGGCCC | | | |
| 1240 | CCAAGGATCAGTTTGTGT | P | 0.038879608 | 0.012887723 |
| | GTGGAGAAACAGTCCCA | | | |
| | GCCCCTTCAGCCAAC | | | |
| 1241 | GGGAGGTTTGTGAGAGC | P | 0.010248999 | 0.003569823 |
| | GAGGCTGAGCCTACAGA | | | |
| | TGAACTCTTTCTGGCC | | | |
| 1242 | CCACACACTCACCACTCC | N | 0.006116041 | 0.004639072 |
| | CAGCTTCTCGTGTCCAGT | | | |
| | GAAACCCCTGAACC | | | |
| 1243 | TCCCTGGAGTACGGGAA | P | 0.022584073 | 0.006097973 |
| | GGCTGAGCTGGAGATTC | | | |
| | AGAAAGACGCCCTGGA | | | |
| 1244 | GGGTACTTTCAGTACACA | N | 0.042179308 | 0.04293739 |
| | ACACCCCTAAGATTTCCC | | | |
| | AGTGGTCCGAGCAG | | | |
| 1245 | GCCCCAGGGCGTGGCCG | N | 0.034947874 | 0.023260146 |
| | CTGTTACAGAAACAATAA | | | |
| | ACCCTGATGGGCATG | | | |
| 1246 | CACAGAAATGCTTGCAGC | P | 0.019185719 | 0.012471169 |
| | CTAAGGCAGGGTTTTCAG | | | |
| | ACCGTGGGTCCCAG | | | |
| 1247 | CATGGATTGCGGATATTT | P | 0.003660639 | 0.005766003 |
| | ACCTCTGTCCCCAAACGC | | | |
| | TGACCACGCCCTGG | | | |
| 1248 | GGGGCAGTTTAAAGCAC | N | 0.032514469 | 0.009666582 |
| | AATGTCTCACATGGGACA | | | |
| | AAGTTCCAAAATGCC | | | |
| 1249 | CCCAAAGGCCACATCCAA | N | 0.023081538 | 0.007847408 |
| | GACAGGCAATAATGAGCA | | | |
| | GAGTTTACAGCTCC | | | |
| 1250 | CGGTGGTTGATGGCGCC | P | 0.006399845 | 0.005043293 |
| | TTCAAAGAGGTGAAGCTG | | | |
| | TCGGACTACAAAGGG | | | |
| 1251 | CAAGGGTGCATGGTCCA | N | 0.029858222 | 0.033385679 |
| | ATGTTCTCAGAGGCATGG | | | |
| | GTGGTGCTTTTGTGC | | | |
| 1252 | CAGCTCCGTCCCCAGCG | P | 0.0040143 | 0.001752433 |
| | CTCATGGTGTTGAAACTG | | | |
| | TCTGTCATGCACCAC | | | |
| 1253 | CTGGAGTAAGCTACAGG | N | 0.030690305 | 0.003254254 |
| | ATCTAAAGCAGCCCTTTT | | | |
| | TACAGTCTAGTTAGG | | | |
| 1254 | TCTTCAGGTTCTCCTCTG | P | 0.036563967 | 0.023118757 |
| | TCATTCGGTCAGCCGTCT | | | |
| | CAGTCCATTTGCGG | | | |
| 1255 | TCTTCGTGGCCTCAATGC | N | 0.009754171 | 0.023173652 |
| | CCTCCTTTATCCTCATCTT | | | |
| | TCTTCTATGCAGA | | | |
| 1256 | GGGCTATTAGAATGGGA | N | 0.004617656 | 0.001323707 |
| | GTGCAAAACTGATGCAGT | | | |
| | AGAAGCCCTTACGGC | | | |
| 1257 | CCCATAAAACAGGGTGTG | N | 0.008301395 | 0.009015016 |
| | AAAGGCATCTCAGCGGC | | | |
| | TGCCCCACCATGGCT | | | |
| 1258 | AGGCTCCCTTCTGAGCCT | P | 0.008372085 | 0.013817965 |
| | CTCCTGCTGCTGACCTGA | | | |
| | TCACCTCTGGCTTT | | | |
| 1259 | AAAGCCGGTGCAGGCTC | P | 0.024321007 | 0.000447009 |
| | TGCTGTCATCGTCAGGAC | | | |
| | TCCTTGTGGGCTGTG | | | |
| 1260 | CCGGCGGAAATGAATGC | N | 0.010749145 | 0.003876485 |
| | TGATACCCTAGTAGTCCC | | | |
| | CAGCTCCCAAACACT | | | |
| 1261 | TCTGCACACCCTTGCTCC | N | 0.017604888 | 0.040367999 |
| | CCAAGTACCCGCCCACC | | | |
| | GTTTCCATGGTCGAA | | | |
| 1262 | CGGGAGTGCCGGGCAG | N | 0.0477823 | 0.041978252 |
| | GAGCATGGGGTGCTTGG | | | |
| | TTGTTTCCTTCCTAATA | | | |
| 1263 | GCGTGAAAAACTGTTGAT | N | 0.048101589 | 0.017064373 |
| | AGCAGCAAGAGAAGGGC | | | |
| | AGCAGTCGTTCCATC | | | |
| 1264 | TCCAGTCTGAAGGGAATA | P | 0.0144343 | 0.026196114 |
| | GCTCGCCAGCAGGTTTT | | | |
| | GATGCCAGTGTGAGC | | | |
| 1265 | ACAGCGCCATCTCTCCCT | N | 0.031976496 | 0.010950478 |
| | GAGAATAAAGCCGATAGC | | | |
| | CACCTCCTCCGGCT | | | |
| 1266 | AAGTTCCTGGCTTCTGTG | N | 0.002675617 | 0.001467131 |
| | AGCACCGTGCTGACCTC | | | |
| | CAAATACCGTTAAGC | | | |
| 1267 | GACCTAAGGTCATTTGCT | N | 0.031778044 | 0.012279666 |
| | TTCAATTAGAGGCTCCAG | | | |
| | AGTCTTCATAGTGG | | | |
| 1268 | CTCTATTCTACCAGTGCC | P | 0.024853108 | 0.040729757 |
| | TCCCCGCTTGTGTTGCTC | | | |
| | AGGACGTGGGGCTT | | | |
| 1269 | CATGGGTCTCCAGGAAG | N | 0.036805994 | 0.000608441 |
| | TGACCTTGGATGGGGGT | | | |
| | GGGAAGGGGCTGCTGG | | | |
| 1270 | CCCCAAACTAAGCCATTT | N | 0.046649294 | 0.024389688 |
| | GAAACAAGATTCTCTCCA | | | |
| | TTGCAGTTTGTAGC | | | |
| 1271 | GATCTTCCAGGCCTATGG | N | 0.013249695 | 0.042070273 |
| | ATAGATCAGGAGGCATCA | | | |
| | CTGAGGCCAGGAGC | | | |
| 1272 | CATCCCGTTCTTCGGTTT | P | 0.019030088 | 0.005032268 |
| | GCCATGAGACGATGTGG | | | |
| | GGTTTCCACTGTGTG | | | |
| 1273 | TGCTCGTGGTTTCAGTGT | P | 0.033573178 | 0.035629373 |
| | CCGTGTGTCCATGTGTCT | | | |
| | GCCCTTCAGGAGCT | | | |
| 1274 | GGTCTCAGCCAGCCCTA | P | 0.01979667 | 0.002153455 |
| | GAGACTGCTTCTTGTGTT | | | |
| | TGTGTCATTCTGTCC | | | |
| 1275 | GCGGCACAGTCCCACTT | P | 0.036556034 | 0.038562453 |
| | CCCCATCTCCCCAAGTAG | | | |
| | GTGGTGTTAGAAAAC | | | |
| 1276 | TGGAGGCCGTGGCTATG | P | 0.044651051 | 0.012583354 |
| | GTTGGAGGTCAGCTTCA | | | |
| | GGCCTTCTGGAAGCAT | | | |
| 1277 | CCAGCTCAGTCAAGCCG | N | 0.010139132 | 0.021350342 |
| | CCACATGCCCACAACCTC | | | |
| | ACCAGAGGGAGAATT | | | |
| 1278 | GAGGGTCATCTCTTCTAT | P | 0.024712232 | 0.009604509 |
| | TGTACCTGCAGCACGCTT | | | |
| | CCTGGGCTGTTACA | | | |
| 1279 | TGGGCCCAGGTTTGAGG | N | 0.015400806 | 0.045332813 |
| | GAGAAGGTTGCAGAGCA | | | |
| | CTTCCCACCTCTCTGA | | | |
| 1280 | TGCACCCTGTAAGAATGG | N | 0.048100625 | 0.011586511 |
| | ACTTAAAAGTACTGCTGG | | | |
| | ACAGGCATGTGTGC | | | |
| 1281 | CACTACCAGGAGGAATA | P | 0.017829787 | 0.019574667 |
| | GCAACAGTCCGCCCTCT | | | |
| | CCGTCCTCTATGAACC | | | |
| 1282 | GCAATGTGGCCAGTAAG | N | 0.035873997 | 0.001447385 |
| | AGAACGTGAGTGGTAGC | | | |
| | ACTGAGGCGTGTCTGG | | | |
| 1283 | GCTAAATGTGAGGGTGG | N | 0.021782729 | 0.001811422 |
| | GCCCTAATAAGTACAAGT | | | |
| | GAGGACGAAGGCCGG | | | |
| 1284 | TTGCAGTGGTGGATTGAG | P | 0.029905802 | 0.000547326 |
| | AAGTCCAGTTTGATTTCA | | | |
| | TTGGGACAGACTGC | | | |
| 1285 | TCACTGATCTACAGCCCC | N | 0.02325871 | 0.038866497 |
| | TGTTCGGCGTCAGAGTC | | | |
| | CCCACTAGACCCAGT | | | |
| 1286 | CCCCATGTGCTGCTGAGT | N | 0.016912202 | 0.00094164 |
| | GGCCAAGATGATGCCAG | | | |
| | GCTGCCCTATACACT | | | |
| 1287 | TAATCTGGACATTCGAGG | N | 0.031154979 | 0.023087263 |
| | AATTGGCCGCTGTCACTG | | | |
| | CTTGTTGTTTGCGC | | | |
| 1288 | GGCCTTCCCTGTCAGAA | N | 0.007572616 | 0.009062624 |
| | GGGGGTTGTGGCAAAAG | | | |
| | CCACATTACAAGCTGC | | | |
| 1289 | CAAGCAGCCATACTGATG | N | 0.028082385 | 0.018091477 |
| | ACCACAGCAACCAGCTC | | | |
| | CACGGCCTGATGCAG | | | |
| 1290 | AGTCCCAGGACCAGACA | N | 0.020219021 | 0.023231981 |
| | TCCCCAGACTCCACAGAT | | | |
| | GTAATGAAGTCCCCG | | | |
| 1291 | TCCAGCCATGACAGAAG | P | 0.033488748 | 0.015580753 |
| | GACTTCTCCGTGCCCAAG | | | |
| | TGGATTCATCATTCC | | | |
| 1292 | TATGATGGGCGGCTACT | N | 0.037671037 | 0.000308618 |
| | GGAGGAGGCTGTGAGGA | | | |
| | AGAAGGGGTCGGAGGA | | | |
| 1293 | TTATGAAGGTGGCATTGG | N | 0.034511898 | 0.030408447 |
| | TGAGGCTGTGTCCAGTG | | | |
| | CAGTAGTGGGCGAGC | | | |
| 1294 | GCAAGAGCATTGACTGG | P | 0.041622014 | 0.041127826 |
| | GGCATCCTGGCTGTCTTC | | | |
| | ACCTGTGCTGAGAGC | | | |
| 1295 | GGCAGTTTCAACAGGGT | N | 0.042049007 | 0.023093844 |
| | GCTGCTGGCAACATGAAA | | | |
| | GGCATGATGGGATTC | | | |
| 1296 | CGCACGTTGCGGGCAGA | P | 0.039222975 | 0.012811036 |
| | GCGCAAGGCATACACCA | | | |
| | GAAAACGCTGTCCTGT | | | |
| 1297 | GCCAAAGAGGTCCACAA | P | 0.023127524 | 0.016144865 |
| | CCAGGTGTGCACTGTTCA | | | |
| | CTGCAGCCCATTTGC | | | |
| 1298 | GAGATTGCAAGGGCGGG | N | 0.045199009 | 0.000328698 |
| | GAGAGGAGGCTCTCAAT | | | |
| | AAATAATCGTGTAACC | | | |
| 1299 | TACCTACACAAGGCCACA | N | 0.046620525 | 0.000233283 |
| | CTCCTTGCGTTCCCCTTC | | | |
| | ACGGGATAAGGCGG | | | |
| 1300 | TCAGGCACATCATTGGAA | P | 0.009997869 | 0.000475435 |
| | TACAGGAAGTAGCCCTG | | | |
| | CACCTGCCAGTGAGC | | | |
| 1301 | GCCTCTTCCTCTGAATAG | P | 0.004795572 | 0.002757031 |
| | ACCAGACGCCCTTTCACT | | | |
| | TAGTTCAGTGCCAG | | | |
| 1302 | CCACACTTCCTACTTGGT | N | 0.04407875 | 0.028107594 |
| | CTCTGGAAGTTTTACCAC | | | |
| | ATGTAACAGATTCC | | | |
| 1303 | ATCCCGTAACAGCACTGT | N | 0.048578378 | 0.033340878 |
| | GGAATACACCCTTAACAA | | | |
| | GTTGGAGCCTGGCG | | | |
| 1304 | GGCTGGATGGACAGACA | P | 0.047285982 | 0.02699222 |
| | CCTCCCCCTACCCATATC | | | |
| | CCTCCCGTGTGTGGT | | | |
| 1305 | GGGCCCTGCCTTCAGCT | P | 0.004696064 | 0.001490776 |
| | GGTGCTTGCTGCGATTCC | | | |
| | TGTGCCTTATGTAAC | | | |
| 1306 | CGGCTTGCAAAACTTTCA | N | 0.047421646 | 0.033748406 |
| | GATGGAGTGGCTGTGCT | | | |
| | GAAGGTTGGTGGGAC | | | |
| 1307 | CAGGCATGCTACAATCCA | P | 0.026694516 | 0.005670334 |
| | GGACTGTGGTGTTCTATG | | | |
| | TGCCGTGTATGGTC | | | |
| 1308 | GGAATGGGAGAGGGGAA | P | 0.021591747 | 0.007443578 |
| | GTCTTGGCAGGGAAATC | | | |
| | CCTTTTGGCCACACAG | | | |
| 1309 | CTTGCAGGTTATTCTCGT | P | 0.015579306 | 0.007511241 |
| | CATCGTGTCCGCTTTCAG | | | |
| | TCGCATGGGCTGGA | | | |
| 1310 | CTGACACATCCTCTCTTT | N | 0.007769665 | 0.00103182 |
| | GCAAGCTGCTGACTGGG | | | |
| | CACACTCATGCCAAG | | | |
| 1311 | CCCTTGACCTCTTCTGGC | P | 0.027237423 | 0.018324409 |
| | ATTCTCCTGTGCTCTGAC | | | |
| | AAACTGAGCCAGCC | | | |
| 1312 | GAGGGTGGGCACACACC | N | 0.016389082 | 0.005154868 |
| | CAGCGGCCTGCAGAGTA | | | |
| | AGCTTATTACCCACAA | | | |
| 1313 | CCACTTGGAGAGCAAGA | N | 0.015301392 | 0.000164927 |
| | GGGCTTGTGGACTTGGG | | | |
| | GGAGCGGTTGTGAGAA | | | |
| 1314 | TGCAGCTGCTCCCCGGT | N | 0.041437114 | 0.005479412 |
| | GCACCCGCAACAGGCGT | | | |
| | TTTGCAATGCAGATGT | | | |
| 1315 | CCACCTTGGTTCGCCCAC | N | 0.044692603 | 0.000335386 |
| | TGCTGAACACCATCCAGA | | | |
| | AGACACAGAGGAGC | | | |
| 1316 | GTCAAACACTTGTGACTT | N | 0.028545026 | 0.022228659 |
| | TTGCTTTAATTCCATGAAT | | | |
| | GTTCCTGCCTCCT | | | |
| 1317 | ATCTAACTGTGTGTGGTA | N | 0.039113103 | 0.003001155 |
| | ACCTTGCGTCACGGAGC | | | |
| | TGTTAGTGAACGAGG | | | |
| 1318 | ATATCAACTGCCAGCCTG | N | 0.012971845 | 0.008485033 |
| | GAGAAGGTGACAGTCCA | | | |
| | AGTGTGCAACAGCTG | | | |
| 1319 | GGAGACGGGGGAGTTGA | N | 0.017213175 | 0.012700943 |
| | AGAGTGTGGCCCGCATT | | | |
| | GTCCTGGTTCCCAATA | | | |
| 1320 | GGGAACGGATGTGGAAG | P | 0.043070427 | 0.047486234 |
| | GAAGAACTGTCACCCTCT | | | |
| | TAAGGCCCAGGGTCG | | | |
| 1321 | CCCAGTCTTGTGGATGGA | P | 0.037145686 | 0.00324361 |
| | AATGTAGTGCTCGAGTCA | | | |
| | CATTCTGCTTAAAG | | | |
| 1322 | CGCTGCCTTGCGGGAGG | N | 0.048229484 | 0.001044857 |
| | GGGTCGAGAAAGAGGAA | | | |
| | CGAGGAGCTGTAAATA | | | |
| 1323 | AGGTTAAGCAAGAGCAAA | N | 0.017546081 | 0.00183069 |
| | GTGCCATTGTTTGCCTTT | | | |
| | AATTGGGGGGTGGG | | | |
| 1324 | ACCTGGGTGATGCTCCTT | N | 0.005738467 | 0.000742019 |
| | GGGGCCCTACCTAGAGG | | | |
| | GACTGACTTTTGTCC | | | |
| 1325 | TGGGGGTGGAGAAAGGG | N | 0.043175723 | 0.000606729 |
| | GAAGTGGTCCAGAAACAA | | | |
| | AAAGCCCCATTGGGC | | | |
| 1326 | CCCCCTTTGAATGAGGTC | P | 0.00802248 | 0.000613072 |
| | TTCCATGTTTGAGGGAAA | | | |
| | GTCTTGCACTATTG | | | |
| 1327 | CGGCCTGGGCTGAGAGG | P | 0.011578963 | 0.005431374 |
| | ATCAGTGACTTGTTTGCT | | | |
| | AGACACCGGACCAAA | | | |
| 1328 | ACTCAGGCTAGATATGAG | N | 0.029905474 | 0.000886558 |
| | GATATGTGGGGGGTCTC | | | |
| | AGCAGGAGCCTGGGG | | | |
| 1329 | GGCCCTCCCTGCACTCC | N | 0.024865447 | 0.004917457 |
| | CCTCTTGCTGCGTGTTGA | | | |
| | TTTGGAGGCACTGCA | | | |
| 1330 | CTGAGATTGAGCAACTGT | P | 0.03393354 | 0.023089639 |
| | ACTCCAGCTTGGCGACA | | | |
| | GAGCAAGACCCCCTC | | | |
| 1331 | GATCCCAACGAAGCAGC | P | 0.04685198 | 0.03278525 |
| | CCATGCGGTGACTGAAC | | | |
| | AGGCAATACAGTACGG | | | |
| 1332 | TTGGAGAAATGATGAGCT | N | 0.01099116 | 0.030807755 |
| | ACGCCTTGATGAAAGAAC | | | |
| | CGTGTTGGTGCTGC | | | |
| 1333 | TCATTCTCTGTCCAGCAG | P | 0.018675813 | 0.013857357 |
| | TCATGAACCCCTTCACCT | | | |
| | CCAATGACCTGATC | | | |
| 1334 | CAGGACAGAGGCAACGT | N | 0.023926688 | 0.033971053 |
| | GGAGAGGCTGAAAACAG | | | |
| | TGCAGAGACGTTTGAC | | | |
| 1335 | TTGCCGACCGAGGGGTG | P | 0.037289369 | 0.012997588 |
| | GACAACACTTTTGCAGAT | | | |
| | GAGCTGGTGGAGCTC | | | |
| 1336 | AAGAACCCTTGACCTGG | N | 0.015686307 | 0.006779361 |
| | GGCGTAATAAAGATGACC | | | |
| | TGGACCCCTGCCCCC | | | |
| 1337 | CCTGGGACAAGGACAAG | N | 0.042344756 | 0.00205149 |
| | GGAAAGGGATGGGTGAA | | | |
| | CCAGTAGGGAAGCTAG | | | |
| 1338 | CCCACCAATTTCTCGGAC | N | 0.048267569 | 0.011690512 |
| | ACTTCTCAGTGTGTGGAA | | | |
| | GCTCATGTGGGCCC | | | |
| 1339 | GATTCTGGAGTGAAGCA | P | 0.041369032 | 0.019763626 |
| | GATGTTACTCGACCTTTT | | | |
| | GTCTCCCAGGCTGTG | | | |
| 1340 | GGCCCTGGTTGAAAAGTA | P | 0.043521951 | 0.019369295 |
| | CTCATCTCCTGGTCTGAC | | | |
| | ATCCAAAGAGTCAC | | | |
| 1341 | GACATCGTCACCCTGCTA | P | 0.018313119 | 0.012789633 |
| | CGACTGGCAAAGATGAG | | | |
| | GGAGGCTGAAGCGGC | | | |
| 1342 | GCTCCAGTCGAGGAAGG | P | 0.024795772 | 0.014237616 |
| | AGTACGAGCAGGAGCTC | | | |
| | AGTGATGACTTGCATG | | | |
| 1343 | CCCCAAGGATATTTCCCT | P | 0.039643037 | 0.008061165 |
| | AACCTCACTCAGTCACAT | | | |
| | TGTAGGAGCCAGTG | | | |
| 1344 | GGCGGTGGAGGCCAATA | N | 0.033792671 | 0.006263419 |
| | CTTTGCAAAACCACGAAA | | | |
| | CCAAGTGGCTATGGC | | | |
| 1345 | TGGGAGACCCTCCAGGA | N | 0.025677362 | 0.035349218 |
| | CATTCCCACCCTCCCCCA | | | |
| | TGCTGCCAAGTTGTA | | | |
| 1346 | TCCAAGGCACAGTGAGC | N | 0.006739797 | 0.000202247 |
| | TGGGCAGAGCTGGGCTG | | | |
| | CCAGAAGCCTTTTTCA | | | |
| 1347 | TAAGTATTCCTGTCTCCA | P | 0.030606491 | 0.002722232 |
| | AAGGACCGGCTCTCCAT | | | |
| | GGCTCCTGCGCCTCG | | | |
| 1348 | CCCGTGGAGGTTGGCAT | N | 0.00562919 | 0.010891018 |
| | CCAGGTCACGCCAGAGG | | | |
| | ATGACGATTGTTTATC | | | |
| 1349 | CCATGATGAGGTAGCTTC | P | 0.016552143 | 0.009739356 |
| | TCCCTGGGCTCTCCTTCT | | | |
| | TGCCTGCCCTGTCT | | | |
| 1350 | GCTTTTGCTCAGTAACTG | N | 0.02488439 | 0.019402811 |
| | TGTCATGAATTGCAAGAG | | | |
| | TTTCCACAAACACT | | | |
| 1351 | CACCTTTAGCACGGATAG | P | 0.021921597 | 0.006080137 |
| | TTTCCTGGTCCCAAGTGG | | | |
| | GTGTGGAGCCTTCC | | | |
| 1352 | GAAGGGCAGACAGTTCTT | N | 0.004934525 | 0.000597018 |
| | CTGGGGTTGGCAGCTGC | | | |
| | TCATTCATGATGGCC | | | |
| 1353 | TCCTCTTGGGGTCCTTGA | N | 0.031665895 | 0.000389833 |
| | TGGGCATGTGTGATGGG | | | |
| | GAAGGAGCAGTCTCC | | | |
| 1354 | ACCCCACAGCTGCATTCA | N | 0.035332974 | 0.002266753 |
| | AACTCAAATCTGTGGGAA | | | |
| | TGAGTGACTCGACC | | | |
| 1355 | GTAGACACAGTCATCAGA | N | 0.040073926 | 0.006489628 |
| | AAATGTCTGCCCTTTTGT | | | |
| | TTACTTCTTGGTCC | | | |
| 1356 | GGGCTCTCTGAATCCTAC | P | 0.024620923 | 0.004493592 |
| | CTGGTTTCTTCAGGCTTC | | | |
| | TGGACTTGCTAGGC | | | |
| 1357 | TATCAGGTGCCACCATCA | N | 0.027321963 | 0.000897601 |
| | GTGCAGAGAAGCATTGG | | | |
| | GGGAACCAGTGGGCC | | | |
| 1358 | TTGGTGGCCTGCTTCCCT | P | 0.017927856 | 0.011451959 |
| | CATGCCCTGGAATACAAC | | | |
| | TCAGAGCTCCAGGC | | | |
| 1359 | CACCCCCGAGCTCGCAT | N | 0.047343085 | 0.006326286 |
| | GCTGTCACCCATTCCAGC | | | |
| | CTAAATGTGACCATA | | | |
| 1360 | TCTGAGCGGAAACCCTCT | P | 0.044691111 | 0.008485979 |
| | CCTTAATCTCACTGGCCC | | | |
| | ATCCCAGCCTCAGG | | | |
| 1361 | ATGGGGGGTGTGACCAA | N | 0.031334434 | 0.000199155 |
| | AATCAGTGGGATGTGGC | | | |
| | AGGAAGCTGCAGCCCA | | | |
| 1362 | CGCGAGCCCTGGTGTGG | P | 0.026435814 | 0.014793942 |
| | ACTGTGGTCTGTATGAAT | | | |
| | CGTGTGTAACTGTGG | | | |
| 1363 | TGGACCACTCCATTGCCA | N | 0.006547325 | 0.009124915 |
| | TCTACCTGCTCAACCCTG | | | |
| | ACGGCCTCTTCACG | | | |
| 1364 | GAAGACGGCATCACGAA | N | 0.0234632 | 0.005285233 |
| | GCAGCTCCAAAAGGAAAA | | | |
| | GCTTGGGCGGTGCCC | | | |
| 1365 | GGATTTGGTTAATGACTT | N | 0.041690557 | 0.007585438 |
| | ATGAGCAAGCTGGTTTGG | | | |
| | CCAGACAGTATACC | | | |
| 1366 | GGGGGCCCGTTCCCCAG | N | 0.041716203 | 0.000367849 |
| | AAGCTGCCAGTGCTTTCA | | | |
| | GATGCATTGACTCTT | | | |
| 1367 | AGCTGGCTGCTCAGACG | N | 0.03783101 | 0.000170023 |
| | GTCGACATTGAATTTGGG | | | |
| | TGGGGGTTGGGATCC | | | |
| 1368 | CACACATGCTTTTCTGCA | P | 0.041773378 | 0.027894609 |
| | CGTGGTTGCCTTAGTCAT | | | |
| | CTTCCTACAGCACC | | | |
| 1369 | AATGTGACAAAGGCTCGC | P | 0.015567544 | 0.016219853 |
| | ATAGCTGCTGGCTTACCA | | | |
| | ATGGCAGGGATACC | | | |
| 1370 | GGACAGCTGTTTTTTAAC | N | 0.046323685 | 0.011836486 |
| | CCTCTTCTGCAAGTTTGT | | | |
| | TGACCTACATGGGC | | | |
| 1371 | GACATCTCTAATGGAATC | N | 0.030534107 | 0.008581589 |
| | ATGGGGGAAACGGGTTG | | | |
| | GAATTTGTAGCCATG | | | |
| 1372 | TCTGTGAATCTTGGCTGG | N | 0.025159636 | 0.0116614 |
| | GACTTCCTCTGAGTGATG | | | |
| | CCTGAGGGTCAGCT | | | |
| 1373 | GCACCAACCAGTCCCGG | N | 0.008043655 | 0.01604216 |
| | GTTAGATCCCAAATGCTA | | | |
| | GAAGCCAGGGATGCC | | | |
| 1374 | GGCCAAGCCAGCAAAGC | N | 0.048020527 | 0.000175322 |
| | GGGAGCCCTGAAAAATTA | | | |
| | GGGGGGAAATGGGAG | | | |
| 1375 | ATCAAGAAGAAACTGAGC | N | 0.032832354 | 0.020524086 |
| | AAGGCCTGAGCGCTGCC | | | |
| | CTGCACCTCCGCAGA | | | |
| 1376 | GGGCCCAATTCTTCTCCA | P | 0.047201429 | 0.009196632 |
| | CGACAATGCCCGACCGC | | | |
| | ATGTTGCACAACCCA | | | |
| 1377 | GGCATATGCATATCCTGC | P | 0.030290378 | 0.005540374 |
| | TACTGCAGCTGCACCTAT | | | |
| | GATTGGTTATCCAA | | | |
| 1378 | GTACGTCCCACCCTGTCC | N | 0.044595708 | 0.004016554 |
| | CCAGATCCCCTATTCCCT | | | |
| | CCACAATAACAGAA | | | |
| 1379 | TGCTTTAGGTTTTTGAAA | P | 0.046323541 | 0.010093476 |
| | CAGCCCCGGCGACGCCT | | | |
| | CTATTGGCTCTCGGC | | | |
| 1380 | GCAGTAGAGTCTTGTTTA | P | 0.046085985 | 0.011158693 |
| | ATGGCATTTCACTGTTCA | | | |
| | TTCCCTTTACCACC | | | |
| 1381 | ACAAGCTGGAGCAGGCC | N | 0.019922786 | 0.019354296 |
| | AACGATGACGCGCGCAC | | | |
| | CTTCTACATCATCGAG | | | |
| 1382 | CACTGATGAATTTACCCT | P | 0.014225588 | 0.002703912 |
| | CAAGTTTCCTTCCTCTGT | | | |
| | ACCACTCTGCTTCC | | | |
| 1383 | TAGCGGGGATCCTGAAC | N | 0.048921321 | 0.002465521 |
| | TGGACTGAATAAAACGTG | | | |
| | GTCTCCCACTGCGCC | | | |
| 1384 | CGAGTGTGGCAGGTGAC | P | 0.043509997 | 0.002403266 |
| | CATTGGCACACGCTAGAA | | | |
| | GTTTATGGCAGAGCT | | | |
| 1385 | TGGTTGCCAGGAGACAG | N | 0.025141017 | 0.031947317 |
| | CAAGCAAAGCCAGCAGG | | | |
| | ACATGAAGTTGCTATT | | | |
| 1386 | AGTCCCTGCGGTCCCAG | N | 0.018985229 | 0.011950179 |
| | ATAGCCTGAATCCTGCCC | | | |
| | GGAGTGGAAGCTGAA | | | |
| 1387 | GGGCTGACTGAACCTAT | N | 0.028730784 | 0.022999352 |
| | GGCTAAGAATTGTGACAC | | | |
| | TCTCATGTTTCAAGC | | | |
| 1388 | AGGATCGTATCCCACACC | P | 0.018422828 | 0.031257716 |
| | AGGACTCTATCCTACTCC | | | |
| | TAGTAATCCTTTCT | | | |
| 1389 | GAAACTGTGGGGTTCATT | N | 0.049483463 | 0.003442174 |
| | AATTGCAGTGATGTGAAG | | | |
| | GGTCCTGACAGCAC | | | |
| 1390 | GATCCCTTCCGGGCTCT | N | 0.026408405 | 0.003350537 |
| | GGTCTATCTTGTCTCCTT | | | |
| | AGCTGGGGGCCTACA | | | |
| 1391 | CATGGGCAAAATCTAGCC | P | 0.037631963 | 0.038905 |
| | ACAGTCCTGAGAGTCCA | | | |
| | GGCTTCTGGGATGCC | | | |
| 1392 | GTCAAGTTGCCCAGCTTG | P | 0.011479622 | 0.00388929 |
| | GAGTTGTCTGTCACGCAC | | | |
| | ATGTGTCCTGTGGT | | | |
| 1393 | GACGACACCAGGTCTGA | N | 0.018611574 | 0.003706678 |
| | AGACTTGCGGCGTGAATT | | | |
| | TGGTCGTTATGGTCC | | | |
| 1394 | GGGAGTTTTGCCCTAACT | N | 0.018393593 | 0.017498695 |
| | CATGGATTGTGCAAGAAT | | | |
| | GAACTGCTGTTGGG | | | |
| 1395 | GGGAGGCTGAGGTGGGC | N | 0.005828462 | 0.001008454 |
| | ATATCACCTGAGGTCAGC | | | |
| | AGTTAAAGACCAGCC | | | |
| 1396 | GCAGACCTCCTTAGAGAC | P | 0.020624195 | 0.003890906 |
| | CTCCAGGCAGACCTCCTT | | | |
| | ACTGTCTTCAGGTG | | | |
| 1397 | TATAAGATATTAAAGGGT | P | 0.025930582 | 0.030983788 |
| | AAGTCTCTCCGGCCCGG | | | |
| | TTTCCCTCGGTGTGC | | | |
| 1398 | TTAAAACGCTCTCCCGAC | N | 0.00739715 | 0.001449154 |
| | TCGCCCACAGATTGAAAA | | | |
| | ATGCCTGCACAGCC | | | |
| 1399 | AGGACCAAACACCCCCA | N | 0.030010789 | 0.046182475 |
| | CCCCGATTGAGACCTGC | | | |
| | GGGTGCTGCTCTACAA | | | |
| 1400 | AGCCTGAGCTGCTGGAA | N | 0.032319331 | 0.004889254 |
| | ACTATTCCCTATGAATTC | | | |
| | ATGGCATAATAGGTG | | | |
| 1401 | TGGGATTCGGCCTCTGG | N | 0.004642484 | 0.001606086 |
| | AAAGTGGTGGTAGTTCCA | | | |
| | GATTTATGTGAATGT | | | |
| 1402 | CCTTTTTCTCCAGTATGC | P | 0.011676548 | 0.00174157 |
| | TACCTGATTTGTTTGGCT | | | |
| | GGCCACTAGGTGGC | | | |
| 1403 | CCACCCCTGCAGTCTCA | N | 0.049271074 | 0.037434275 |
| | GCTGTTTGGGAGGCTGA | | | |
| | AGCAAGAGGCTAGCTT | | | |
| 1404 | AGTGGGGGTGTGACCTG | N | 0.041738708 | 0.000934259 |
| | AGGAGATAAAGGAAGGA | | | |
| | CGACAGACCTGGGGAG | | | |
| 1405 | AACTTCCTACAGGGGCCA | N | 0.021215798 | 0.014217225 |
| | AAACCAGAGAAAGGCTTC | | | |
| | CAGCAACTTCGATG | | | |
| 1406 | GGAACAAGATGGTGATTC | P | 0.045428224 | 0.039061178 |
| | TGGGCAGGCAGTATGGG | | | |
| | TTTATTTTGCCAAAG | | | |
| 1407 | CTGAATGAGTACCGCCTC | P | 0.015605378 | 0.003521438 |
| | CCTAGGTTCCAGCACAG | | | |
| | CGCTCGGGTCTAAGA | | | |
| 1408 | CATATAAGCCCTGGGTCG | N | 0.038284887 | 0.007056442 |
| | GGGGGTAACTGTGGGGA | | | |
| | TCACTGCCTGAGACA | | | |
| 1409 | GCAGAGTGGCAGCAGAT | N | 0.031734622 | 0.024928665 |
| | GTTCCAGAAGGAGAAGG | | | |
| | CGGTGCTGGACGAGCT | | | |
| 1410 | CCTCTGTTTAACAGTCCT | P | 0.037354335 | 0.020840216 |
| | TGGACCATTCTGATCCAG | | | |
| | TTCACCAGTAGGTT | | | |
| 1411 | GGGAAGGGGCCCTTGGC | N | 0.036348985 | 0.007645893 |
| | CACAGGTGGAATTAAGAA | | | |
| | ATCTGGCGAAAAGCA | | | |
| 1412 | TGCACTCAGCCCTCCCA | P | 0.025582523 | 0.001475012 |
| | GCAAGGAGTCTGCCACT | | | |
| | CGCGCTTGAAGGACGT | | | |
| 1413 | ACAGAGCCCACAGCCCA | N | 0.030642087 | 0.002690855 |
| | TCTGCCTCTTCACCTCCC | | | |
| | TGAATCCGTGTCCAT | | | |
| 1414 | TCTGCCATTGCCTCTGTC | P | 0.013268571 | 0.001628801 |
| | TTCCTTGGGGCACCTCAG | | | |
| | CTCTGGATGCTACC | | | |
| 1415 | CTCACAGTGGCCATGGG | N | 0.039461062 | 0.00026877 |
| | GTGTCGGGGTGAAGGGC | | | |
| | TGTCCCAGCTACTTGT | | | |
| 1416 | ATACTTGAAACCTCTCTG | P | 0.040273242 | 0.003919337 |
| | ACCAAGAGCCTCTGATG | | | |
| | GAGTGGGAGGTGAGC | | | |
| 1417 | TGATTTGTGTTTTCAGTG | N | 0.018220008 | 1.71122E−05 |
| | TGTGGGGAAGCTGTCCT | | | |
| | GGGGGCTGGGGCGAC | | | |
| 1418 | CCCAGGGGGAGTACGGG | N | 0.038009216 | 0.000867431 |
| | GCTCAAAACACCCTTTTG | | | |
| | GAAAAACAAAGGTGG | | | |
| 1419 | CTAATAACAGTGACCTCC | P | 0.037407267 | 0.000361622 |
| | CCGCCAGGTCCTGTGTG | | | |
| | TTGCCGGCTGAAGAA | | | |
| 1420 | CATCTCTAACCAATCAGC | P | 0.007894577 | 0.006389395 |
| | ACTCCTGGCTCACTGGCT | | | |
| | TCCCCTCATCTGCC | | | |
| 1421 | ATCCCCCCTTCTGCAAGA | P | 0.004527991 | 0.000657809 |
| | AAGCCTCTTTGCAACTGG | | | |
| | GTCAGAATGGCGGC | | | |
| 1422 | CGATAGTAAATTATCCAT | N | 0.016961133 | 0.000666797 |
| | GCTGGTACCTGTGAAAGT | | | |
| | AAGCCCTGGGATCC | | | |
| 1423 | GTGGTAGATCACTTGAGG | P | 0.049858213 | 0.015040631 |
| | TCAAGAGTTGTGACACCA | | | |
| | GCCTGGCCAACCTG | | | |
| 1424 | TGGCTTGAACTCTTAGGG | P | 0.019261564 | 0.00379322 |
| | GTCTGCAGTGCTCCATCT | | | |
| | CCATTGGTGGCCCC | | | |
| 1425 | CGCCCCTATCCAGCAGG | P | 0.036235237 | 0.001955015 |
| | AAGCAGCCAGATGATCAA | | | |
| | CGACGCCCTTTTTCC | | | |
| 1426 | GAGGAGGGCCTCGTGGA | N | 0.047655844 | 0.001224815 |
| | GCGGCGGGAGGAGGCC | | | |
| | CAGCGGGCACAGCAGGC | | | |
| 1427 | CAGGCTCTGATTCTAGTG | N | 0.032491246 | 0.036993993 |
| | GAAGGAGCAGTTCTGAG | | | |
| | TCTCCAGGAAGTAGC | | | |
| 1428 | GGTGAGCTGAGATCACA | N | 0.047890481 | 0.007290033 |
| | CCACTGTATTCCAGCCTG | | | |
| | GGTGACTGAGACTCT | | | |
| 1429 | TCCAGCAGGTAGTGCGA | P | 0.012329027 | 0.007646791 |
| | GGAGATTCGGCAGCTTAT | | | |
| | TTCTGTGCCAGCTCC | | | |
| 1430 | GGCTTCTTGGCTTTCCTC | N | 0.047063144 | 0.000220076 |
| | TCTGACAAGTGACTGAAA | | | |
| | TGGGGGTAGGGTTG | | | |
| 1431 | GGGCCCAGATGTGGGTT | P | 0.038797351 | 0.039151904 |
| | TGCTCAGTATTAGTAGAC | | | |
| | AAGGTCTTTGTTCAG | | | |
| 1432 | ATGCTGGCCACTCTCAGT | P | 0.029588969 | 0.015218917 |
| | CCAGCGTTCCTCAGTAGT | | | |
| | GAATAGCGAACCTG | | | |
| 1433 | CCTGAGAGCATGAGGGC | N | 0.010027863 | 0.006149141 |
| | CCCTAGACAGAGTACAAG | | | |
| | GTGTAATTCAGACAG | | | |
| 1434 | CTGAGGCATCCTGCTGTC | N | 0.027217549 | 0.03359918 |
| | ATGGGAAGGTCTCCGCC | | | |
| | CAAATGTCAGATGCA | | | |
| 1435 | TGGGCTGGCTTGCCTTG | P | 0.036756065 | 0.014071165 |
| | GCTCTTTGAGCTCCCTTT | | | |
| | TGCTTAATTACTGGG | | | |
| 1436 | CAGTCCTTGGACCATTCT | P | 0.011793726 | 0.012790609 |
| | GATCCAGTTCACCAGTAG | | | |
| | GTTGGACAGCATAT | | | |
| 1437 | CCGGGCAGAGCAAGGAG | P | 0.048856132 | 0.011268539 |
| | AGAATGAGGAGTGACAT | | | |
| | GGGTGTTGCCGTGAGT | | | |
| 1438 | CAACTTAAGTTGAGTACA | N | 0.030218313 | 0.023287122 |
| | GTGGCTCAAGCCTGTAAT | | | |
| | CCTAGCACTTTAGG | | | |
| 1439 | CAGACAGTGTGGAGGGG | N | 0.010572541 | 0.004328754 |
| | CTGCTAAATGCCCTCAGG | | | |
| | TTCACTACAAAGCAC | | | |
| 1440 | TTGCGGACCTGGCGGAG | P | 0.033591176 | 0.034064875 |
| | ATGCGCGTTCGCTTCGAT | | | |
| | TGTAGGCCATTCCTT | | | |
| 1441 | GAATAGGGCAAGACTAAA | P | 0.010340898 | 0.014186685 |
| | GGACAGAGTAAGGGTGC | | | |
| | TGGCCGCCACCTGAC | | | |
| 1442 | GCTAGCTCCAGACATGG | P | 0.023688896 | 0.008342659 |
| | GTTGATCACCTAGAGGAG | | | |
| | CTCTGGCTAAGGCAC | | | |
| 1443 | GCCCTTCACTCCCACCTG | P | 0.048202664 | 0.006731128 |
| | CTGCCAAAGTCCCTGTGC | | | |
| | TAATGGGATTACAA | | | |
| 1444 | AGGCATTCTGAGGGGCA | N | 0.038053195 | 0.000602994 |
| | ACGTGGAGGAAGGGCCA | | | |
| | GGGATGCATGGGATTT | | | |
| 1445 | GCAGGCCAAGCAGGGCA | P | 0.04569696 | 0.018900596 |
| | ACCCCACACCCTTGACAT | | | |
| | AAAAGCATCTTGAAG | | | |
| 1446 | ATTGCCAAATACACTTTT | N | 0.018105402 | 0.007691746 |
| | CCAAATTTGTCCCAACAG | | | |
| | CCCTGTAAGCCAGC | | | |
| 1447 | AAACCCGTCACCCAGATC | P | 0.001192133 | 0.000342149 |
| | GTCAGCGCCGAGGCCTG | | | |
| | GGGTAGAGCAGGTGA | | | |
| 1448 | CTGGGGGTCTCCTGTGA | N | 0.023237758 | 0.000399927 |
| | CCCTGGAAAACTACCTCA | | | |
| | ATAGTCCTCGTAGCT | | | |
| 1449 | TTCGAGGGGCTACGGGT | N | 0.048906715 | 0.000216477 |
| | GGAGGGGCGAATGGAGG | | | |
| | AGCTCTCTGGGGCGAT | | | |
| 1450 | CTTCTGTCCCCCTTATGC | P | 0.041388797 | 0.002491223 |
| | CAACAAGATGGCCTTCCC | | | |
| | CTCTGAAACAAAGT | | | |
| 1451 | GCGGGGAAACTCCCAGT | N | 0.03413818 | 0.005387292 |
| | AGGCGCTGCTGTCCAGG | | | |
| | GAAAATGATGGGCTTT | | | |
| 1452 | CTTCCCTCTTGTCCCGAA | N | 0.013045093 | 0.023069059 |
| | GATCTGCGCCTCTAGTGC | | | |
| | CTTTTGAGGGGTTC | | | |
| 1453 | TTCAACACTGACCTGAGG | P | 0.011433165 | 0.027232951 |
| | TTTCAGAGCGCAGTCGTC | | | |
| | GGTGCGCTGCAGGA | | | |
| 1454 | TCCAGGCATTGTACTAAG | N | 0.024320051 | 0.000186095 |
| | TATGGGGAACCACAGAG | | | |
| | AAGACATTCCCTCAG | | | |
| 1455 | GTTTATCTGCTCTGATCA | N | 0.03941985 | 2.59256E−06 |
| | GGGGAAGGACAAACAGT | | | |
| | GGGGAGAGTCAGGGC | | | |
| 1456 | ATGAGCTACAGGAACAAG | P | 0.035980149 | 0.010332322 |
| | AGACCCAGTACTTCGGG | | | |
| | CCAGGCACGCGGCTC | | | |
| 1457 | ATGCATCATGAAGCTTCG | N | 0.047164938 | 0.003969276 |
| | AGTGAAGCTCTTCCTGGG | | | |
| | GACAATGTGGGACT | | | |
| 1458 | GGAAATGGGAGTGCTCA | N | 0.022818819 | 0.027570691 |
| | GTCTGTGCAAGTCAGAAT | | | |
| | CCTTGAAACTGGGCC | | | |
| 1459 | TGCCTGTGTAGTCTCTCT | N | 0.005297182 | 0.001019377 |
| | GTCGTTAGGCCTTTTATC | | | |
| | TATGCCTGTGTGTC | | | |
| 1460 | CTGCCGGAGCCCGAGTG | P | 0.043226163 | 0.035418441 |
| | GATCGGGGACGGAGAGA | | | |
| | ACACGAGCCCATCAGG | | | |
| 1461 | TTACGCCTCCTGATCCTT | N | 0.032137684 | 0.000101771 |
| | CCGATTGGGGCAGACTA | | | |
| | GGAGAGGAAAGACGG | | | |
| 1462 | TGCAGTGGGGACTTCGT | P | 0.022347237 | 0.000582218 |
| | GGGAGGCACTCATGGCT | | | |
| | CTCTGGGTCTAATGAA | | | |
| 1463 | CCAGGAGGCCGAACACT | P | 0.039300834 | 0.008361825 |
| | TCTTTCTGCTTTCTTGACA | | | |
| | TCCGCTCACCAGGC | | | |
| 1464 | AAACAACTGCCCATCCCG | N | 0.02252172 | 0.039673442 |
| | GGTCCTTTCCCTGATGGG | | | |
| | TTGTGGCAGTTACC | | | |
| 1465 | GTCTTCACATCTACCTTT | P | 0.038302577 | 0.008757631 |
| | CTATGTCACATGTGCAAG | | | |
| | ATGGTTGCTCTGCC | | | |
| 1466 | CTCATCAGCATCCAAGGG | N | 0.01483882 | 0.002765869 |
| | TGGGGAGCAGTGTCATC | | | |
| | TAGGAGACTGGTTCT | | | |
| 1467 | GTATGGAGTGGAAACGC | P | 0.046435225 | 0.013781452 |
| | TTGTAAGGCTTCACCAGG | | | |
| | ATCCACCTCTGATGT | | | |
| 1468 | CAGAGGGAGTTCACACA | P | 0.038174371 | 0.018150923 |
| | AGGAGTAAAGCCTGACT | | | |
| | GGACCATTGCACGGAT | | | |
| 1469 | GGTTGAGTTGTTACCGTT | N | 0.039955721 | 0.01184542 |
| | GAACTCACAGCCCACTG | | | |
| | GACTAGAACACATGC | | | |
| 1470 | CTGACCCTCTGCTGTTAT | P | 0.019419418 | 0.007603546 |
| | CCGGAAGTTTCTACCCG | | | |
| | GAGCCAGTTGCCTTC | | | |
| 1471 | GGTTTTGCGGCTAGTTGG | P | 0.039455 | 0.008206158 |
| | CTATTCAAGAAACCTCGC | | | |
| | CCCTCTGAATGTCA | | | |
| 1472 | GGAAGGTGTGATCTGTG | N | 0.0241199 | 0.033478154 |
| | GGACTGTCTGGGCCTGT | | | |
| | TACTCATCCTGCTATC | | | |
| 1473 | GTCCACAGTGAAGTCCAC | N | 0.011419633 | 0.013006478 |
| | TCCAGGTTATCTGCATAG | | | |
| | GTAGCCCAGGCACC | | | |
| 1474 | TGGAATAAGGAGGGGGA | N | 0.038264007 | 0.000699509 |
| | ACACAACTAGCAAGAACA | | | |
| | AAACATTGGGTTGGC | | | |
| 1475 | TGCAAACCTGTACTTCCA | P | 0.008454607 | 0.003803975 |
| | TGATGTGGGAAGGTGAG | | | |
| | GCTGCCAAGGAGAAG | | | |
| 1476 | GCTAATGGCGGGGACCT | P | 0.037397329 | 0.014133064 |
| | GGCACCTTTGCTCTGTGA | | | |
| | CTCTCCAGCTGTATG | | | |
| 1477 | TGTGTCCAGGCTACCTG | P | 0.026837177 | 0.003642709 |
| | GCTGTGCGGCACAGGTT | | | |
| | TAGCCCCAACATGACT | | | |
| 1478 | CGATGAGTGCGGGTAGG | P | 0.039418046 | 0.021477248 |
| | AGCCGTGAGGTGCTTCT | | | |
| | CTGCTGTGACAAACGA | | | |
| 1479 | GGGCGAGGTGGGCGCC | N | 0.035702689 | 2.14211E−05 |
| | GGCGAGAAGGCGGAGCC | | | |
| | CCCGGACAGCGTAGGTT | | | |
| 1480 | GGGAACAGTGAAGTGCA | N | 0.048787314 | 0.011786659 |
| | GCAGATGATGCTTCGAG | | | |
| | GGTGGCTTTGAGGCCA | | | |
| 1481 | GTCCGAGAGGGCAGATT | N | 0.030220956 | 0.007817742 |
| | GCCTGAGGTCAGGAGTT | | | |
| | CAAGACCAGCCTGGGC | | | |
| 1482 | CCCGTGTTTCCTGGACC | N | 0.031203443 | 0.030897646 |
| | GCGAATCAGTGTGTTGG | | | |
| | GCATCAGTGTTTTCTG | | | |
| 1483 | CCCCAGCCCTAGCCCTTT | N | 0.037598251 | 0.043895851 |
| | AGCCTTTCACCCTGTGCT | | | |
| | CTGGAAAGGCTACC | | | |
| 1484 | GCTCAGACACTCTACAGC | N | 0.021753531 | 0.001450169 |
| | TGAGAGTAGACACTTGTG | | | |
| | GGAGGAGTCTGCTA | | | |
| 1485 | gcatgtgtatgatgtgtgtgcgtcggac | P | 0.022570565 | 0.007594639 |
| | cgcttctaggctactaagtgtc | | | |
| 1486 | AGGCTGCGGTGTCTGCT | N | 0.018173556 | 0.007361403 |
| | GCTACTCTCCGAGCTTCG | | | |
| | CAATGCCGCCCAAGG | | | |
| 1487 | CTCAAGGCCAAGCTCAC | N | 0.012247632 | 0.008829978 |
| | CCCTCAAGTGCTCTCACA | | | |
| | CTCGGGACCTAATTC | | | |
| 1488 | GGGCACCCCTCAAACTC | N | 0.006386641 | 0.010414346 |
| | AGTCATGTGGTTCCAAAC | | | |
| | TACCCCATTCCCCAC | | | |
| 1489 | CACTACCACATTCCAGTC | N | 0.021438733 | 0.000138524 |
| | TTTTAAGTCCGCTGGGGG | | | |
| | CCGAACAGCAGTGC | | | |
| 1490 | GAGTGGCGGCACCTTTG | P | 0.048190161 | 0.011886772 |
| | GCACATTCATGGCCATTG | | | |
| | GGATGGGCATCCGAT | | | |
| 1491 | GAGCCACCATCTACTGG | P | 0.009598215 | 0.022580225 |
| | GTGCTTCTCCTGAGTGTG | | | |
| | ACAGTGTAGGCTGGG | | | |
| 1492 | ACAAGGCACCTGCATTCA | P | 0.002522633 | 0.00095494 |
| | CAGGCGGCCCTGAGCAC | | | |
| | CTGGGTTCTGACTTT | | | |
| 1493 | TTGCACGTGTGGTAAGCA | N | 0.017604944 | 0.015904613 |
| | TAGGCTTGAAGAGGTGG | | | |
| | GTAGGCAGGTACATG | | | |
| 1494 | GCGGCAGCTGACAGAAA | N | 0.037070829 | 0.000166873 |
| | TATATGGTGGTCTCTCTG | | | |
| | CAGGGGAGTTCCAGC | | | |
| 1495 | TTGCCAAAGTCCCGCTGC | P | 0.015821535 | 0.034938843 |
| | CCCTGGTGCCGCTGACC | | | |
| | AAACAGCAGTACCTA | | | |
| 1496 | AGCAGACTGAGGAGGGA | N | 0.026840655 | 0.021201906 |
| | GGAGACGAGGTTCTCTT | | | |
| | GGCATCACTTTCTCCC | | | |
| 1497 | ACAGCTTCCCAAGCCCCA | P | 0.03139876 | 0.005309371 |
| | TCAATAAAGCCCCTGTTC | | | |
| | ACGCTGCACTGGTG | | | |
| 1498 | CTGGGCTGTGGTATTTGG | N | 0.003942079 | 0.013674087 |
| | GTGATCTTTACATTCTTCA | | | |
| | GACTCATGTGTGT | | | |
| 1499 | TGGGGCTCAGGGCCTCT | P | 0.029939558 | 0.008207084 |
| | TTACCATGTGCAGTGACC | | | |
| | ATTTCTCAGAGCAGG | | | |
| 1500 | TGCAGCTGTAACTGCTCA | P | 0.012944388 | 0.007396462 |
| | CGCCAAAATGGCTGATG | | | |
| | GGGAGGCTGCTGCTT | | | |
| 1501 | TGGTGGGAGCTTGTGGA | P | 0.03260228 | 0.012670114 |
| | GTCGGATCACGTACCTGT | | | |
| | GCAGAAACCGCCTCT | | | |
| 1502 | GTCAACAGGCCGGGCAC | N | 0.036596245 | 0.010321418 |
| | GGTGGCTCAGTTATTTCA | | | |
| | TCCTCAGCTGGGCTT | | | |
| 1503 | CCTTCCACCCGGACACG | P | 0.039100742 | 0.000627893 |
| | CGCAAGCCGATGCACAG | | | |
| | AGAGTGTGGCTTCATT | | | |
| 1504 | TGCCCTGTTATCTCCTAG | P | 0.017791927 | 0.010808553 |
| | TGCTAACAATACACTCCA | | | |
| | GTCATGAGCCGGGC | | | |
| 1505 | AGCATCACCTTCGCACTG | N | 0.024307434 | 0.00473334 |
| | AAGAGTGGAGAGAGTCT | | | |
| | ACTGGATGACTGGCC | | | |
| 1506 | GGAGCCCCCTCTGGGTG | P | 0.047136485 | 0.033788195 |
| | GACTGCGCTTCTTCTCAA | | | |
| | CACAATACAAGGACG | | | |
| 1507 | GCCCACTTCGATGTGTTG | P | 0.031714559 | 0.000919257 |
| | TTCTTGTCGCACTTAGGG | | | |
| | ACATCAATCAAGGA | | | |
| 1508 | GTGCCCGCGATAGGCTT | P | 0.047426696 | 0.012338529 |
| | CTCTGGTTTTGTCTTTGC | | | |
| | TGTTCCTGGCAGCGC | | | |
| 1509 | GCTCACACATACAAAAAC | N | 0.020972604 | 0.004031424 |
| | TAAGTTGCCTTTCCTTGA | | | |
| | ATGAACCCTGTCTG | | | |
| 1510 | CTGCCAAACAGAGCAGT | N | 0.035426044 | 0.007870835 |
| | GGGTGAAATGGTCCCAG | | | |
| | GGTGACATGTTAGATC | | | |
| 1511 | AACCCCGCTCTGCCGCC | P | 0.02800267 | 0.025723563 |
| | GCTGCTGGAACCCATGA | | | |
| | GGCGTGCTTGCAGGCT | | | |
| 1512 | GCCTTTTTTAACTTGAGG | P | 0.025167703 | 0.004034367 |
| | GTGTAGAGGTCCTCCAC | | | |
| | GCTTGTTTGCCTGAA | | | |
| 1513 | GGACCAGCTACAAAATCT | N | 0.023945397 | 0.02021854 |
| | TCAGGACCAGCTCAGAAT | | | |
| | GAAAATGCCGGGGC | | | |
| 1514 | GGGCCGAGATGGTTTGT | N | 0.03801362 | 0.017926508 |
| | CTTATGCCTATAGCTGTT | | | |
| | TATGTCCCACCAGTG | | | |
| 1515 | GACTGCAGGCTCCCCTT | N | 0.014037978 | 0.003176608 |
| | CCTGCACCACCATTGTCT | | | |
| | CAGCAGTAAAGGCGA | | | |
| 1516 | GCCAGCCTTCCTGGTCC | P | 0.035725567 | 0.012929448 |
| | CGATTGTTCCATTAAGCT | | | |
| | TTATCCTCACCTACC | | | |
| 1517 | GATCTGCCGTCACTGGG | P | 0.045667657 | 0.002298658 |
| | GTGGCAACATCCTGGGT | | | |
| | CCTAAGTCTGTGGCTC | | | |
| 1518 | CGGCTGACGAGCTACCT | P | 0.008935471 | 0.022499083 |
| | TACTGAGCATATTCCTGC | | | |
| | CTCTACACCAGAGAC | | | |
| 1519 | AGCAGCTGTTAGGGTCA | N | 0.04087459 | 0.020135815 |
| | GCAATTTCTCCGGCCAAC | | | |
| | TGTAGGAGGACTTGG | | | |
| 1520 | GGTGTGTTTCTTTGCTGG | P | 0.032019281 | 0.01375169 |
| | TCACACCCATGATGGTGG | | | |
| | CTACTCTGAGGATC | | | |
| 1521 | TGTTTGATCCACCCCCTT | N | 0.006035439 | 0.023062449 |
| | CCCTGAAAATCCTGGGA | | | |
| | GGTTTTATTGCTGCC | | | |
| 1522 | TCCCTGGGGGTTGGGGG | N | 0.044940574 | 0.0002559 |
| | CTGTGTCTCTCCATCCCT | | | |
| | TAGTAAAAATACAGC | | | |
| 1523 | GCAGTATCCAGTGAGTGA | N | 0.040441431 | 0.001224611 |
| | AGAACACTTGACTGACTC | | | |
| | TTGGGCCACCTCTG | | | |
| 1524 | TGGCCCCCAAGAAGGGA | N | 0.039751456 | 0.006887156 |
| | GACAGTTCTGCTGAAGAA | | | |
| | CTCGAACTGGATACT | | | |
| 1525 | CCTTAAAGGCCAAGAAG | N | 0.034682482 | 0.007146317 |
| | GCAGTGTTGAAAGGTGTC | | | |
| | CGCAGCCACACGCAA | | | |
| 1526 | TCTCCCTTTCCCATCTTG | N | 0.016471269 | 0.01357284 |
| | ACTTCTGGAATAGCCCTT | | | |
| | GCCAAATACCAGGG | | | |
| 1527 | GTGGTGGGCCAAGAACA | P | 0.019429179 | 0.002546118 |
| | GCCAGGCCAAAACCATT | | | |
| | GCCACGGAGTCTTGTC | | | |
| 1528 | TTCACATTGGCCAAGTTA | N | 0.031347949 | 0.024530823 |
| | TCATGTCCATCCACACCA | | | |
| | AGCTGCAGAACAAG | | | |
| 1529 | CCTGAGGGCCAGGAGGC | N | 0.021315115 | 3.57724E−05 |
| | TGGGACCTGGTTTGGGC | | | |
| | CAGAACTTCTTCATAA | | | |
| 1530 | CCAAAGGCACAGGCCAA | P | 0.021292259 | 0.003470759 |
| | GTTGTAGCTTTGTCCCTT | | | |
| | GCCATCATGCCCAAC | | | |
| 1531 | GTGATTCCTGCAACTTGA | P | 0.034130667 | 0.022954044 |
| | CCTTCAGGCTGGGAGAG | | | |
| | GTGGAGAGCCATGCC | | | |
| 1532 | GGCTGACATTGGGACTC | P | 0.046820644 | 0.02433559 |
| | CCCTTGGATTATCTTTGT | | | |
| | ATCAGGAGGGCCTCA | | | |
| 1533 | GCAATCACTACCTTTCTC | P | 0.011179677 | 0.010634337 |
| | GTTTCATTTGTGTAACCA | | | |
| | TGCAGCATAGGCAC | | | |
| 1534 | GGAGCAGCAGATGGCTC | P | 0.008462421 | 0.002925456 |
| | TCGGTTCCAGGTGTGGG | | | |
| | ACTATGAGGAGGGAGA | | | |
| 1535 | ACGCCCGCAGTCCCTCA | N | 0.025340155 | 0.031897996 |
| | TCAGCAATTCCCAAGCTC | | | |
| | CAAAGCTCCCTGGAA | | | |
| 1536 | GGAGCTAAGCAGCCTTA | P | 0.007970077 | 0.002394201 |
| | GATAGCAGCAGAAGGCT | | | |
| | TTTTGGATTCTCCTCC | | | |
| 1537 | GAGGTCAGGAGTTCAAAA | N | 0.020686819 | 0.00982343 |
| | CCAGCCTGGCCAACATG | | | |
| | GCGAAATCCTGTCTG | | | |
| 1538 | CCTCAGCTGCGAGGTTT | P | 0.044045119 | 0.012424261 |
| | GGACCTTGAGGCTTGGA | | | |
| | TGAGGGAATTTTTCCC | | | |

TABLE 2
312 Positive and Negative Predictor Genes of GVHD Outcome and Exemplary Probes

| Index | ProbeID | Accession no. | Gene name | Symbol | Synonyms |
|---|---|---|---|---|---|
| 1 | 380575 | NM_000978.3 | ribosomal protein L23 | RPL23 | MGC117346; rpL17; |
| | | | (RPL23), mRNA. | | MGC111167; MGC72008 |
| 2 | 940398 | NM_006360.3 | eukaryotic translation | EIF3M | FLJ29030; GA17; hfl-B5; |
| | | | initiation factor 3, subunit M | | eIF3m; PCID1; B5 |
| | | | (EIF3M), mRNA. | | |
| 3 | 990315 | NM_030752.2 | t-complex 1 (TCP1), | TCP1 | TCP-1-alpha; CCT-alpha; |
| | | | transcript variant 1, mRNA. | | CCT1; D6S230E; CCTa |
| 4 | 1240136 | NM_199345.3 | phosphatidylinositol 4- | PI4KAP2 | FLJ44912; MGC31920 |
| | | | kinase, catalytic, alpha | | |
| | | | polypeptide pseudogene 2 | | |
| | | | (PI4KAP2), mRNA. | | |
| 5 | 1820482 | NM_004548.1 | NADH dehydrogenase | NDUFB10 | PDSW |
| | | | (ubiquinone) 1 beta | | |
| | | | subcomplex, 10, 22 kDa | | |
| | | | (NDUFB10), mRNA. | | |
| 6 | 1850288 | NM_014153.2 | zinc finger CCCH-type | ZC3H7A | HSPC055; ZC3HDC7; |
| | | | containing 7A (ZC3H7A), | | ZC3H7; FLJ20318; |
| | | | mRNA. | | FLJ10027 |
| 7 | 2940022 | NM_000712.3 | biliverdin reductase A | BLVRA | BVRA; BLVR |
| | | | (BLVRA), mRNA. | | |
| 8 | 3370164 | NM_000701.6 | ATPase, Na+/K+ | ATP1A1 | MGC3285; MGC51750 |
| | | | transporting, alpha 1 | | |
| | | | polypeptide (ATP1A1), | | |
| | | | transcript variant 1, mRNA. | | |
| 9 | 3440400 | NM_020698.1 | transmembrane and coiled- | TMCC3 | KIAA1145 |
| | | | coil domain family 3 | | |
| | | | (TMCC3), mRNA. | | |
| 10 | 3450148 | NM_170734.2 | brain-derived neurotrophic | BDNF | MGC34632 |
| | | | factor (BDNF), transcript | | |
| | | | variant 6, mRNA. | | |
| 11 | 3780450 | NM_079837.2 | BTG3 associated nuclear | BANP | DKFZp761H172; |
| | | | protein (BANP), transcript | | FLJ10177; SMAR1; |
| | | | variant 2, mRNA. | | SMARBP1; FLJ20538 |
| 12 | 4200575 | NM_014232.1 | vesicle-associated | VAMP2 | SYB2; VAMP-2; FLJ11460 |
| | | | membrane protein 2 | | |
| | | | (synaptobrevin 2) (VAMP2), | | |
| | | | mRNA. | | |
| 13 | 4640689 | NM_001967.3 | eukaryotic translation | EIF4A2 | DDX2B; BM-010; EIF4A; |
| | | | initiation factor 4A, isoform | | EIF4F |
| | | | 2 (EIF4A2), mRNA. | | |
| 14 | 5220196 | NM_006565.2 | CCCTC-binding factor (zinc | CTCF | — |
| | | | finger protein) (CTCF), | | |
| | | | mRNA. | | |
| 15 | 5870632 | NM_004800.1 | transmembrane 9 | TM9SF2 | P76; MGC117391; |
| | | | superfamily member 2 | | FLJ26287 |
| | | | (TM9SF2), mRNA. | | |
| 16 | 6290392 | NM_005839.3 | serine/arginine repetitive | SRRM1 | SRM160; 160-KD; |
| | | | matrix 1 (SRRM1), mRNA. | | POP101; MGC39488 |
| 17 | 6380008 | NM_025209.2 | enhancer of polycomb | EPC1 | Epl1; DKFZp781P2312 |
| | | | homolog 1 (Drosophila) | | |
| | | | (EPC1), mRNA. | | |
| 18 | 6380427 | NM_202468.1 | GIPC PDZ domain | GIPC1 | IIP-1; TIP-2; GLUT1CBP; |
| | | | containing family, member 1 | | C19orf3; RGS19IP1; |
| | | | (GIPC1), transcript variant | | Hs.6454; SYNECTIIN; |
| | | | 3, mRNA. | | MGC15889; NIP; |
| | | | | | MGC3774; SEMCAP; GIPC |
| 19 | 6580553 | NM_005688.2 | ATP-binding cassette, sub- | ABCC5 | MOAT-C; pABC11; ABC33; |
| | | | family C (CFTR/MRP), | | MRP5; SMRP; EST277145; |
| | | | member 5 (ABCC5), | | DKFZp686C1782; MOATC |
| | | | transcript variant 1, mRNA. | | |
| 20 | 7210128 | NM_024408.2 | Notch homolog 2 | NOTCH2 | hN2; AGS2 |
| | | | (Drosophila) (NOTCH2), | | |
| | | | mRNA. | | |
| 21 | 10504 | NM_031950.2 | fibroblast growth factor | FGFBP2 | KSP37 |
| | | | binding protein 2 (FGFBP2), | | |
| | | | mRNA. | | |
| 22 | 20010 | NM_001014438.1 | cysteinyl-tRNA synthetase | CARS | CARS1; CYSRS; |
| | | | (CARS), transcript variant 4, | | MGC: 11246 |
| | | | mRNA. | | |
| 23 | 20056 | NM_003295.1 | tumor protein, | TPT1 | TCTP; p02; HRF; |
| | | | translationally-controlled 1 | | FLJ27337 |
| | | | (TPT1), mRNA. | | |
| 24 | 60053 | NM_000975.2 | ribosomal protein L11 | RPL11 | GIG34 |
| | | | (RPL11), mRNA. | | |
| 25 | 60397 | NR_001449.1 | tRNA lysine 1 (TRK1) on | TRK1 | — |
| | | | chromosome 17. | | |
| 26 | 70008 | NM_000433.2 | neutrophil cytosolic factor 2 | NCF2 | p67phox; NOXA2; P67- |
| | | | (65 kDa, chronic | | PHOX |
| | | | granulomatous disease, | | |
| | | | autosomal 2) (NCF2), | | |
| | | | mRNA. | | |
| 27 | 270544 | NM_003297.1 | nuclear receptor subfamily | NR2C1 | TR2-11; TR2 |
| | | | 2, group C, member 1 | | |
| | | | (NR2C1), transcript variant | | |
| | | | 1, mRNA. | | |
| 28 | 450195 | NM_001788.4 | septin 7 (SEPT7), transcript | SEPT7 | Nbla02942; CDC10; |
| | | | variant 1, mRNA. | | SEPT7A; CDC3 |
| 29 | 450431 | NM_199424.1 | WW domain containing E3 | WWP2 | WWp2-like; AIP2 |
| | | | ubiquitin protein ligase 2 | | |
| | | | (WWP2), transcript variant | | |
| | | | 2, mRNA. | | |
| 30 | 450615 | NM_005953.2 | metallothionein 2A (MT2A), | MT2A | MT2 |
| | | | mRNA. | | |
| 31 | 450762 | NM_021642.2 | Fc fragment of IgG, low | FCGR2A | FCGR2A1; CDw32; |
| | | | affinity IIa, receptor (CD32) | | CD32A; CD32; FcGR; |
| | | | (FCGR2A), mRNA. | | FCG2; IGFR2; FCGR2; |
| | | | | | MGC30032; MGC23887 |
| 32 | 460411 | NM_006390.2 | importin 8 (IPO8), mRNA. | IPO8 | FLJ26580; RANBP8 |
| 33 | 460750 | NM_024065.3 | phosducin-like 3 (PDCL3), | PDCL3 | VIAF1; HTPHLP; |
| | | | mRNA. | | MGC3062 |
| 34 | 520133 | NM_001005849.1 | SMT3 suppressor of mif two | SUMO2 | SMT3H2; HSMT3; |
| | | | 3 homolog 2 (S. cerevisiae) | | MGC117191; SMT3B |
| | | | (SUMO2), transcript variant | | |
| | | | 2, mRNA. | | |
| 35 | 520392 | NM_023914.2 | purinergic receptor P2Y, G- | P2RY13 | P2Y13; FKSG77; SP174; |
| | | | protein coupled, 13 | | GPR94; GPCR1; GPR86 |
| | | | (P2RY13), transcript variant | | |
| | | | 1, mRNA. | | |
| 36 | 580255 | NM_001624.2 | absent in melanoma 1 | AIM1 | ST4 |
| | | | (AIM1), mRNA. | | |
| 37 | 610014 | NM_003541.2 | histone cluster 1, H4k | HIST1H4K | dJ160A22.1; H4/d; H4FD; |
| | | | (HIST1H4K), mRNA. | | H4F2iii |
| 38 | 610309 | NM_207115.1 | zinc finger protein 580 | ZNF580 | — |
| | | | (ZNF580), transcript variant | | |
| | | | 2, mRNA. | | |
| 39 | 610670 | NM_145805.1 | ISL LIM homeobox 2 | ISL2 | FLJ10160 |
| | | | (ISL2), mRNA. | | |
| 40 | 620047 | NM_004331.2 | BCL2/adenovirus E1B | BNIP3L | BNIP3a; NIX |
| | | | 19 kDa interacting protein 3- | | |
| | | | like (BNIP3L), mRNA. | | |
| 41 | 630403 | NM_005830.2 | mitochondrial ribosomal | MRPS31 | MRP-S31; IMOGN38 |
| | | | protein S31 (MRPS31), | | |
| | | | nuclear gene encoding | | |
| | | | mitochondrial protein, | | |
| | | | mRNA. | | |
| 42 | 630706 | NM_144653.3 | BTB (POZ) domain | BTBD14A | BTBD14; MGC23427 |
| | | | containing 14A (BTBD14A), | | |
| | | | mRNA. | | |
| 43 | 670255 | NM_001924.2 | growth arrest and DNA- | GADD45A | GADD45; DDIT1 |
| | | | damage-inducible, alpha | | |
| | | | (GADD45A), mRNA. | | |
| 44 | 780603 | NR_002305.1 | protein disulfide isomerase | PDIA3P | ERp60; GRP58P |
| | | | family A, member 3 | | |
| | | | pseudogene (PDIA3P) on | | |
| | | | chromosome 1. | | |
| 45 | 830041 | NM_001005193.1 | olfactory receptor, family 7, | OR7G2 | OST260; OR19-6 |
| | | | subfamily G, member 2 | | |
| | | | (OR7G2), mRNA. | | |
| 46 | 830619 | NM_004083.4 | DNA-damage-inducible | DDIT3 | MGC4154; CEBPZ; |
| | | | transcript 3 (DDIT3), | | CHOP10; CHOP; |
| | | | mRNA. | | GADD153 |
| 47 | 870082 | NM_012402.2 | ADP-ribosylation factor | ARFIP2 | POR1 |
| | | | interacting protein 2 | | |
| | | | (arfaptin 2) (ARFIP2), | | |
| | | | mRNA. | | |
| 48 | 990056 | NM_020706.1 | splicing factor, | SFRS15 | SCAF4; DKFZP434E098; |
| | | | arginine/serine-rich 15 | | FLJ23364; SRA4; |
| | | | (SFRS15), mRNA. | | KIAA1172 |
| 49 | 990273 | NM_000998.4 | ribosomal protein L37a | RPL37A | MGC74786 |
| | | | (RPL37A), mRNA. | | |
| 50 | 990543 | NM_004768.2 | splicing factor, | SFRS11 | DKFZp686M13204; |
| | | | arginine/serine-rich 11 | | dJ677H15.2; p54 |
| | | | (SFRS11), mRNA. | | |
| 51 | 1030431 | NM_001995.2 | acyl-CoA synthetase long- | ACSL1 | FACL2; LACS; FACL1; |
| | | | chain family member 1 | | ACS1; LACS2; LACS1 |
| | | | (ACSL1), mRNA. | | |
| 52 | 1050408 | NM_005678.3 | SNRPN upstream reading | SNURF | — |
| | | | frame (SNURF), transcript | | |
| | | | variant 1, mRNA. | | |
| 53 | 1050762 | NM_003844.2 | tumor necrosis factor | TNFRSF10A | TRAILR1; MGC9365; |
| | | | receptor superfamily, | | APO2; DR4; CD261; |
| | | | member 10a | | TRAILR-1 |
| | | | (TNFRSF10A), mRNA. | | |
| 54 | 1070373 | NM_001012994.1 | sorting nexin family member | SNX30 | FLJ35589; FLJ46877; |
| | | | 30 (SNX30), mRNA. | | FLJ45069; FLJ26481; |
| | | | | | FLJ44686; FLJ34280 |
| 55 | 1070435 | NM_201433.1 | growth arrest-specific 7 | GAS7 | MGC1348; MLL/GAS7; |
| | | | (GAS7), transcript variant c, | | KIAA0394 |
| | | | mRNA. | | |
| 56 | 1070593 | NM_007246.2 | kelch-like 2, Mayven | KLHL2 | ABP-KELCH; MAV; |
| | | | (Drosophila) (KLHL2), | | MAYVEN |
| | | | mRNA. | | |
| 57 | 1090474 | NM_000073.1 | CD3g molecule, gamma | CD3G | MGC138597; CD3- |
| | | | (CD3-TCR complex) | | GAMMA; T3G |
| | | | (CD3G), mRNA. | | |
| 58 | 1170300 | NM_005950.1 | metallothionein 1G (MT1G), | MT1G | MT1; MT1K; MGC12386 |
| | | | mRNA. | | |
| 59 | 1170332 | NM_014911.3 | AP2 associated kinase 1 | AAK1 | DKFZp686K16132; |
| | | | (AAK1), mRNA. | | MGC164568; FLJ45252; |
| | | | | | FLJ23712; FLJ25931; |
| | | | | | KIAA1048; FLJ42882; |
| | | | | | DKFZp686F03202; |
| | | | | | MGC164570; FLJ31060; |
| | | | | | MGC138170 |
| 60 | 1230292 | NM_080651.1 | mediator complex subunit | MED30 | TRAP25; MGC9890; |
| | | | 30 (MED30), mRNA. | | MED30; THRAP6 |
| 61 | 1240064 | NM_012482.3 | zinc finger protein 281 | ZNF281 | FLJ12859; ZNP-99; ZBP- |
| | | | (ZNF281), mRNA. | | 99; FLJ14378 |
| 62 | 1240142 | NM_017654.2 | sterile alpha motif domain | SAMD9 | KIAA2004; C7orf5; OEF1; |
| | | | containing 9 (SAMD9), | | FLJ20073; NFTC; OEF2 |
| | | | mRNA. | | |
| 63 | 1240192 | NM_001319.5 | casein kinase 1, gamma 2 | CSNK1G2 | CK1g2 |
| | | | (CSNK1G2), mRNA. | | |
| 64 | 1260136 | NM_001080497.1 | multiple EGF-like-domains | MEGF9 | EGFL5 |
| | | | 9 (MEGF9), mRNA. | | |
| 65 | 1340537 | NM_001001655.1 | alkB, alkylation repair | ALKBH2 | ABH2; MGC90512; hABH2 |
| | | | homolog 2 (E. coli) | | |
| | | | (ALKBH2), mRNA. | | |
| 66 | 1410068 | NM_019884.2 | glycogen synthase kinase 3 | GSK3A | DKFZp686D0638 |
| | | | alpha (GSK3A), mRNA. | | |
| 67 | 1410168 | NM_001421.2 | E74-like factor 4 (ets | ELF4 | MEF; ELFR |
| | | | domain transcription factor) | | |
| | | | (ELF4), mRNA. | | |
| 68 | 1410221 | NM_005621.1 | S100 calcium binding | S100A12 | CAAF1; CAGC; ENRAGE; |
| | | | protein A12 (S100A12), | | p6; CGRP; MRP6 |
| | | | mRNA. | | |
| 69 | 1410411 | NM_182710.1 | HIV-1 Tat interacting | HTATIP | ESA1; TIP60; TIP; PLIP; |
| | | | protein, 60 kDa (HTATIP), | | HTATIP1; cPLA2 |
| | | | transcript variant 1, mRNA. | | |
| 70 | 1430347 | NM_001076785.1 | solute carrier family 7 | SLC7A6 | DKFZp686K15246; |
| | | | (cationic amino acid | | KIAA0245; LAT3; LAT-2; |
| | | | transporter, y+ system), | | y+LAT-2 |
| | | | member 6 (SLC7A6), | | |
| | | | transcript variant 2, mRNA. | | |
| 71 | 1440296 | NM_005324.3 | H3 histone, family 3B | H3F3B | H3F3A; H3.3B |
| | | | (H3.3B) (H3F3B), mRNA. | | |
| 72 | 1440747 | NM_003544.2 | histone cluster 1, H4b | HIST1H4B | H4FI; H4/I |
| | | | (HIST1H4B), mRNA. | | |
| 73 | 1470209 | NM_019026.2 | transmembrane and coiled- | TMCO1 | HP10122; TMCC4; RP11- |
| | | | coil domains 1 (TMCO1), | | 466F5.7; PCIA3; PNAS-136 |
| | | | mRNA. | | |
| 74 | 1510538 | NM_012307.2 | erythrocyte membrane | EPB41L3 | DAL-1; KIAA0987; 4.1B; |
| | | | protein band 4.1-like 3 | | FLJ37633; DAL1 |
| | | | (EPB41L3), mRNA. | | |
| 75 | 1570575 | NM_014574.3 | striatin, calmodulin binding | STRN3 | SG2NA |
| | | | protein 3 (STRN3), | | |
| | | | transcript variant 2, mRNA. | | |
| 76 | 1660687 | NM_001018089.1 | NMDA receptor regulated 2 | NARG2 | BRCC1 |
| | | | (NARG2), transcript variant | | |
| | | | 2, mRNA. | | |
| 77 | 1690189 | NM_152453.2 | transmembrane and coiled- | TMCO5 | MGC35118; FLJ35807 |
| | | | coil domains 5 (TMCO5), | | |
| | | | mRNA. | | |
| 78 | 1740220 | NM_004038.3 | amylase, alpha 1A | AMY1A | AMY1; AMY1B |
| | | | (salivary) (AMY1A), | | |
| | | | transcript variant 1, mRNA. | | |
| 79 | 1770609 | NM_198486.2 | ribosomal protein L7-like 1 | RPL7L1 | MGC62004; dJ475N16.4 |
| | | | (RPL7L1), mRNA. | | |
| 80 | 1780273 | XM_001127464.1 | PREDICTED: arachidonate | ALOX5 | — |
| | | | 5-lipoxygenase (ALOX5), | | |
| | | | mRNA. | | |
| 81 | 1780647 | NM_052853.3 | aarF domain containing | ADCK2 | MGC20727; AARF |
| | | | kinase 2 (ADCK2), mRNA. | | |
| 82 | 1820544 | NM_182679.1 | G patch domain containing | GPATCH4 | GPATC4 |
| | | | 4 (GPATCH4), transcript | | |
| | | | variant 2, mRNA. | | |
| 83 | 1940041 | NM_000631.3 | neutrophil cytosolic factor 4, | NCF4 | SH3PXD4; P40PHOX; |
| | | | 40 kDa (NCF4), transcript | | NCF; MGC3810 |
| | | | variant 1, mRNA. | | |
| 84 | 1940053 | NM_001681.2 | ATPase, Ca++ transporting, | ATP2A2 | DAR; ATP2B; MGC45367; |
| | | | cardiac muscle, slow twitch | | DD; SERCA2 |
| | | | 2 (ATP2A2), transcript | | |
| | | | variant 2, mRNA. | | |
| 85 | 1980594 | NR_002203.1 | ferritin, heavy polypeptide- | FTHL8 | — |
| | | | like 8 (FTHL8) on | | |
| | | | chromosome X. | | |
| 86 | 1990278 | NM_021642.2 | Fc fragment of IgG, low | FCGR2A | FCGR2A1; CDw32; |
| | | | affinity IIa, receptor (CD32) | | CD32A; CD32; FcGR; |
| | | | (FCGR2A), mRNA. | | FCG2; IGFR2; FCGR2; |
| | | | | | MGC30032; MGC23887 |
| 87 | 2000010 | NM_006231.2 | polymerase (DNA directed), | POLE | DKFZp434F222; FLJ21434; |
| | | | epsilon (POLE), mRNA. | | POLE1 |
| 88 | 2000048 | NM_173683.3 | XK, Kell blood group | XKR6 | C8orf7; XRG6; C8orf21 |
| | | | complex subunit-related | | |
| | | | family, member 6 (XKR6), | | |
| | | | transcript variant 2, mRNA. | | |
| 89 | 2030243 | NM_013393.1 | FtsJ homolog 2 (E. coli) | FTSJ2 | FJH1; DKFZp686J14194 |
| | | | (FTSJ2), mRNA. | | |
| 90 | 2060291 | NM_004099.4 | stomatin (STOM), transcript | STOM | EPB7; EPB72; BND7 |
| | | | variant 1, mRNA. | | |
| 91 | 2070288 | NM_175617.3 | metallothionein 1E (MT1E), | MT1E | MT1; MTD |
| | | | mRNA. | | |
| 92 | 2100196 | NM_005101.1 | ISG15 ubiquitin-like modifier | ISG15 | G1P2; UCRP; IFI15 |
| | | | (ISG15), mRNA. | | |
| 93 | 2100273 | NM_001402.5 | eukaryotic translation | EEF1A1 | EEF1A; FLJ25721; CCS-3; |
| | | | elongation factor 1 alpha 1 | | PTI1; CCS3; MGC102687; |
| | | | (EEF1A1), mRNA. | | MGC16224; EF-Tu; eEF1A- |
| | | | | | 1; EEF-1; MGC131894; |
| | | | | | HNGC:16303; GRAF-1EF; |
| | | | | | LENG7; EF1A |
| 94 | 2100292 | NM_002893.2 | retinoblastoma binding | RBBP7 | RbAp46; MGC138867; |
| | | | protein 7 (RBBP7), mRNA. | | MGC138868 |
| 95 | 2140753 | NM_001034996.1 | ribosomal protein L14 | RPL14 | CAG-ISL-7; CTG-B33; L14; |
| | | | (RPL14), transcript variant | | MGC88594; RL14; hRL14 |
| | | | 1, mRNA. | | |
| 96 | 2230678 | NM_001093.3 | acetyl-Coenzyme A | ACACB | ACC2; ACCB; HACC275 |
| | | | carboxylase beta (ACACB), | | |
| | | | mRNA. | | |
| 97 | 2320053 | NM_024632.4 | SAP30-like (SAP30L), | SAP30L | FLJ11526; NS4ATP2 |
| | | | mRNA. | | |
| 98 | 2320139 | NM_002954.3 | ribosomal protein S27a | RPS27A | UBCEP1; UBA80; CEP80; |
| | | | (RPS27A), mRNA. | | HUBCEP80; UBCEP80 |
| 99 | 2320653 | NM_018281.2 | enoyl Coenzyme A | ECHDC2 | FLJ10948 |
| | | | hydratase domain | | |
| | | | containing 2 (ECHDC2), | | |
| | | | mRNA. | | |
| 100 | 2340626 | NM_016020.1 | transcription factor B1, | TFB1M | CGI75; mtTFB; CGI-75 |
| | | | mitochondrial (TFB1M), | | |
| | | | mRNA. | | |
| 101 | 2350192 | NM_018694.2 | ADP-ribosylation-like factor | ARL6IP4 | MGC814; SRp25; SR-25 |
| | | | 6 interacting protein 4 | | |
| | | | (ARL6IP4), transcript | | |
| | | | variant 1, mRNA. | | |
| 102 | 2350563 | NM_005791.1 | M-phase phosphoprotein 10 | MPHOSPH10 | MPP10P; MPP10 |
| | | | (U3 small nucleolar | | |
| | | | ribonucleoprotein) | | |
| | | | (MPHOSPH10), mRNA. | | |
| 103 | 2360528 | NM_182776.1 | minichromosome | MCM7 | MCM2; CDC47; P1.1- |
| | | | maintenance complex | | MCM3; P1CDC47; |
| | | | component 7 (MCM7), | | CDABP0042; P85MCM; |
| | | | transcript variant 2, mRNA. | | PNAS-146 |
| 104 | 2450446 | NM_015906.3 | tripartite motif-containing 33 | TRIM33 | FLJ32925; TIF1G; RFG7; |
| | | | (TRIM33), transcript variant | | PTC7; TF1G; TIF1GAMMA; |
| | | | a, mRNA. | | TIFGAMMA |
| 105 | 2480037 | NM_178868.3 | CKLF-like MARVEL | CMTM8 | CKLFSF8; CKLFSF8-V2 |
| | | | transmembrane domain | | |
| | | | containing 8 (CMTM8), | | |
| | | | mRNA. | | |
| 106 | 2480328 | NM_032361.1 | THO complex 3 (THOC3), | THOC3 | TEX1; MGC5469 |
| | | | mRNA. | | |
| 107 | 2480487 | NM_005819.4 | syntaxin 6 (STX6), mRNA. | STX6 | — |
| 108 | 2490333 | NM_207336.1 | zinc finger protein 467 | ZNF467 | EZI; Zfp467 |
| | | | (ZNF467), mRNA. | | |
| 109 | 2570100 | NM_019112.3 | ATP-binding cassette, sub- | ABCA7 | ABCA-SSN; ABCX; |
| | | | family A (ABC1), member 7 | | FLJ40025 |
| | | | (ABCA7), mRNA. | | |
| 110 | 2570288 | NM_015677.1 | SH3 domain containing, | SH3YL1 | FLJ39121; Ray; |
| | | | Ysc84-like 1 (S. cerevisiae) | | DKFZP586F1318 |
| | | | (SH3YL1), mRNA. | | |
| 111 | 2570328 | NM_021643.1 | tribbles homolog 2 | TRIB2 | TRB2; GS3955 |
| | | | (Drosophila) (TRIB2), | | |
| | | | mRNA. | | |
| 112 | 2600204 | NM_014016.2 | SAC1 suppressor of actin | SACM1L | KIAA0851; SAC1; |
| | | | mutations 1-like (yeast) | | DKFZp686A0231 |
| | | | (SACM1L), mRNA. | | |
| 113 | 2640541 | NM_006364.2 | Sec23 homolog A (S. cerevisiae) | SEC23A | CLSD; MGC26267 |
| | | | (SEC23A), | | |
| | | | mRNA. | | |
| 114 | 2640707 | XM_001130839.1 | PREDICTED: nuclear | NR1D2 | — |
| | | | receptor subfamily 1, group | | |
| | | | D, member 2 (NR1D2), | | |
| | | | mRNA. | | |
| 115 | 2680082 | NM_000971.3 | ribosomal protein L7 | RPL7 | MGC117326; humL7-1 |
| | | | (RPL7), mRNA. | | |
| 116 | 2690224 | NM_030980.1 | interferon stimulated | ISG20L2 | FLJ12671 |
| | | | exonuclease gene 20 kDa- | | |
| | | | like 2 (ISG20L2), mRNA. | | |
| 117 | 2710196 | NM_018428.2 | UTP6, small subunit (SSU) | UTP6 | HCA66; C17orf40 |
| | | | processome component, | | |
| | | | homolog (yeast) (UTP6), | | |
| | | | mRNA. | | |
| 118 | 2760537 | NM_175621.2 | metallothionein E (MTE), | MTE | MT1I |
| | | | mRNA. | | |
| 119 | 2970079 | NM_003274.3 | transmembrane protein 1 | TMEM1 | EHOC-1; MGC126777; |
| | | | (TMEM1), transcript variant | | EHOC1; GT334 |
| | | | 1, mRNA. | | |
| 120 | 2970594 | NM_138373.3 | myeloid-associated | MYADM | SB135 |
| | | | differentiation marker | | |
| | | | (MYADM), transcript variant | | |
| | | | 2, mRNA. | | |
| 121 | 3130600 | NM_007048.4 | butyrophilin, subfamily 3, | BTN3A1 | BT3.1; CD277; |
| | | | member A1 (BTN3A1), | | MGC141880; BTF5 |
| | | | mRNA. | | |
| 122 | 3140041 | NM_007237.3 | SP140 nuclear body protein | SP140 | MGC126440; LYSP100-B; |
| | | | (SP140), transcript variant | | LYSP100-A |
| | | | 1, mRNA. | | |
| 123 | 3170440 | NM_022893.2 | B-cell CLL/lymphoma 11A | BCL11A | BCL11A-L; CTIP1; |
| | | | (zinc finger protein) | | FLJ10173; EVI9; BCL11A- |
| | | | (BCL11A), transcript variant | | XL; BCL11A-S; FLJ34997; |
| | | | 1, mRNA. | | KIAA1809 |
| 124 | 3170451 | NM_024815.3 | nudix (nucleoside | NUDT18 | FLJ22494 |
| | | | diphosphate linked moiety | | |
| | | | X)-type motif 18 (NUDT18), | | |
| | | | mRNA. | | |
| 125 | 3180273 | NM_020315.4 | pyridoxal (pyridoxine, | PDXP | CIN; FLJ32703; PLP; |
| | | | vitamin B6) phosphatase | | dJ37E16.5 |
| | | | (PDXP), mRNA. | | |
| 126 | 3190133 | NR_002205.1 | ferritin, heavy polypeptide- | FTHL12 | — |
| | | | like 12 (FTHL12) on | | |
| | | | chromosome 9. | | |
| 127 | 3310546 | NM_001950.3 | E2F transcription factor 4, | E2F4 | E2F-4 |
| | | | p107/p130-binding (E2F4), | | |
| | | | mRNA. | | |
| 128 | 3370474 | NM_013368.2 | SERTA domain containing | SERTAD3 | RBT1 |
| | | | 3 (SERTAD3), transcript | | |
| | | | variant 1, mRNA. | | |
| 129 | 3450278 | NM_172232.1 | ATP-binding cassette, sub- | ABCA5 | FLJ16381; |
| | | | family A (ABC1), member 5 | | DKFZp779N2435; |
| | | | (ABCA5), transcript variant | | DKFZp451F117; |
| | | | 2, mRNA. | | EST90625; ABC13 |
| 130 | 3450463 | NM_183376.1 | arrestin domain containing | ARRDC4 | FLJ36045 |
| | | | 4 (ARRDC4), mRNA. | | |
| 131 | 3450537 | NM_032564.2 | diacylglycerol O- | DGAT2 | HMFN1045; |
| | | | acyltransferase homolog 2 | | DKFZp686A15125 |
| | | | (mouse) (DGAT2), mRNA. | | |
| 132 | 3520093 | NM_021070.2 | latent transforming growth | LTBP3 | FLJ44138; FLJ42533; |
| | | | factor beta binding protein 3 | | FLJ39893; LTBP-3; |
| | | | (LTBP3), mRNA. | | pp6425; FLJ33431; LTBP2; |
| | | | | | DKFZP586M2123 |
| 133 | 3520598 | NM_019858.1 | G protein-coupled receptor | GPR162 | GRCA; A-2 |
| | | | 162 (GPR162), transcript | | |
| | | | variant A-2, mRNA. | | |
| 134 | 3610630 | NM_016302.2 | cereblon (CRBN), mRNA. | CRBN | MGC27358; |
| | | | | | DKFZp781K0715; MRT2A |
| 135 | 3710735 | NM_153819.1 | RAS guanyl releasing | RASGRP2 | CDC25L; CALDAG-GEFI |
| | | | protein 2 (calcium and | | |
| | | | DAG-regulated) | | |
| | | | (RASGRP2), transcript | | |
| | | | variant 2, mRNA. | | |
| 136 | 3780544 | NM_016047.3 | splicing factor 3B, 14 kDa | SF3B14 | Ht006; SF3B14a; SAP14; |
| | | | subunit (SF3B14), mRNA. | | CGI-110; HSPC175; P14 |
| 137 | 3800576 | NM_080914.1 | asialoglycoprotein receptor | ASGR2 | L-H2; CLEC4H2; Hs.1259; |
| | | | 2 (ASGR2), transcript | | ASGP-R |
| | | | variant 3, mRNA. | | |
| 138 | 3830273 | NM_020202.2 | nitrilase family, member 2 | NIT2 | MGC111199 |
| | | | (NIT2), mRNA. | | |
| 139 | 3830653 | NM_006736.5 | DnaJ (Hsp40) homolog, | DNAJB2 | HSPF3; HSJ1 |
| | | | subfamily B, member 2 | | |
| | | | (DNAJB2), transcript variant | | |
| | | | 2, mRNA. | | |
| 140 | 3850059 | NM_005574.2 | LIM domain only 2 | LMO2 | TTG2; RBTN2; RBTNL1; |
| | | | (rhombotin-like 1) (LMO2), | | RHOM2 |
| | | | mRNA. | | |
| 141 | 3890689 | NM_198053.1 | CD247 molecule (CD247), | CD247 | CD3Q; CD3H; TCRZ; |
| | | | transcript variant 1, mRNA. | | CD3Z; CD3-ZETA |
| 142 | 3930133 | NM_199004.1 | arrestin, beta 2 (ARRB2), | ARRB2 | ARR2; ARB2; |
| | | | transcript variant 2, mRNA. | | DKFZp686L0365 |
| 143 | 3930392 | NM_001097577.1 | angiogenin, ribonuclease, | ANG | RNASE5; MGC22466; |
| | | | RNase A family, 5 (ANG), | | RNASE4; MGC71966 |
| | | | transcript variant 2, mRNA. | | |
| 144 | 3940138 | NM_001009944.1 | polycystic kidney disease 1 | PKD1 | PBP |
| | | | (autosomal dominant) | | |
| | | | (PKD1), transcript variant 1, | | |
| | | | mRNA. | | |
| 145 | 3940358 | NM_001003712.1 | oxysterol binding protein- | OSBPL8 | MSTP120; ORP8; MST120; |
| | | | like 8 (OSBPL8), transcript | | MGC126578; |
| | | | variant 2, mRNA. | | DKFZp686A11164; |
| | | | | | OSBP10; MGC133203 |
| 146 | 3990112 | NM_001042445.1 | calpastatin (CAST), | CAST | MGC9402; BS-17 |
| | | | transcript variant 11, | | |
| | | | mRNA. | | |
| 147 | 4010400 | NM_002480.1 | protein phosphatase 1, | PPP1R12A | MGC133042; MYPT1; MBS |
| | | | regulatory (inhibitor) subunit | | |
| | | | 12A (PPP1R12A), mRNA. | | |
| 148 | 4040088 | NM_152772.1 | t-complex 11 (mouse)-like 2 | TCP11L2 | MGC40368 |
| | | | (TCP11L2), mRNA. | | |
| 149 | 4120039 | NR_002200.1 | ferritin, heavy polypeptide- | FTHL2 | — |
| | | | like 2 (FTHL2) on | | |
| | | | chromosome 1. | | |
| 150 | 4120341 | NM_002208.4 | integrin, alpha E (antigen | ITGAE | HUMINAE; CD103; |
| | | | CD103, human mucosal | | MGC141996 |
| | | | lymphocyte antigen 1; alpha | | |
| | | | polypeptide) (ITGAE), | | |
| | | | mRNA. | | |
| 151 | 4150132 | NM_017514.2 | plexin A3 (PLXNA3), | PLXNA3 | XAP-6; HSSEXGENE; |
| | | | mRNA. | | PLEXIN-A3; PLXN4; SEX; |
| | | | | | PLXN3; 6.3 |
| 152 | 4200068 | NM_016553.3 | nucleoporin 62 kDa | NUP62 | FLJ43869; DKFZp547L134; |
| | | | (NUP62), transcript variant | | MGC841; p62; SNDI; IBSN; |
| | | | 2, mRNA. | | FLJ20822 |
| 153 | 4210465 | NM_006889.3 | CD86 molecule (CD86), | CD86 | B7-2; B70; LAB72; |
| | | | transcript variant 2, mRNA. | | MGC34413; CD28LG2 |
| 154 | 4220468 | NM_001001787.1 | ATPase, Na+/K+ | ATP1B1 | MGC1798; ATP1B |
| | | | transporting, beta 1 | | |
| | | | polypeptide (ATP1B1), | | |
| | | | transcript variant 2, mRNA. | | |
| 155 | 4220632 | XM_001133534.1 | PREDICTED: ATPase, | ATP1B3 | — |
| | | | Na+/K+ transporting, beta 3 | | |
| | | | polypeptide, transcript | | |
| | | | variant 2 (ATP1B3), mRNA. | | |
| 156 | 4220672 | NM_005949.2 | metallothionein 1F (MT1F), | MT1F | MT1; MGC32732 |
| | | | mRNA. | | |
| 157 | 4220731 | NM_000917.2 | procollagen-proline, 2- | P4HA1 | P4HA; 4-PH alpha-1 |
| | | | oxoglutarate 4-dioxygenase | | |
| | | | (proline 4-hydroxylase), | | |
| | | | alpha polypeptide I | | |
| | | | (P4HA1), transcript variant | | |
| | | | 1, mRNA. | | |
| 158 | 4230093 | NM_001171.3 | ATP-binding cassette, sub- | ABCC6 | MOATE; EST349056; ARA; |
| | | | family C (CFTR/MRP), | | PXE1; ABC34; PXE; MLP1; |
| | | | member 6 (ABCC6), | | MRP6 |
| | | | transcript variant 1, mRNA. | | |
| 159 | 4230097 | NM_002128.4 | high-mobility group box 1 | HMGB1 | DKFZp686A04236; HMG3; |
| | | | (HMGB1), mRNA. | | SBP-1; HMG1 |
| 160 | 4230619 | NM_012198.2 | grancalcin, EF-hand | GCA | GCL |
| | | | calcium binding protein | | |
| | | | (GCA), mRNA. | | |
| 161 | 4250768 | NM_004645.2 | coilin (COIL), mRNA. | COIL | p80-coilin; CLN80 |
| 162 | 4260221 | NM_145911.1 | zinc finger protein 23 (KOX | ZNF23 | KOX16; Zfp612; ZNF359; |
| | | | 16) (ZNF23), mRNA. | | ZNF612 |
| 163 | 4280162 | NM_024041.2 | sodium channel modifier 1 | SCNM1 | MGC3180 |
| | | | (SCNM1), mRNA. | | |
| 164 | 4390301 | NM_016113.3 | transient receptor potential | TRPV2 | VRL; VRL-1; MGC12549; |
| | | | cation channel, subfamily V, | | VRL1 |
| | | | member 2 (TRPV2), | | |
| | | | mRNA. | | |
| 165 | 4490242 | NM_006256.2 | protein kinase N2 (PKN2), | PKN2 | PRO2042; PAK2; Pak-2; |
| | | | mRNA. | | PRKCL2; MGC150606; |
| | | | | | MGC71074; PRK2 |
| 166 | 4640220 | NM_145113.1 | MYC associated factor X | MAX | MGC34679; MGC36767; |
| | | | (MAX), transcript variant 3, | | MGC11225; MGC10775; |
| | | | mRNA. | | orf1; MGC18164 |
| 167 | 4670601 | NM_022804.2 | SNRPN upstream reading | SNURF | — |
| | | | frame (SNURF), transcript | | |
| | | | variant 2, mRNA. | | |
| 168 | 4730148 | NM_004986.2 | kinectin 1 (kinesin receptor) | KTN1 | KIAA0004; MGC133337; |
| | | | (KTN1), transcript variant 4, | | MU-RMS-40.19; CG1; KNT |
| | | | mRNA. | | |
| 169 | 4730181 | NR_002205.1 | ferritin, heavy polypeptide- | FTHL12 | — |
| | | | like 12 (FTHL12) on | | |
| | | | chromosome 9. | | |
| 170 | 4760474 | NM_006000.1 | tubulin, alpha 4a (TUBA4A), | TUBA4A | TUBA1; H2-ALPHA; |
| | | | mRNA. | | FLJ30169 |
| 171 | 4780678 | NM_001079.3 | zeta-chain (TCR) | ZAP70 | FLJ17670; ZAP-70; TZK; |
| | | | associated protein kinase | | STD; FLJ17679; SRK |
| | | | 70 kDa (ZAP70), transcript | | |
| | | | variant 1, mRNA. | | |
| 172 | 4830113 | NM_016619.1 | placenta-specific 8 | PLAC8 | C15; onzin |
| | | | (PLAC8), mRNA. | | |
| 173 | 4850091 | NM_006331.5 | EMG1 nucleolar protein | EMG1 | Grcc2f; C2F; NEP1 |
| | | | homolog (S. cerevisiae) | | |
| | | | (EMG1), mRNA. | | |
| 174 | 4850327 | NM_016205.1 | platelet derived growth | PDGFC | SCDGF |
| | | | factor C (PDGFC), mRNA. | | |
| 175 | 4860209 | NM_173468.2 | MOB1, Mps One Binder | MOBKL1A | MOB4A; MGC33910; |
| | | | kinase activator-like 1A | | MATS2; Mob1B |
| | | | (yeast) (MOBKL1A), | | |
| | | | mRNA. | | |
| 176 | 4880215 | NM_001514.3 | general transcription factor | GTF2B | TFIIB; TF2B |
| | | | IIB (GTF2B), mRNA. | | |
| 177 | 4890722 | NM_006139.1 | CD28 molecule (CD28), | CD28 | Tp44; MGC138290 |
| | | | mRNA. | | |
| 178 | 4920347 | NM_016442.3 | endoplasmic reticulum | ERAP1 | APPILS; ALAP; PILSAP; |
| | | | aminopeptidase 1 (ERAP1), | | ERAP1; ERAAP; ARTS-1; |
| | | | transcript variant 1, mRNA. | | ERAAP1; KIAA0525; A- |
| | | | | | LAP; PILS-AP; ARTS1 |
| 179 | 5050156 | NM_004050.2 | BCL2-like 2 (BCL2L2), | BCL2L2 | KIAA0271; BCLW; BCL-W |
| | | | mRNA. | | |
| 180 | 5080246 | NM_003522.3 | histone cluster 1, H2bf | HIST1H2BF | H2B/g; H2BFG |
| | | | (HIST1H2BF), mRNA. | | |
| 181 | 5090288 | NM_171999.2 | sal-like 3 (Drosophila) | SALL3 | ZNF796 |
| | | | (SALL3), mRNA. | | |
| 182 | 5090307 | NM_153362.1 | protease, serine, 35 | PRSS35 | dJ223E3.1; MGC46520; |
| | | | (PRSS35), mRNA. | | C6orf158 |
| 183 | 5090397 | NM_206909.2 | pleckstrin and Sec7 domain | PSD3 | DKFZp761K1423; EFA6R; |
| | | | containing 3 (PSD3), | | HCA67 |
| | | | transcript variant 2, mRNA. | | |
| 184 | 5090450 | NM_004818.2 | DEAD (Asp-Glu-Ala-Asp) | DDX23 | U5-100K; prp28; PRPF28; |
| | | | box polypeptide 23 | | MGC8416 |
| | | | (DDX23), mRNA. | | |
| 185 | 5130750 | NM_002729.4 | hematopoietically | HHEX | HEX; PRH; PRHX; |
| | | | expressed homeobox | | HOX11L-PEN; HMPH |
| | | | (HHEX), mRNA. | | |
| 186 | 5270291 | NM_017811.3 | ubiquitin-conjugating | UBE2R2 | UBC3B; FLJ20419; |
| | | | enzyme E2R 2 (UBE2R2), | | MGC10481; CDC34B |
| | | | mRNA. | | |
| 187 | 5290369 | NM_032582.3 | ubiquitin specific peptidase | USP32 | USP10; NY-REN-60 |
| | | | 32 (USP32), mRNA. | | |
| 188 | 5290482 | NM_031943.1 | IFP38 (IFP38), mRNA. | IFP38 | — |
| 189 | 5360500 | NM_152246.1 | carnitine | CPT1B | CPT1-M; KIAA1670; M- |
| | | | palmitoyltransferase 1B | | CPT1 |
| | | | (muscle) (CPT1B), nuclear | | |
| | | | gene encoding | | |
| | | | mitochondrial protein, | | |
| | | | transcript variant 3, mRNA. | | |
| 190 | 5390433 | NM_030621.2 | Dicer1, Dcr-1 homolog | DICER1 | Dicer; HERNA; KIAA0928 |
| | | | (Drosophila) (DICER1), | | |
| | | | transcript variant 2, mRNA. | | |
| 191 | 5420575 | NM_001013251.1 | solute carrier family 3 | SLC3A2 | 4F2HC; CD98; 4F2; |
| | | | (activators of dibasic and | | CD98HC; 4T2HC; MDU1; |
| | | | neutral amino acid | | NACAE |
| | | | transport), member 2 | | |
| | | | (SLC3A2), transcript variant | | |
| | | | 6, mRNA. | | |
| 192 | 5490753 | NM_005467.2 | N-acetylated alpha-linked | NAALAD2 | MGC26353; MGC116996; |
| | | | acidic dipeptidase 2 | | NAALADASE2; |
| | | | (NAALAD2), mRNA. | | NAADALASE2 |
| 193 | 5550369 | NM_001125.2 | ADP-ribosylarginine | ADPRH | ARH1 |
| | | | hydrolase (ADPRH), | | |
| | | | mRNA. | | |
| 194 | 5670398 | NM_025191.2 | ER degradation enhancer, | EDEM3 | C1orf22 |
| | | | mannosidase alpha-like 3 | | |
| | | | (EDEM3), mRNA. | | |
| 195 | 5670682 | XM_943640.2 | PREDICTED: hypothetical | FLJ32255 | — |
| | | | protein LOC643977, | | |
| | | | transcript variant 2 | | |
| | | | (FLJ32255), mRNA. | | |
| 196 | 5810398 | NM_001080547.1 | spleen focus forming virus | SPI1 | SPI-A; OF; SFPI1; PU.1; |
| | | | (SFFV) proviral integration | | SPI-1 |
| | | | oncogene spi1 (SPI1), | | |
| | | | transcript variant 1, mRNA. | | |
| 197 | 5820068 | NM_032025.3 | eukaryotic translation | EIF2A | MSTP089; MSTP004; EIF- |
| | | | initiation factor 2A, 65 kDa | | 2A; CDA02; MST089 |
| | | | (EIF2A), mRNA. | | |
| 198 | 5820528 | NM_001077446.1 | tRNA splicing | TSEN34 | LENG5; SEN34; SEN34L |
| | | | endonuclease 34 homolog | | |
| | | | (S. cerevisiae) (TSEN34), | | |
| | | | transcript variant 2, mRNA. | | |
| 199 | 5860064 | NM_138782.1 | FCH domain only 2 | FCHO2 | — |
| | | | (FCHO2), mRNA. | | |
| 200 | 5870131 | NM_000492.3 | cystic fibrosis | CFTR | ABCC7; MRP7; TNR- |
| | | | transmembrane | | CFTR; CFTR/MRP; |
| | | | conductance regulator | | dJ760C5.1; CF; ABC35 |
| | | | (ATP-binding cassette sub- | | |
| | | | family C, member 7) | | |
| | | | (CFTR), mRNA. | | |
| 201 | 5890538 | NM_018708.2 | fem-1 homolog a (C. elegans) | FEM1A | DKFZp762M136; EPRAP |
| | | | (FEM1A), mRNA. | | |
| 202 | 5900112 | NM_052857.2 | coiled-coil domain | CCDC16 | MGC20398 |
| | | | containing 16 (CCDC16), | | |
| | | | mRNA. | | |
| 203 | 5910113 | NM_004385.2 | versican (VCAN), mRNA. | VCAN | DKFZp686K06110; WGN; |
| | | | | | VERSICAN; PG-M; WGN1; |
| | | | | | ERVR; CSPG2 |
| 204 | 6020327 | NM_024901.3 | DENN/MADD domain | DENND2D | FLJ22457; RP5-1180E21.2 |
| | | | containing 2D (DENND2D), | | |
| | | | mRNA. | | |
| 205 | 6020653 | NM_014962.2 | BTB (POZ) domain | BTBD3 | dJ742J24.1; MGC130038; |
| | | | containing 3 (BTBD3), | | KIAA0952; MGC130039 |
| | | | transcript variant 1, mRNA. | | |
| 206 | 6040487 | NM_006265.1 | RAD21 homolog (S. pombe) | RAD21 | KIAA0078; hHR21; NXP1; |
| | | | (RAD21), mRNA. | | FLJ40596; HRAD21; |
| | | | | | FLJ25655; SCC1; HR21; |
| | | | | | MCD1 |
| 207 | 6060196 | NM_145912.5 | NFAT activating protein with | NFAM1 | FLJ40652; CNAIP; |
| | | | ITAM motif 1 (NFAM1), | | bK126B4.4 |
| | | | mRNA. | | |
| 208 | 6110392 | NM_002076.2 | glucosamine (N-acetyl)-6- | GNS | G6S; MGC21274 |
| | | | sulfatase (Sanfilippo | | |
| | | | disease IIID) (GNS), | | |
| | | | mRNA. | | |
| 209 | 6180070 | NR_002204.1 | ferritin, heavy polypeptide- | FTHL11 | — |
| | | | like 11 (FTHL11) on | | |
| | | | chromosome 8. | | |
| 210 | 6180154 | NM_145255.2 | mitochondrial ribosomal | MRPL10 | MGC17973; MRP-L10; |
| | | | protein L10 (MRPL10), | | L10MT; RPML8; MRPL8; |
| | | | nuclear gene encoding | | MRP-L8 |
| | | | mitochondrial protein, | | |
| | | | mRNA. | | |
| 211 | 6180537 | NM_002139.2 | RNA binding motif protein, | RBMX | RBMXRT; HNRPG; |
| | | | X-linked (RBMX), mRNA. | | hnRNP-G; RNMX; |
| | | | | | RBMXP1 |
| 212 | 6200402 | NM_005946.2 | metallothionein 1A (MT1A), | MT1A | MTC; MT1; MGC32848; |
| | | | mRNA. | | MT1S |
| 213 | 6200669 | NM_138720.1 | histone cluster 1, H2bd | HIST1H2BD | H2B.1B; HIRIP2; |
| | | | (HIST1H2BD), transcript | | MGC90432; dJ221C16.6; |
| | | | variant 2, mRNA. | | H2B/b; H2BFB |
| 214 | 6290402 | NM_198723.1 | transcription elongation | TCEA2 | TFIIS |
| | | | factor A (SII), 2 (TCEA2), | | |
| | | | transcript variant 2, mRNA. | | |
| 215 | 6370025 | NM_013333.2 | epsin 1 (EPN1), mRNA. | EPN1 | — |
| 216 | 6370241 | NM_014155.3 | zinc finger and BTB domain | ZBTB44 | MGC57431; MGC60348; |
| | | | containing 44 (ZBTB44), | | BTBD15; MGC88058; |
| | | | mRNA. | | HSPC063; MGC26123 |
| 217 | 6380347 | NM_001469.3 | X-ray repair complementing | XRCC6 | TLAA; G22P1; CTCBF; |
| | | | defective repair in Chinese | | ML8; CTC75; KU70 |
| | | | hamster cells 6 (Ku | | |
| | | | autoantigen, 70 kDa) | | |
| | | | (XRCC6), mRNA. | | |
| 218 | 6380524 | NM_003432.1 | zinc finger protein 131 | ZNF131 | pHZ-10 |
| | | | (ZNF131), mRNA. | | |
| 219 | 6380639 | NM_213725.1 | ribosomal protein, large, P1 | RPLP1 | P1; FLJ27448; RPP1; |
| | | | (RPLP1), transcript variant | | MGC5215 |
| | | | 2, mRNA. | | |
| 220 | 6400148 | NM_080430.2 | selenoprotein M (SELM), | SELM | MGC40146; SEPM |
| | | | mRNA. | | |
| 221 | 6400332 | NM_014184.2 | cornichon homolog 4 | CNIH4 | HSPC163 |
| | | | (Drosophila) (CNIH4), | | |
| | | | mRNA. | | |
| 222 | 6400603 | NM_024070.3 | poliovirus receptor related | PVRIG | MGC138297; MGC2463; |
| | | | immunoglobulin domain | | MGC138295; MGC104322; |
| | | | containing (PVRIG), mRNA. | | C7orf15 |
| 223 | 6420730 | NM_001024921.2 | ribosomal protein L9 | RPL9 | FLJ27456; MGC15545; |
| | | | (RPL9), transcript variant 2, | | DKFZp313J1510; NPC-A- |
| | | | mRNA. | | 16 |
| 224 | 6480095 | NM_030918.5 | sorting nexin family member | SNX27 | MGC126873; MGC20471; |
| | | | 27 (SNX27), mRNA. | | MGC126871; MY014; |
| | | | | | KIAA0488 |
| 225 | 6550315 | NM_020424.2 | LYR motif containing 1 | LYRM1 | A211C6.1 |
| | | | (LYRM1), mRNA. | | |
| 226 | 6560121 | NM_002647.2 | phosphoinositide-3-kinase, | PIK3C3 | MGC61518; Vps34 |
| | | | class 3 (PIK3C3), mRNA. | | |
| 227 | 6560164 | NM_001006.3 | ribosomal protein S3A | RPS3A | FTE1; MGC23240; MFTL |
| | | | (RPS3A), mRNA. | | |
| 228 | 6580121 | NM_021242.3 | MID1 interacting protein 1 | MID1IP1 | THRSPL; MIG12; |
| | | | (gastrulation specific G12 | | STRAIT11499; FLJ10386; |
| | | | homolog (zebrafish)) | | G12-like |
| | | | (MID1IP1), mRNA. | | |
| 229 | 6620528 | NM_005952.2 | metallothionein 1X (MT1X), | MT1X | MT1; MT-1I |
| | | | mRNA. | | |
| 230 | 6620544 | NM_016360.2 | coiled-coil domain | CCDC44 | — |
| | | | containing 44 (CCDC44), | | |
| | | | mRNA. | | |
| 231 | 6650451 | NM_015057.3 | MYC binding protein 2 | MYCBP2 | FLJ21597; PAM; |
| | | | (MYCBP2), mRNA. | | FLJ13826; FLJ10106; |
| | | | | | FLJ21646; |
| | | | | | DKFZp686M08244; |
| | | | | | KIAA0916 |
| 232 | 6660162 | NM_052972.2 | leucine-rich alpha-2- | LRG1 | HMFT1766; LRG |
| | | | glycoprotein 1 (LRG1), | | |
| | | | mRNA. | | |
| 233 | 6760192 | NM_007236.3 | calcium binding protein P22 | CHP | SLC9A1BP |
| | | | (CHP), mRNA. | | |
| 234 | 6770634 | NM_005154.2 | ubiquitin specific peptidase | USP8 | KIAA0055; FLJ34456; |
| | | | 8 (USP8), mRNA. | | MGC129718; UBPY; |
| | | | | | HumORF8 |
| 235 | 6840020 | NM_006573.3 | tumor necrosis factor | TNFSF13B | TNFSF20; CD257; TALL1; |
| | | | (ligand) superfamily, | | delta BAFF; BAFF; ZTNF4; |
| | | | member 13b (TNFSF13B), | | TALL-1; THANK; BLYS |
| | | | mRNA. | | |
| 236 | 6900528 | NM_001033568.1 | ras homolog gene family, | RHOT1 | ARHT1; MIRO-1; |
| | | | member T1 (RHOT1), | | FLJ12633; FLJ11040 |
| | | | transcript variant 1, mRNA. | | |
| 237 | 6960593 | NM_004439.4 | EPH receptor AS (EPHA5), | EPHA5 | EHK1; TYRO4; HEK7; |
| | | | transcript variant 1, mRNA. | | CEK7 |
| 238 | 6960735 | NM_006004.1 | ubiquinol-cytochrome c | UQCRH | — |
| | | | reductase hinge protein | | |
| | | | (UQCRH), mRNA. | | |
| 239 | 6980092 | NM_024297.2 | PHD finger protein 23 | PHF23 | hJUNE-1b; MGC2941; |
| | | | (PHF23), mRNA. | | FLJ16355; FLJ22884 |
| 240 | 7000369 | NM_000591.2 | CD14 molecule (CD14), | CD14 | — |
| | | | transcript variant 1, mRNA. | | |
| 241 | 7000465 | NM_153615.1 | ral guanine nucleotide | RGL4 | Rgr; MGC119678; |
| | | | dissociation stimulator-like 4 | | MGC119680 |
| | | | (RGL4), mRNA. | | |
| 242 | 7050670 | NM_014649.2 | scaffold attachment factor | SAFB2 | KIAA0138 |
| | | | B2 (SAFB2), mRNA. | | |
| 243 | 7210035 | NR_003041.1 | small nucleolar RNA, C/D | SNORD13 | U13 |
| | | | box 13 (SNORD13) on | | |
| | | | chromosome 8. | | |
| 244 | 7210154 | NM_001165.3 | baculoviral IAP repeat- | BIRC3 | RNF49; MALT2; MIHC; |
| | | | containing 3 (BIRC3), | | HAIP1; API2; HIAP1; AIP1; |
| | | | transcript variant 1, mRNA. | | CIAP2 |
| 245 | 7210326 | NM_004159.4 | proteasome (prosome, | PSMB8 | D6S216; LMP7; RING10; |
| | | | macropain) subunit, beta | | MGC1491; D6S216E |
| | | | type, 8 (large multifunctional | | |
| | | | peptidase 7) (PSMB8), | | |
| | | | transcript variant 1, mRNA. | | |
| 246 | 7210450 | NM_006769.2 | LIM domain only 4 (LMO4), | LMO4 | — |
| | | | mRNA. | | |
| 247 | 7320041 | NM_015892.2 | B cell RAG associated | GALNAC4SNONE6ST | DKFZp781H1369; |
| | | | protein (GALNAC4S-6ST), | | KIAA0598; BRAG; RP11- |
| | | | mRNA. | | 47G11.1; MGC34346 |
| 248 | 7320551 | NM_002350.1 | v-yes-1 Yamaguchi | LYN | FLJ26625; JTK8 |
| | | | sarcoma viral related | | |
| | | | oncogene homolog (LYN), | | |
| | | | mRNA. | | |
| 249 | 7380255 | NM_022481.5 | centaurin, delta 3 | CENTD3 | FLJ21065; ARAP3; DRAG1 |
| | | | (CENTD3), mRNA. | | |
| 250 | 7400653 | NM_004567.2 | 6-phosphofructo-2- | PFKFB4 | — |
| | | | kinase/fructose-2,6- | | |
| | | | biphosphatase 4 (PFKFB4), | | |
| | | | mRNA. | | |
| 251 | 7400673 | NM_001039457.1 | ATPase, H+ transporting, | ATP6V0B | HATPL; ATP6F; VMA16 |
| | | | lysosomal 21 kDa, V0 | | |
| | | | subunit b (ATP6V0B), | | |
| | | | transcript variant 2, mRNA. | | |
| 252 | 7550364 | NM_001077628.1 | anterior pharynx defective 1 | APH1A | APH-1A; CGI-78; |
| | | | homolog A (C. elegans) | | 6530402N02Rik |
| | | | (APH1A), transcript variant | | |
| | | | 1, mRNA. | | |
| 253 | 7610187 | NM_182810.1 | activating transcription | ATF4 | TXREB; TAXREB67; |
| | | | factor 4 (tax-responsive | | CREB2; CREB-2 |
| | | | enhancer element B67) | | |
| | | | (ATF4), transcript variant 2, | | |
| | | | mRNA. | | |
| 254 | 7610537 | NM_002129.2 | high-mobility group box 2 | HMGB2 | HMG2 |
| | | | (HMGB2), mRNA. | | |
| 255 | 7650209 | NM_001003943.1 | Bcl2 modifying factor | BMF | FLJ00065 |
| | | | (BMF), transcript variant 4, | | |
| | | | mRNA. | | |
| 256 | 510132 | XM_941861.1 | PREDICTED: similar to | LOC650029 | — |
| | | | RNA-binding protein 4 | | |
| | | | (RNA-binding motif protein | | |
| | | | 4) (Lark homolog) (Hlark) | | |
| | | | (RNA-binding motif protein | | |
| | | | 4a), transcript variant 1 | | |
| | | | (LOC650029), mRNA. | | |
| 257 | 610280 | NM_025029.2 | family with sequence | FAM128B | FLJ14346; MGC87017 |
| | | | similarity 128, member B | | |
| | | | (FAM128B), mRNA. | | |
| 258 | 650129 | BX093310 | BX093310 | NONE | — |
| | | | NCI_CGAP_GC4 cDNA | | |
| | | | clone IMAGp998F143166; | | |
| | | | IMAGE: 1257997, mRNA | | |
| | | | sequence | | |
| 259 | 830484 | XM_938599.2 | PREDICTED: similar to 40S | LOC441377 | — |
| | | | ribosomal protein S26 | | |
| | | | (LOC441377), mRNA. | | |
| 260 | 830639 | XM_929667.1 | PREDICTED: similar to | LOC653778 | — |
| | | | solute carrier family 25, | | |
| | | | member 37 (LOC653778), | | |
| | | | mRNA. | | |
| 261 | 870181 | NM_001080544.1 | similar to ribosomal protein | LOC653314 | — |
| | | | L19 (LOC653314), mRNA. | | |
| 262 | 1010039 | AI218425 | qh24c08.x1 | NONE | — |
| | | | Soares NFL_T_GBC_S1 | | |
| | | | cDNA clone | | |
| | | | IMAGE: 1845614 3, mRNA | | |
| | | | sequence | | |
| 263 | 1260066 | AK024852 | cDNA: FLJ21199 fis, clone | NONE | — |
| | | | COL00235 | | |
| 264 | 1500538 | XM_928168.1 | PREDICTED: similar to | LOC645138 | — |
| | | | ribosomal protein S11 | | |
| | | | (LOC645138), mRNA. | | |
| 265 | 1940274 | NM_032036.2 | family with sequence | FAM14A | TLH29; MGC44913 |
| | | | similarity 14, member A | | |
| | | | (FAM14A), mRNA. | | |
| 266 | 1980112 | NM_197956.1 | chromosome 9 open | C9orf90 | KIAA1896; |
| | | | reading frame 90 (C9orf90), | | DKFZp762G199; RP11- |
| | | | mRNA. | | 379C10.2; bA379C10.2 |
| 267 | 2000564 | NM_001042475.1 | chromosome 6 open | C6orf204 | MGC131785; RP11- |
| | | | reading frame 204 | | 57K17.2; bA57K17.2; NY- |
| | | | (C6orf204), transcript | | BR-15 |
| | | | variant 1, mRNA. | | |
| 268 | 2260025 | XR_015514.1 | PREDICTED: similar to | LOC730746 | — |
| | | | Heterogeneous nuclear | | |
| | | | ribonucleoprotein A1 (Helix- | | |
| | | | destabilizing protein) | | |
| | | | (Single-strand RNA-binding | | |
| | | | protein) (hnRNP core | | |
| | | | protein A1) (HDP) | | |
| | | | (LOC730746), mRNA. | | |
| 269 | 2340446 | XM_942351.2 | PREDICTED: similar to | LOC652726 | — |
| | | | ankyrin repeat domain 36 | | |
| | | | (LOC652726), mRNA. | | |
| 270 | 2470240 | NM_004848.2 | chromosome 1 open | C1orf38 | ICB-1 |
| | | | reading frame 38 (C1orf38), | | |
| | | | transcript variant 1, mRNA. | | |
| 271 | 2510253 | NM_145306.2 | chromosome 10 open | C10orf35 | — |
| | | | reading frame 35 | | |
| | | | (C10orf35), mRNA. | | |
| 272 | 2810082 | NM_016470.6 | chromosome 20 open | C20orf111 | dJ1183I21.1; HSPC207; |
| | | | reading frame 111 | | Perit1 |
| | | | (C20orf111), mRNA. | | |
| 273 | 2940066 | XM_928429.1 | PREDICTED: similar to | LOC388275 | — |
| | | | Heterogeneous nuclear | | |
| | | | ribonucleoprotein A1 (Helix- | | |
| | | | destabilizing protein) | | |
| | | | (Single-strand binding | | |
| | | | protein) (hnRNP core | | |
| | | | protein A1) (HDP-1) | | |
| | | | (Topoisomerase-inhibitor | | |
| | | | suppressed) (LOC388275), | | |
| | | | mRNA. | | |
| 274 | 2940452 | AK056642 | cDNA FLJ32080 fis, clone | NONE | — |
| | | | OCBBF2000015 | | |
| 275 | 3190348 | XM_944816.1 | PREDICTED: similar to 60S | LOC440927 | — |
| | | | acidic ribosomal protein P1, | | |
| | | | transcript variant 4 | | |
| | | | (LOC440927), mRNA. | | |
| 276 | 3400709 | AK094914 | cDNA FLJ37595 fis, clone | NONE | — |
| | | | BRCOC2007864 | | |
| 277 | 3460014 | NM_016613.5 | chromosome 4 open | C4orf18 | AD021; DKFZp434L142; |
| | | | reading frame 18 (C4orf18), | | AD036; FLJ38155 |
| | | | transcript variant 2, mRNA. | | |
| 278 | 3780148 | NM_024067.2 | chromosome 7 open | C7orf26 | MGC2718 |
| | | | reading frame 26 (C7orf26), | | |
| | | | mRNA. | | |
| 279 | 3850411 | XM_933119.1 | PREDICTED: similar to NY- | LOC653316 | — |
| | | | REN-7 antigen, transcript | | |
| | | | variant 4 (LOC653316), | | |
| | | | mRNA. | | |
| 280 | 3870470 | XR_015809.1 | PREDICTED: similar to 40S | LOC728973 | — |
| | | | ribosomal protein S7 (S8) | | |
| | | | (LOC728973), mRNA. | | |
| 281 | 4060382 | XM_931996.1 | PREDICTED: similar to | LOC643035 | — |
| | | | CG33096-PB, isoform B, | | |
| | | | transcript variant 2 | | |
| | | | (LOC643035), mRNA. | | |
| 282 | 4480600 | NM_080757.1 | chromosome 20 open | C20orf127 | dJ614O4.6; MGC118948 |
| | | | reading frame 127 | | |
| | | | (C20orf127), mRNA. | | |
| 283 | 4610681 | XM_939687.2 | PREDICTED: similar to | LOC653658 | — |
| | | | ribosomal protein S23 | | |
| | | | (LOC653658), mRNA. | | |
| 284 | 4860341 | NM_145060.3 | chromosome 18 open | C18orf24 | MGC10200; Ska1 |
| | | | reading frame 24 | | |
| | | | (C18orf24), transcript | | |
| | | | variant 2, mRNA. | | |
| 285 | 5310681 | XM_933085.1 | PREDICTED: similar to cis- | LOC653344 | — |
| | | | Golgi matrix protein GM130, | | |
| | | | transcript variant 2 | | |
| | | | (LOC653344), mRNA. | | |
| 286 | 5340278 | XM_932991.1 | PREDICTED: hypothetical | LOC643977 | — |
| | | | protein LOC643977, | | |
| | | | transcript variant 1 | | |
| | | | (LOC643977), mRNA. | | |
| 287 | 5390685 | XM_928197.1 | PREDICTED: similar to 60S | LOC643433 | — |
| | | | ribosomal protein L29 (Cell | | |
| | | | surface heparin binding | | |
| | | | protein HIP), transcript | | |
| | | | variant 1 (LOC643433), | | |
| | | | mRNA. | | |
| 288 | 5420438 | NM_138471.1 | hypothetical protein | LOC144097 | DKFZp762N0114 |
| | | | BC007540 (LOC144097), | | |
| | | | mRNA. | | |
| 289 | 5420750 | XM_941125.1 | PREDICTED: similar to 60S | LOC649447 | — |
| | | | ribosomal protein L29 (Cell | | |
| | | | surface heparin binding | | |
| | | | protein HIP) (LOC649447), | | |
| | | | mRNA. | | |
| 290 | 5490603 | NM_001080831.1 | hCG1783417 | LOC401019 | — |
| | | | (LOC401019), mRNA. | | |
| 291 | 5820202 | XR_018325.1 | PREDICTED: similar to | LOC644131 | — |
| | | | chaperonin containing | | |
| | | | TCP1, subunit 8 (theta) | | |
| | | | (LOC644131), mRNA. | | |
| 292 | 5890615 | NM_001045478.1 | chromosome 1 open | C1orf200 | — |
| | | | reading frame 200 | | |
| | | | (C1orf200), mRNA. | | |
| 293 | 5960086 | BP873537 | BP873537 Sugano cDNA | NONE | — |
| | | | library, embryonal kidney | | |
| | | | cDNA clone HKR13896, | | |
| | | | mRNA sequence | | |
| 294 | 6020066 | XM_940333.2 | PREDICTED: similar to | LOC651202 | — |
| | | | large subunit ribosomal | | |
| | | | protein L36a (LOC651202), | | |
| | | | mRNA. | | |
| 295 | 6110195 | NM_153367.2 | chromosome 10 open | C10orf56 | FLJ90798 |
| | | | reading frame 56 | | |
| | | | (C10orf56), mRNA. | | |
| 296 | 6200706 | AA082988 | zn08b06.s1 Stratagene | NONE | — |
| | | | hNT neuron (#937233) | | |
| | | | cDNA clone IMAGE: 546803 | | |
| | | | 3, mRNA sequence | | |
| 297 | 6270307 | XM_930344.2 | PREDICTED: similar to 40S | LOC644934 | — |
| | | | ribosomal protein S26, | | |
| | | | transcript variant 1 | | |
| | | | (LOC644934), mRNA. | | |
| 298 | 6270605 | NR_003040.1 | ribosomal protein L23a | LOC649946 | — |
| | | | pseudogene (LOC649946) | | |
| | | | on chromosome 11. | | |
| 299 | 6280446 | XM_926370.1 | PREDICTED: similar to 40S | LOC642989 | — |
| | | | ribosomal protein S25 | | |
| | | | (LOC642989), mRNA. | | |
| 300 | 6280706 | XM_933956.1 | PREDICTED: similar to | LOC644162 | — |
| | | | septin 7, transcript variant 4 | | |
| | | | (LOC644162), mRNA. | | |
| 301 | 6370288 | XM_938283.2 | PREDICTED: chromosome | C17orf68 | — |
| | | | 17 open reading frame 68 | | |
| | | | (C17orf68), mRNA. | | |
| 302 | 6480092 | NM_024519.2 | family with sequence | FAM65A | FLJ13725; KIAA1930 |
| | | | similarity 65, member A | | |
| | | | (FAM65A), mRNA. | | |
| 303 | 6510753 | XM_936874.1 | PREDICTED: similar to 60S | LOC642210 | — |
| | | | ribosomal protein L32 | | |
| | | | (LOC642210), mRNA. | | |
| 304 | 6660753 | NM_017822.3 | chromosome 12 open | C12orf41 | FLJ20436; FLJ12670 |
| | | | reading frame 41 | | |
| | | | (C12orf41), mRNA. | | |
| 305 | 6760202 | NM_001014812.1 | family with sequence | FAM96A | FLJ22875 |
| | | | similarity 96, member A | | |
| | | | (FAM96A), transcript variant | | |
| | | | 2, mRNA. | | |
| 306 | 6840477 | CD640673 | AGENCOURT_14535501 | NONE | — |
| | | | NIH_MGC_191 cDNA | | |
| | | | clone IMAGE: 30415823 5, | | |
| | | | mRNA sequence | | |
| 307 | 6860162 | XM_498969.2 | PREDICTED: hypothetical | LOC441019 | — |
| | | | LOC441019 (LOC441019), | | |
| | | | mRNA. | | |
| 308 | 7160079 | NM_016623.3 | family with sequence | FAM49B | L1; DKFZp686B04128; BM- |
| | | | similarity 49, member B | | 009 |
| | | | (FAM49B), mRNA. | | |
| 309 | 7320707 | XM_939368.1 | PREDICTED: similar to | LOC654103 | — |
| | | | solute carrier family 25, | | |
| | | | member 37 (LOC654103), | | |
| | | | mRNA. | | |
| 310 | 7400689 | NM_017896.2 | chromosome 20 open | C20orf11 | TWA1 |
| | | | reading frame 11 | | |
| | | | (C20orf11), mRNA. | | |
| 311 | 7510543 | NM_017924.2 | chromosome 14 open | C14orf119 | MGC74723; FLJ20671 |
| | | | reading frame 119 | | |
| | | | (C14orf119), mRNA. | | |
| 312 | 7610608 | NM_001093763.1 | hCG31916 (LOC653702), | LOC653702 | — |
| | | | mRNA. | | |

| | | | Minimal | Minimal |
|---|---|---|---|---|
| | | | p-value | p-value |
| | | P or N | precision- | standard |
| | | predictor | weighted | heteroscedastic |
| Index | Probe sequence | gene | T-test | T-test |
| 1 | TCCAGCAGTGGTCATTCG | N | 0.009966 | 0.001089 |
| | ACAACGAAAGTCATACCGT | | | |
| | AGAAAAGATGGCG | | | |
| 2 | CAGACCCAGAGAAAAGTA | N | 0.013671 | 0.00275 |
| | GTTGTCAGTCATAGCACAC | | | |
| | ATCGGACATTTGG | | | |
| 3 | GCAATGGTAAACCTCGAG | N | 0.001814 | 9.08E−05 |
| | ACAACAAACAAGCAGGGG | | | |
| | TGTTTGAACCAACC | | | |
| 4 | GTGAGCCTGGGCCCTACA | P | 0.009399 | 0.000919 |
| | TGGATGTGGTCGTCTCCC | | | |
| | TGGTCACTATCATG | | | |
| 5 | CAGAGGCAGAGGATGCTG | N | 0.001628 | 0.000849 |
| | CAAGAGAGAAAAGCTGCA | | | |
| | AAAGAGGCCGCCGC | | | |
| 6 | GTTGGGGAAGAGGATAAG | N | 0.009361 | 5.94E−05 |
| | GTTATATCTAGGACAACTC | | | |
| | TTTGAGTTGGTCC | | | |
| 7 | CTGAGAAGGAACTGGCTG | N | 0.001468 | 0.000119 |
| | CTGAAAAGAAACGCATCCT | | | |
| | GCACTGCCTGGGG | | | |
| 8 | CGAAGTCAGAAAACTCATC | P | 0.006818 | 0.000591 |
| | ATCAGGCGACGCCCTGGC | | | |
| | GGCTGGGTGGAGA | | | |
| 9 | GGGCAAACCCAAAGATGG | N | 0.019615 | 1.54E−06 |
| | AAAGTGCTTGTTGGGTGG | | | |
| | GTAAGCACCACCTG | | | |
| 10 | ATGTACGTGGGGGATTCTT | N | 0.012771 | 1.75E−05 |
| | GACTCGGGTTAGTCTCTG | | | |
| | GGGATGCAGAGCC | | | |
| 11 | TTTCGTTTGAGTCCTGCTG | P | 0.012871 | 0.007059 |
| | TTGGTGTCGGAGCACGAG | | | |
| | GGGAGGCACGGTG | | | |
| 12 | GCCCAGAGAGAGCTGTCC | P | 0.001982 | 0.000689 |
| | TCTCATTGGGTGAACTGAT | | | |
| | TGAGGAAGGGTCT | | | |
| 13 | GGACCCTGTTGCTAAGCC | P | 0.004037 | 0.000412 |
| | CCAGCAAGCAATCCTAGG | | | |
| | TAGGGTTTAATCCC | | | |
| 14 | ATGTAGCAGAATGGCACC | P | 0.007622 | 0.000468 |
| | CAGACCACTGCCCACCAG | | | |
| | TGACGGACATGCAC | | | |
| 15 | CAGTGTGGTGAAGGTTGA | N | 0.004099 | 0.001709 |
| | CTGAAGAAGTCCAGTGTG | | | |
| | TCCAGTTAAAACAG | | | |
| 16 | CAACTTTCAGAGCCTCTTG | P | 0.007348 | 0.000539 |
| | TATTTGGAAGGCTGGAAG | | | |
| | GGCCCAGACTTTG | | | |
| 17 | ACACAGTAGCGATGGAGG | P | 0.008241 | 0.00013 |
| | TGACGTAGCTTCCTCCGA | | | |
| | GTGGAACTGCAGCC | | | |
| 18 | CCCTCCCTGTGGAGCCTG | P | 0.0106 | 0.003695 |
| | TTACCTCCGCATTTGACAC | | | |
| | GAGTCTGCTGTGA | | | |
| 19 | GTTTGGTGTGTTCCCGCAA | P | 0.030046 | 0.000792 |
| | ACCCCCTTTGTGCTGTGG | | | |
| | GGCTGGTAGCTCA | | | |
| 20 | AGCCATAGCTGGTGACAA | N | 0.015967 | 0.008984 |
| | ACAGATGGTTGCTCAGGG | | | |
| | ACAAGGTGCCTTCC | | | |
| 21 | GCGCCTTTCTCATCAGCTT | N | 0.008279 | 0.005652 |
| | CTTCCGAGGGTGACAGGT | | | |
| | GAAAGACCCCTAC | | | |
| 22 | CATGGAGGGCAAAGAGCT | N | 0.018391 | 0.000887 |
| | CAGCAAAGGGCAAGCCAA | | | |
| | GAAGCTGAAGAAGC | | | |
| 23 | CCAGATGGCATGGTTGCT | N | 0.000708 | 0.00047 |
| | CTATTGGACTACCGTGAG | | | |
| | GATGGTGTGACCCC | | | |
| 24 | GCATTGGGGCCAAACACA | P | 0.029415 | 0.015178 |
| | GAATCAGCAAAGAGGAGG | | | |
| | CCATGCGCTGGTTC | | | |
| 25 | GCATCAGACTTTTAATCTG | P | 0.021705 | 0.001461 |
| | AGGGTCCAGGGTTCAAGT | | | |
| | CCCTGTTCGGGCG | | | |
| 26 | GGGGAGAGGAAAAGTGGA | N | 0.02414 | 0.020459 |
| | TGGAAGTGTCTGGAAAGG | | | |
| | GCACGAGAGAGTCT | | | |
| 27 | TGCCAGAACACAAGACAC | N | 0.033189 | 0.006635 |
| | CAAATTGAACTCACTGCTT | | | |
| | TTGAGGCATCTGG | | | |
| 28 | AGCATCTTTCATATGGTAG | N | 0.014552 | 0.006742 |
| | GAACCAACAAGGAAACTTT | | | |
| | CCTTTAACTCCC | | | |
| 29 | TACCGCCTCCTCCCCGTC | N | 0.041007 | 3.68E−05 |
| | GCTCTGCCTTTTCCAAAAC | | | |
| | TCACTTGGGCCCT | | | |
| 30 | GAACCCGCGTGCAACCTG | P | 0.015933 | 0.019757 |
| | TCCCGACTCTAGCCGCCT | | | |
| | CTTCAGCACGCCAT | | | |
| 31 | CCCCTTGGGGAAGACGAA | N | 0.004849 | 0.002045 |
| | GGGATGCTGCAGTTCCAA | | | |
| | AAGAGAAGGACTCT | | | |
| 32 | CCTCTGCTCCTCCCTTCCC | N | 0.002769 | 0.001149 |
| | AAGGCATTGAAGCTGAAT | | | |
| | GTGCCAACTGGCA | | | |
| 33 | GCTTGTGGGTCATCTTGCA | P | 0.00569 | 3.51E−05 |
| | CCTTTACAAACAAGGAATT | | | |
| | CCCCTCTGTGCC | | | |
| 34 | CTTTTTTGTACGTAGCTGT | N | 0.009262 | 0.002535 |
| | TACATGTAGGGCAATCTGT | | | |
| | CTTTAAGTAGGG | | | |
| 35 | CCCACCATCACCTCAAACC | N | 0.003289 | 0.003276 |
| | CAATCACCCCCTCCTCTGT | | | |
| | ATGCTGTCACAC | | | |
| 36 | GGGGGCACTATAGCCACT | N | 0.008605 | 0.000682 |
| | AAACGAGGTGTGAAAGGC | | | |
| | TCAAGAGGATGACC | | | |
| 37 | AAAGTACTGCGCGACAATA | P | 0.011344 | 0.000972 |
| | TCCAGGGCATCACCAAGC | | | |
| | CGGCCATCCGGCG | | | |
| 38 | GGGGAAGCCCGGGGCCG | N | 0.031646 | 0.000409 |
| | CCCGGGACCTCGGCCCGT | | | |
| | TCCTCCGGACCCGAG | | | |
| 39 | CCGGGCTCCTAGCGGGGA | N | 0.0262 | 7.31E−05 |
| | AAAGGAAGGGGATAACTC | | | |
| | AGAGGAACAGACAC | | | |
| 40 | GAGCAAAACTGCACAAACT | N | 0.00257 | 0.00047 |
| | TGCACATTGGAAAGTGCAA | | | |
| | CAAGTTCCCGTG | | | |
| 41 | CGCCACTTCATGGAGCTG | P | 0.007682 | 0.003122 |
| | GTGACTTGTGGCCTTTCCA | | | |
| | AAAACCCATATCT | | | |
| 42 | GGTGGCTGCGCGAGGGA | N | 0.000208 | 0.000291 |
| | CCGAGTACTAGAGCTGCT | | | |
| | TGCATGCGTTACTAA | | | |
| 43 | CTGCACTGCGTGCTGGTG | P | 0.028714 | 0.013808 |
| | ACGAATCCACATTCATCTC | | | |
| | AATGGAAGGATCC | | | |
| 44 | AAGGACTCTTCCACCAGA | N | 0.008985 | 0.002854 |
| | GATGGGAAAACCACTGGG | | | |
| | GAGGACTAGGACCC | | | |
| 45 | GTGGGTCTCACCTCTCCAT | N | 0.031525 | 0.000802 |
| | TGTTCTCTTGTTCTATGGG | | | |
| | GCAGGTTTGGGG | | | |
| 46 | ACCAAGGGAGAACCAGGA | P | 0.005085 | 0.000658 |
| | AACGGAAACAGAGTGGTC | | | |
| | ATTCCCCAGCCCGG | | | |
| 47 | GGGGCATCTGGCATGGAC | N | 0.02416 | 0.00018 |
| | TGGGGTGGAAATGGGGAT | | | |
| | GTCAGTTTGAAAGC | | | |
| 48 | GCCTGAGGTGACAGACAG | P | 0.027191 | 0.001044 |
| | GGCAGGTGGTAACAAAAC | | | |
| | CGTTGAACCTCCCA | | | |
| 49 | CATGGCCAAACGTACCAA | N | 0.020811 | 0.012763 |
| | GAAAGTCGGGATCGTCGG | | | |
| | TAAATACGGGACCC | | | |
| 50 | GCTCCGTGTTGGAAAAAA | N | 0.001352 | 0.000494 |
| | GGGGTAGTGCATTTTAAAT | | | |
| | TGACCTTCATACG | | | |
| 51 | GGGGTCTGTGAGAGTACA | N | 0.002474 | 0.003327 |
| | TGTATTATATACAAGCACA | | | |
| | ACAGGGCTTGCAC | | | |
| 52 | AGTGGAGCGGCCGCCGG | P | 0.0028 | 0.003268 |
| | AGATGCCTGACGCATCTG | | | |
| | TCTGAGGAGCGGTCA | | | |
| 53 | GGCACAGGCTCTGCCGTG | P | 0.007554 | 6.88E−05 |
| | TCCTTGGAGTGAAAGACTC | | | |
| | TTTTTACCAGAGG | | | |
| 54 | CCTGTTCCCTTCATTGCTG | N | 0.047158 | 0.008599 |
| | TGAGTTGGGAGTGCATTG | | | |
| | AGAGATGATGTCC | | | |
| 55 | GACCGGAAGCAACCCCTT | N | 0.002981 | 0.004409 |
| | CACAGACACGAGCACATC | | | |
| | GGCAAACCCTATGA | | | |
| 56 | CCACTTCTGAGGAATGGA | N | 0.007523 | 0.000712 |
| | CCTGGTGTAACACACTTGA | | | |
| | ATATGTGTGATGC | | | |
| 57 | CCAGCTCTACCAGCCCCT | P | 0.004008 | 0.0025 |
| | CAAGGATCGAGAAGATGA | | | |
| | CCAGTACAGCCACC | | | |
| 58 | CGCCTGATGTCGGGACAG | P | 0.019848 | 0.009407 |
| | CCCTGCTCCCAAGTACAAA | | | |
| | TAGAGTGACCCGT | | | |
| 59 | GAGCACCTTGTTACAGTTC | P | 0.002915 | 0.000207 |
| | CGGCCTCTCAGTATGTGG | | | |
| | GCTAAATGCCAGC | | | |
| 60 | CGGGCTGGCCCACCTCGT | P | 0.005824 | 0.003599 |
| | TTTGCTAGTGAAGAGAGG | | | |
| | CGAGAAATTGCTGA | | | |
| 61 | AGTAAGGGATCGAAGACA | N | 0.015967 | 0.00069 |
| | TTTCAAATTGCTATCTCCA | | | |
| | TCTGGGCTGATCC | | | |
| 62 | GGCTGCAAGCTGGATACA | P | 0.031574 | 0.004829 |
| | TGGAATTCAGCACACTTTT | | | |
| | CTCCCTCTTACTG | | | |
| 63 | GGCATTTACGTTTCTCTGA | N | 0.006539 | 0.002363 |
| | TGCTCCCTTGAAGCCATAG | | | |
| | AATTTAGGGGCT | | | |
| 64 | GCAGCCCTAGAAAGTAAG | N | 0.020468 | 6.37E−05 |
| | CCCAGGGCTTCAGATCTA | | | |
| | AGTTAGTCCAAAAG | | | |
| 65 | TGGGAGCCCCATTGCCTC | P | 0.046562 | 0.002572 |
| | TGTCTCCTTCGGTGCCTG | | | |
| | CAGAGACTTTGTCT | | | |
| 66 | AACTGGTTGTGGGGAGGG | N | 0.024269 | 2.92E−05 |
| | AAGAGAAGGACAGGGTGT | | | |
| | TGGGGGGATGAGGA | | | |
| 67 | TACAGAACCATCCACTTGA | N | 0.003269 | 0.009058 |
| | CCTAACTACCTCCCCTGG | | | |
| | CCGCGCTCTCGCT | | | |
| 68 | TCCAAGGCCTGGATGCTA | N | 0.002557 | 0.000924 |
| | ATCAAGATGAACAGGTCG | | | |
| | ACTTTCAAGAATTC | | | |
| 69 | CCAGGGGAGGTGGGTAGA | N | 0.020742 | 4.55E−05 |
| | GCCCGAGGCCCCCCAGTA | | | |
| | GCCGACCCTGGCGT | | | |
| 70 | CCCGGGAGTGGATTCTAA | P | 0.019705 | 0.006056 |
| | ATGTGATTTTCCTAGGCTA | | | |
| | CTGCAGGAGCCCC | | | |
| 71 | GAGCACTCAACCCAGAAG | P | 0.002546 | 0.002083 |
| | GCGAAGATAGCTTTTGGTT | | | |
| | GTAGGCGGCTTCC | | | |
| 72 | GTCACCGAAAAGTGCTGC | P | 0.029826 | 0.001672 |
| | GGGATAACATCCAAGGCA | | | |
| | TCACCAAACCGGCC | | | |
| 73 | CGACTCTCAAGGCACTGT | P | 0.038275 | 0.012053 |
| | GTATGCCCTGCAAGTTGG | | | |
| | CTGTCTATGAGCAT | | | |
| 74 | GCTGTCTAGGTCCGTCCG | N | 0.006982 | 0.00795 |
| | GTGTGTCAGATTTTCCTCA | | | |
| | GATTAGATGTGCC | | | |
| 75 | GATCTCACTGACCCGTTG | N | 0.010236 | 0.007717 |
| | CCCTGTAACCACTTTCTTT | | | |
| | CCTTCTTTTGCCT | | | |
| 76 | GTTTTGGTTGTGAATCATT | N | 0.030427 | 0.000333 |
| | TGCCAGCGAGCCAAGGGA | | | |
| | GAGGCAGGGATTC | | | |
| 77 | AGGGAAGTGGGATCCGAG | N | 0.018034 | 0.000813 |
| | CCTGTAGAAGGGAGGCAT | | | |
| | GAAACTTGTGGAGG | | | |
| 78 | TTACGTTATCTACCAGAGC | N | 0.021493 | 0.008022 |
| | ACCGTGGGCTGTTACTTG | | | |
| | CCTTGAGTTGGAA | | | |
| 79 | GGGCTGAAAACTGCCCTT | P | 0.004239 | 0.002123 |
| | GGGCTGACTTTTGATAGG | | | |
| | CCATGCCTTGCCAC | | | |
| 80 | GCACAGCGTCCTGTCCAC | N | 0.004335 | 0.005296 |
| | ACCCAGCTCAGCATTTCCA | | | |
| | CACCAAGCAGCAA | | | |
| 81 | GTAACCCTCCAGTGGTGG | P | 0.019629 | 0.001216 |
| | AAGGCACACCATGGCTTC | | | |
| | CTCTGCTTGGTTTG | | | |
| 82 | GTTGAGGGAGTCAGCACA | P | 0.022339 | 0.002482 |
| | GTCCTTTCTGCAGCTTCTA | | | |
| | ACCCAGGACCATG | | | |
| 83 | GTGTCCCTGGAGCAGTGA | N | 0.014752 | 0.001847 |
| | GGGGACACCAGCAAAAAC | | | |
| | CTTCAGCTCTCAGA | | | |
| 84 | GCCTTCGGTTGTAAGTAG | N | 0.038066 | 0.03281 |
| | CCAGATCCCTCTCCAGTG | | | |
| | ACATTGGAACATGC | | | |
| 85 | CCAGACTGTGATGACTGG | N | 0.009421 | 0.006558 |
| | GAGCGGGCTGAATGAGAT | | | |
| | GGAGTGTGCATTAC | | | |
| 86 | GCCCTCTCTGTGGATCCC | N | 0.009865 | 0.015627 |
| | TACTGCTGGTTTCTGCCTT | | | |
| | CTCCATGCTGAGA | | | |
| 87 | GCCTCAGGAAAACAAGAC | P | 0.048659 | 0.001081 |
| | CTCTGTGCACCTCACTTTT | | | |
| | GGCTCACTGCAGC | | | |
| 88 | TGTAAGACGAACTTGGATC | N | 0.029902 | 0.00012 |
| | ACGGCTTGGTTCAGCAGA | | | |
| | GCATGGGGGCGGG | | | |
| 89 | AACCCAGGGCTTTAGAAG | N | 0.008492 | 8.92E−06 |
| | GCTGAGGCTGGGGGATTG | | | |
| | CTTGAAGTCAGGAG | | | |
| 90 | TCACTTGGGAGGGACGCA | N | 0.001572 | 0.000427 |
| | TAGAAGGAGCTCTAGGAA | | | |
| | CACAGTGCCAGTGC | | | |
| 91 | CAAAGGGGCATCGGAGAA | P | 0.011707 | 0.003529 |
| | GTGCAGCTGCTGTGCCTG | | | |
| | ATGTGGGAACAGCT | | | |
| 92 | ACCTGAAGCAGCAAGTGA | P | 0.039209 | 0.021103 |
| | GCGGGCTGGAGGGTGTG | | | |
| | CAGGACGACCTGTTC | | | |
| 93 | TCTCAAACCCGGTATGGT | N | 0.045389 | 0.022274 |
| | GGTCACCTTTGCTCCAGTC | | | |
| | AACGTTACAACGG | | | |
| 94 | GTCACGACATCCGAACTG | N | 0.015345 | 0.000886 |
| | GAGGGACAAGGATCTTAA | | | |
| | ACCCAAAGTACGAG | | | |
| 95 | GCTGCTAAAGTTCCAGCAA | N | 0.04698 | 0.014495 |
| | AAAAGATCACCGCCGCGA | | | |
| | GTAAAAAGGCTCC | | | |
| 96 | TAGCTGCTACCCTGGAAC | P | 0.020581 | 0.00367 |
| | GGTGGGCAGAGAGCCTAC | | | |
| | TAGGAAATGTGCAG | | | |
| 97 | GAAGAGTAACAAGAGTAG | N | 0.002215 | 0.000437 |
| | ACTGGACCAGAAATCGGA | | | |
| | GGGTGGCAAGCAGC | | | |
| 98 | CGAGAGTGCCCTTCTGAT | P | 0.00404 | 0.000435 |
| | GAATGTGGTGCTGGGGTG | | | |
| | TTTATGGCAAGTCA | | | |
| 99 | GGTGCTGATCCTACCACC | P | 0.002534 | 0.001606 |
| | TACTGCTACCTTCCTTAGC | | | |
| | TTCACCCTGGCTA | | | |
| 100 | ACCCTACTCTTCGGCCCC | P | 0.018496 | 0.001168 |
| | GCCAGCTCTCCATCTCACA | | | |
| | CTTTAAGAGCCTC | | | |
| 101 | CGTAACCAAAGAACGACA | N | 0.042699 | 0.00399 |
| | CAGAGAGATCAACAAGCA | | | |
| | AGCCACCCGAGGGG | | | |
| 102 | GAAGTAGCCCCAGTGAGT | P | 0.008798 | 0.00077 |
| | GTTAGTGATGCAGCTCTCC | | | |
| | TGGCCCCAGAGGA | | | |
| 103 | GTGAGTGGTCTCTGTCGG | N | 0.01297 | 4.58E−05 |
| | GAAAGATGTAGGGATTGG | | | |
| | TTCTCCAGGATCTT | | | |
| 104 | CACAGCCTTACTAGTTCCT | N | 0.007897 | 0.007786 |
| | TGCTTCCAGTATTTCAATT | | | |
| | GGTCTCCTCCCC | | | |
| 105 | GGCGGCCTCATCGTTCTTT | P | 0.008496 | 0.012709 |
| | GCCTTCCTGGTCACCATCT | | | |
| | GCTACGCTGGAA | | | |
| 106 | CGTGGCACCCCAAAAGGC | P | 0.037138 | 0.008695 |
| | CTCTGCTGGCATTTGCCTG | | | |
| | TGATGACAAAGAC | | | |
| 107 | GGCTTTTCAATTCTGTGGA | N | 0.042964 | 0.0271 |
| | CTTTGTACCATTTGGCTTC | | | |
| | ACCTTGTACTGC | | | |
| 108 | AAAGCAGATATTTCCCGGA | N | 0.000457 | 0.001746 |
| | CCCAGCGCGGCCTCAACC | | | |
| | AGGGCAGGAAAGA | | | |
| 109 | ACGGCGTGGAGGACTTTT | P | 0.012031 | 0.001874 |
| | CCGTGAGCCAGACGATGC | | | |
| | TGGAGGAGGTATTC | | | |
| 110 | GGGGCTACATTTGTTCATT | N | 0.030895 | 0.024754 |
| | TCCAGCAGTAGCATAAACT | | | |
| | TACGGTGACATG | | | |
| 111 | GTCCTCACGTTCCCAGGA | P | 0.016356 | 0.006994 |
| | GGGCGGCTTCACCCTTCG | | | |
| | TAACCAGGAGACAA | | | |
| 112 | CTGAACTGCTAATGTGGCT | N | 0.031398 | 0.004786 |
| | GCTTTGTAGGGAATGGAC | | | |
| | TAATATCAGTGTG | | | |
| 113 | TGCCAAGATACATTGACAC | P | 0.021675 | 0.012145 |
| | TGAACATGGAGGCAGCCA | | | |
| | GGCCCGTTTCCTC | | | |
| 114 | CTTGCGGAAAATGAGAATT | P | 0.034572 | 0.015218 |
| | GATGGTGTCCCCAATGCC | | | |
| | CCACCTCACAGAG | | | |
| 115 | TGCATGGGGGTACCCCAA | N | 0.001618 | 0.000135 |
| | TCTGAAGTCAGTAAATGAA | | | |
| | CTAATCTACAAGC | | | |
| 116 | AACAGCATCCTCTTCCACG | P | 0.038694 | 0.001479 |
| | CTCAGAAGTGTTCTGGTTG | | | |
| | GGGCCAGGCATG | | | |
| 117 | CAGATCTACTGGCGAGCG | N | 0.025043 | 0.00406 |
| | ATGAAAATGTTGCAGGGA | | | |
| | GAGTCAGCAGAGGC | | | |
| 118 | CCGTGGGCTGTGCCAAGT | P | 0.017698 | 0.011077 |
| | GTGCCCAGGGATGTGTTT | | | |
| | GCAAAGGGACATCT | | | |
| 119 | GGGATTCTGTGACTGGAA | N | 0.021955 | 0.002057 |
| | AAGGTGACAAGTTGGTGA | | | |
| | CTTTGACACTGCAG | | | |
| 120 | TCCTGGCCATGAGGACAA | N | 0.009159 | 0.003566 |
| | AAATTACTGAGTGGCCCTT | | | |
| | AAAGAGGGAAGTT | | | |
| 121 | TAATCCCGTTATGGACTCT | P | 0.025232 | 0.044454 |
| | GTCTCCAGGAGAGGGGTC | | | |
| | TATCCACCCCTGC | | | |
| 122 | TGTTGGCAGCGACACCAT | P | 0.019066 | 0.001334 |
| | CCCATACAGGCTCTTACCT | | | |
| | CTTCTCCTGAGGG | | | |
| 123 | GGCAGTTGTCTGCATTAAC | N | 0.010001 | 0.000112 |
| | CTGTTCATACACCCATTTT | | | |
| | GTCCCTTTATTG | | | |
| 124 | AGCTTTCTGCACCCCCAGT | P | 0.040871 | 0.002595 |
| | GGCATCTCCTCATCACGTT | | | |
| | CTGTGCCGTCCT | | | |
| 125 | GGGGCTTTCGTGTCCCCC | N | 0.014516 | 0.000335 |
| | TGTGCGGTCAGTGTTTTCA | | | |
| | GTACCACCTCTCT | | | |
| 126 | GAGCAGGTGAAGCCATCA | N | 0.011877 | 0.003317 |
| | AAGAATGGGGTGACCACG | | | |
| | TGACCAACTTGTGC | | | |
| 127 | AGCCCTGATGATTGGCCC | N | 0.044672 | 0.003063 |
| | CACCTCCTGCTGCCCCAT | | | |
| | AACCCTCTCTTCAT | | | |
| 128 | AAAGAAAGCTGGGCCTGT | N | 0.026121 | 0.026357 |
| | CGAAGGATGACAGGGATG | | | |
| | TGCTGCCAGGTTGC | | | |
| 129 | TCACCCGCACTGAGTCAA | N | 0.032827 | 8.36E−06 |
| | CAGACTGAGCGCGTCCAG | | | |
| | GCCTGACAGCTCTG | | | |
| 130 | GGTGTGACTTGCCTTATTG | N | 0.027346 | 0.008191 |
| | AACTGATACTGGCATATCT | | | |
| | GACTGTAAGCAG | | | |
| 131 | CAAGCCTCACTTTTCTGTG | N | 0.008937 | 5.37E−06 |
| | CCTTCCTGAGGGGGTTGG | | | |
| | GCCGGGGAGGAAA | | | |
| 132 | TGAGGACAGTTCAGAGGA | P | 0.013436 | 0.004082 |
| | GATTCAGACGAGTGTCG | | | |
| | CTGCGTGAGTGGCC | | | |
| 133 | GCTCTCTCCCATCCAAGTG | N | 0.004927 | 0.003 |
| | ACCAGATGCCCTACTCAG | | | |
| | CTTCCATCACCCC | | | |
| 134 | CAGCTGGTTTCCTGGGTAT | P | 0.008471 | 0.002079 |
| | GCCTGGACTGTTGCCCAG | | | |
| | TGTAAGATCTGTG | | | |
| 135 | AGGAGGTACAGACGGTGG | P | 0.018423 | 0.013478 |
| | AGGATGGGGTGTTTGACA | | | |
| | TCCACTTGTAATAG | | | |
| 136 | GGGGAACACACCTGAAAC | N | 0.030934 | 0.001904 |
| | TAGAGGAACAGCTTATGTG | | | |
| | GTCTATGAGGACA | | | |
| 137 | CGGACAGTGATGGCTCTT | N | 0.000473 | 0.000866 |
| | GGAAATGGGTGGATGGCA | | | |
| | CAGACTATAGGCAC | | | |
| 138 | ACCGTGGTGAACCCTTGG | P | 0.040643 | 0.005937 |
| | GGGGAGGTTCTAGCCAAA | | | |
| | GCTGGCACAGAAGA | | | |
| 139 | GGGAGTGGTGGAGCCAGT | P | 0.025216 | 0.01514 |
| | CGCTGTAACACTGAGCCT | | | |
| | CAGAGACGAACCAA | | | |
| 140 | AGGCCTTAAGCTTTGGAC | N | 0.004216 | 0.004512 |
| | CCAAGGGAAAACTGCATG | | | |
| | GAGACGCATTTCGG | | | |
| 141 | ACTGCTGCGTCATTACAG | P | 0.002145 | 0.000493 |
| | GGCACAGGCCATGGATGG | | | |
| | AAAACGCTCTCTGC | | | |
| 142 | TCTGGAAGGGGACAGTGA | N | 0.04558 | 2.54E−05 |
| | AAAGAGGAGTGACAGGAG | | | |
| | GGAAAGGGGGAGAC | | | |
| 143 | CCTGGTCAAGTGCTGGCT | N | 0.017756 | 0.012466 |
| | CTGCTGTCCTTGCCTTCCA | | | |
| | TTTCCCCTCTGCA | | | |
| 144 | TAGGTGTGGTGGCGTTAT | P | 0.029749 | 0.004606 |
| | GGCAGCCCGGCTGCTGCT | | | |
| | TGGATGCGAGCTTG | | | |
| 145 | CCTGCAGTGTAAGTACAG | N | 0.005883 | 0.00061 |
| | CACACTGTCAAATTCTTTT | | | |
| | CCTTAAGGTGCAC | | | |
| 146 | GGGCTTTTCCAAAAGCAAA | N | 0.014468 | 0.001402 |
| | CAAAGATAGGTTCCTCAG | | | |
| | GTGACCAAAACTG | | | |
| 147 | ACATCTTTCTGGCACATAA | N | 0.007055 | 0.001236 |
| | CTGTCTCCTTAACCACTGG | | | |
| | AACAGTTCAGCC | | | |
| 148 | GGCATTAGAGATCCAGCA | N | 0.013353 | 0.00265 |
| | CATTCTCAGTACTGTGGTG | | | |
| | CAGTATTAGCCCA | | | |
| 149 | CGCCCGAATCTGGCTCGG | N | 0.013846 | 0.002135 |
| | CGGAATACCTCTTAGACAA | | | |
| | GCACACCCTGGGG | | | |
| 150 | GAACTTGGAGAGCATCAG | N | 0.048169 | 0.008186 |
| | GAAGGCCCAGCTGAAATC | | | |
| | AGAGAATCTGCTCG | | | |
| 151 | TCCTCCTGAGCCTACTGC | P | 0.023875 | 0.004032 |
| | CAAACGTCCTCAGTGTTGT | | | |
| | CTGCACCTGCTCC | | | |
| 152 | CAGCTTCCAGTGGTGGCC | N | 0.011484 | 0.003845 |
| | GTAGACTTGGCTCGGAAC | | | |
| | TTAGTGGCACCAGA | | | |
| 153 | TCCCATGTTTTTACCCTGC | N | 0.000264 | 0.000431 |
| | CCCTGCCTTGATTAGACTC | | | |
| | CTAGCACCTGGC | | | |
| 154 | GTTATGCTTGTATTGAATG | N | 0.024561 | 0.005564 |
| | CTGTCTTGACATCTCTTGC | | | |
| | CTTGTCCTCCGG | | | |
| 155 | CCCGGCCAACATCAAGTG | N | 0.013639 | 0.003569 |
| | ACTTTATAGCTGCAAGAAA | | | |
| | TGTGGTATGTGGA | | | |
| 156 | CTGCTGCGACTGATGCCA | P | 0.010739 | 0.005759 |
| | GGACAACCTTTCTCCCAGA | | | |
| | TGTAAACAGAGAG | | | |
| 157 | CCTGCATAACAACACTGG | N | 0.006612 | 0.000644 |
| | GCCTTCTTAACTAAAATGC | | | |
| | TCACCACTTAGCC | | | |
| 158 | GATGGACTGTGCCCGGGT | N | 0.02211 | 0.000181 |
| | TCTGGTCATGGACAAGGG | | | |
| | GCAGGTGGCAGAGA | | | |
| 159 | GCTGTGCAAAGGTTGAGA | N | 0.01233 | 0.008166 |
| | GCTATTGCTGATTAGTTAC | | | |
| | CACAGTTCTGATG | | | |
| 160 | GTTGGTGGTGTTTGAGGG | N | 0.000869 | 0.000484 |
| | TTGGCTAGAAATGAAAGCC | | | |
| | TGGATTTTGTGCC | | | |
| 161 | CAGGCACCTGGCTGAGTG | P | 0.011278 | 0.000605 |
| | TGCTGGAGTGAGGATCTT | | | |
| | GAACAGAAACTTCC | | | |
| 162 | CAGTTATGGAGGACTTGTA | N | 0.022569 | 0.000211 |
| | TGGAGAAATTTAAGTCTTC | | | |
| | ACTGAGGGCCAC | | | |
| 163 | TCCCCACTATAACAGTTGC | N | 0.034684 | 0.009182 |
| | TGCCGCCGGAAGTACAGA | | | |
| | CCAGAAGCCCCTG | | | |
| 164 | TGTCCTGGCTTCCCCTCC | P | 0.041505 | 0.013571 |
| | CAAGGAGGATGAGGATGG | | | |
| | TGCCTCTGAGGAAA | | | |
| 165 | CCACCTCGAGAACCAAGG | N | 0.013801 | 0.002948 |
| | ATACTTTCGGAAGAGGAG | | | |
| | CAGGAAATGTTCAG | | | |
| 166 | CTTTGTTCCTGGGGAATTC | P | 0.012359 | 0.000189 |
| | ACTTCTCTTCCTCCCTCAT | | | |
| | GGAAGATGCAAG | | | |
| 167 | GCCATATTGGAGTAGCGA | N | 0.031803 | 0.001028 |
| | GGAATCTGATTCCAAGCAA | | | |
| | AAACCAGACAATG | | | |
| 168 | GCTTCAGGCGGTAAACCA | N | 0.012877 | 0.004994 |
| | ACAGCTCACAAAGGAGAA | | | |
| | AGAGCACTACCAGG | | | |
| 169 | GAAACTGTTGAAGCTGCA | N | 0.021787 | 0.010585 |
| | GAACCAACGAGGTGGCCG | | | |
| | AATCCTTCTTCAGG | | | |
| 170 | GAGGGAGAAGAATAAAGC | N | 0.003394 | 0.000978 |
| | AGCTGCCTGGAGCCTATT | | | |
| | CACTATGTTTATTG | | | |
| 171 | CAGGTCCTGCAGTCTGGC | P | 0.042554 | 0.024263 |
| | TGAGCCCTGCTTGGTTGT | | | |
| | CTCCACACACAGCT | | | |
| 172 | TAAGGCCCTGCACTGAAA | P | 0.02409 | 0.004075 |
| | ATGCAAGCTCAGGCGCCG | | | |
| | GTGGTCGTTGTGAC | | | |
| 173 | GGTGTCCATCAGTAACTAC | P | 0.032171 | 0.038592 |
| | CCCCTTTCTGCTGCCCTCA | | | |
| | CCTGTGCAAAAC | | | |
| 174 | GATCCAGCCATTACTAACC | N | 0.005094 | 5.35E−05 |
| | TATTCCTTTTTTGGGGAAA | | | |
| | TCTGAGCCTAGC | | | |
| 175 | GGGCGGCATTTACACTGT | N | 0.017674 | 0.00014 |
| | GCAAGTATTGAGAAGAGT | | | |
| | GCATAAAGACAGGG | | | |
| 176 | CATCTCTGTGGCAGCGGC | P | 0.015266 | 0.009136 |
| | AGCTATTTACATGGCCTCA | | | |
| | CAGGCATCAGCTG | | | |
| 177 | CGTGTGCCACTTGCCCAG | P | 0.042064 | 0.009795 |
| | CTTCTTGGGCACACAGAG | | | |
| | TTCTTCAATCCAAG | | | |
| 178 | TCTCCCAAATAAGATGTGC | N | 0.015764 | 4.09E−06 |
| | TGCTTACCGAGGTATCAC | | | |
| | GGGGTGGGGCTCC | | | |
| 179 | AGGGACTTTGTTTAGGCCA | N | 0.003346 | 0.00068 |
| | AGGAAGGAGCGGAAGTAG | | | |
| | GGCAACTCGGTCC | | | |
| 180 | CCTGCTAAGTCCGCTCCT | P | 0.023975 | 0.000353 |
| | GCTCCAAAAAAGGGCTCC | | | |
| | AAAAAGGCGGTGAC | | | |
| 181 | GTGGTCTGTAGCCCAATAA | N | 0.005178 | 5.12E−05 |
| | CTGGGGAACGAGTTACAG | | | |
| | ACAAACATCACCG | | | |
| 182 | CAGCTCATGCCCTCAATGT | N | 0.047967 | 1.34E−05 |
| | TTATATTGTGTTATCTGTTG | | | |
| | GGTCTGGGACA | | | |
| 183 | TTGGGAGCTGAAGAATACT | N | 0.012001 | 2.04E−06 |
| | GGACGGGGCTTCGGAGAG | | | |
| | GAAGGATGGTCCA | | | |
| 184 | ATTGCTCCCCAGACTGAAC | P | 0.011266 | 0.002311 |
| | AGAAACCTGGCCGCCGGA | | | |
| | TGGGACCTCCTTT | | | |
| 185 | CCAAGGTGTTAAGGGGAT | N | 0.000574 | 0.00161 |
| | AGTACCTCCCAATTCAAGC | | | |
| | AGAGAAACTGACC | | | |
| 186 | GGGGCACATGTTGTAAGA | N | 0.045998 | 0.00018 |
| | AACTGATTGGAAGGGGAA | | | |
| | ATGTGCAGCTCTCC | | | |
| 187 | ACTGCTGGCAGCGGCTTT | N | 0.041264 | 0.00259 |
| | CTGTATTCTGCCACACCAG | | | |
| | GGGCAGATGTTTG | | | |
| 188 | CACCCCAAGCAGTACGCT | N | 0.00743 | 0.001722 |
| | TGCTGGTCTAAGTCTTAAC | | | |
| | CCCAGGACTCAGA | | | |
| 189 | CTTTTCCAAGTTCCCAAGG | P | 0.041075 | 0.015325 |
| | CCTACAGCTGAAGCCCTTA | | | |
| | GGTACCTGTGTT | | | |
| 190 | CATACAGTAATCATGCTGC | N | 0.017807 | 0.004063 |
| | AGAAATTTGCAGTCTGCAC | | | |
| | CTTATGGATCAC | | | |
| 191 | CCTCTTGAGCTGGAACGC | P | 0.003337 | 0.004296 |
| | CTGAAACTGGAGCCTCAC | | | |
| | GAAGGGCTGCTGCT | | | |
| 192 | AGTGATTGCCTGGGCCAA | N | 0.035584 | 0.000196 |
| | GTGGCAGGTTGGGGAGGA | | | |
| | TGGCTGCAAAGAAG | | | |
| 193 | CTTCCAGTCTTTTTAGAAC | N | 0.006781 | 0.000304 |
| | GTGGTGGAGGAGGGTTGT | | | |
| | GTGTGCCCCAGGG | | | |
| 194 | GGGGGGTAGAATTTAGTA | N | 0.010088 | 0.003144 |
| | AATATTCCAGCCGGTCGTT | | | |
| | TTATGCACAAGGC | | | |
| 195 | TGATCCGAAGGAGGAGTG | P | 0.034854 | 0.004035 |
| | GCGCTGGGCGCTGGACTC | | | |
| | GCTGGTGTGAAAAT | | | |
| 196 | GAGTCTCAAGTCCGTATGT | N | 0.000755 | 0.002992 |
| | AAATCAGATCTCCCCTCTC | | | |
| | ACCCCTCCCACC | | | |
| 197 | CAGATTTGGCACCTACTCC | P | 0.004675 | 0.001488 |
| | TGCCCCACAGAGCACACC | | | |
| | ACGAAACACTGTC | | | |
| 198 | GAGCTTCCCGAGAATGGG | N | 0.001177 | 0.000287 |
| | GCCTGGGTTTGATTCATCT | | | |
| | GTTTTCTACAGGG | | | |
| 199 | GAGACCAGTAGATTTTCAA | N | 0.041733 | 0.000244 |
| | TGGGAAATGTACCTAGCAA | | | |
| | GCTGGTTCTTGC | | | |
| 200 | AACCAGGGGCCATGAATC | N | 0.034866 | 0.000449 |
| | ACCTTTTGGTCTGGAGGG | | | |
| | AAGCCTTGGGGCTG | | | |
| 201 | GTCCCTGTCCCTCCCAAA | P | 0.028729 | 0.003586 |
| | GCACAGAGCACAGAAATG | | | |
| | AGGCCGTTTACATG | | | |
| 202 | GCAGATAGAGTGTTACCG | P | 0.005896 | 0.000645 |
| | ACGGGTGGAAAAGCTACG | | | |
| | GAATCGCCAGGATG | | | |
| 203 | CAGCCATAGGTGCAGTTT | N | 0.007314 | 0.006682 |
| | GCTTCTACATGATGCTAAA | | | |
| | GGCTGCGAATGGG | | | |
| 204 | CCCTGGTATTGATTTCTCA | P | 0.007792 | 0.003889 |
| | GGACTTTGGAGGGCTCTG | | | |
| | ACACCATGCTCAC | | | |
| 205 | GGCTGGCAGTCTTTGTCG | N | 0.034813 | 0.000624 |
| | TTGTTCATTCTGGGGATAA | | | |
| | AGGGGAACTAGGC | | | |
| 206 | CCAGAGCCTGTGATGCCT | P | 0.007285 | 0.001073 |
| | CCTCAGCAGGTAGAGCAG | | | |
| | ATGGAAATACCACC | | | |
| 207 | GGGACTCAGCATTTTCCA | N | 0.021834 | 0.000496 |
| | GTCTTTTTCAGGGGTAGAC | | | |
| | AGGGGAGCCTGGG | | | |
| 208 | CCTGTGTTTGCATCCTCTG | N | 0.005121 | 0.008657 |
| | TTCCTATTCTGCCCTTGCT | | | |
| | CTGTGTCATCTC | | | |
| 209 | GGGTGCCTTCCTTGGTCA | N | 0.004562 | 0.002999 |
| | CCAAGGCAGTGCGTGCAC | | | |
| | GTTAGGGTTTCCTT | | | |
| 210 | CTCAAGGTCATGCAGTTAG | N | 0.02031 | 0.005178 |
| | TAAGTGGCAGAACAGGGA | | | |
| | CTTGAACCAAGCC | | | |
| 211 | CCTCCACGTGATTCCTACA | P | 0.003558 | 0.001324 |
| | GCAGTTCAAGCCGCGGAG | | | |
| | CACCAAGAGGTGG | | | |
| 212 | TGCTGCTCCTGCTGCCCC | P | 0.013625 | 0.010856 |
| | ATGAGCTGTGCCAAGTGT | | | |
| | GCCCAGGGCTGCAT | | | |
| 213 | CTATTAACGCTACGATGCC | P | 0.015462 | 0.004802 |
| | TGAACCTACCAAGTCTGCT | | | |
| | CCTGCCCCAAAG | | | |
| 214 | GATGGTTCTGATGCTGTCA | N | 0.017559 | 9.16E−06 |
| | GCCTCTGGGTGCAAATTCT | | | |
| | GAGGGCCCGGGA | | | |
| 215 | CCCTCACGCACCCGCTCA | N | 0.009263 | 0.002613 |
| | CGCACCCTCGGTGAATCC | | | |
| | TTGGTGATGATTTT | | | |
| 216 | AGTACCACTCCAAAGGCA | N | 0.007405 | 0.001662 |
| | AGGAACCATGATTGACAAC | | | |
| | AGTCAAGCTGTGG | | | |
| 217 | TGGAAGCCCTCACCAAGC | P | 0.027769 | 0.002064 |
| | ACTTCCAGGACTGACCAG | | | |
| | AGGCCGCGCGTCCA | | | |
| 218 | CCCCTACTTATTGCCACAG | N | 0.023489 | 8.38E−06 |
| | AGGAGGGATCTTTTCCATA | | | |
| | ACTGAAGGGGAG | | | |
| 219 | GCACGACGATGAGGTGAC | N | 0.004535 | 0.000151 |
| | AGTCACGGCCCTGGCCAA | | | |
| | CGTCAACATTGGGA | | | |
| 220 | GAATACTTCTCTTGCTGAG | P | 0.017275 | 0.009131 |
| | AGCCGATGCCCGTCCCCG | | | |
| | GGCCAGCAGGGAT | | | |
| 221 | GCACAGTTGAGGAGCCAG | N | 0.014228 | 0.002628 |
| | AGACTTCTTAAATCATCCT | | | |
| | TAGAACCGTGACC | | | |
| 222 | CTTTAATTCTTGGGCCTCC | P | 0.00127 | 0.001745 |
| | AATAAGTGTCCCATAGGTG | | | |
| | TCTGGCCAGGCC | | | |
| 223 | TACCTGGCTACAGAAAGAA | N | 0.011287 | 0.003864 |
| | GATGCCAGATGACACTTAA | | | |
| | GACCTACTTGTG | | | |
| 224 | GACCCCCTTTTAAGCCAGT | N | 0.041676 | 0.020247 |
| | GAGCTGGGCTTCAGTTTTT | | | |
| | CCCAGGCCATGC | | | |
| 225 | CCCCTGCAAGGGTAGAGT | P | 0.033071 | 0.000577 |
| | CAGGTGAGAGTCCCTTGG | | | |
| | TGAGTCATTTGTAC | | | |
| 226 | GCCCAGTACTGGAGAAAA | N | 0.014944 | 5.33E−05 |
| | TGAAACTGGGATTGACCC | | | |
| | ATCAAGATGCTTGG | | | |
| 227 | GGGACGAGACAGGTGCTA | N | 0.005603 | 0.00053 |
| | AAGTTGAACGAGCTGATG | | | |
| | GATATGAACCACCA | | | |
| 228 | CCCCAGTGTGTATAAGCT | N | 0.012426 | 0.006972 |
| | GGCATTTCGCCAGCTTGTA | | | |
| | CGTAGCTTGCCAC | | | |
| 229 | CTGTCCCGCTGCGTGTTTT | P | 0.003192 | 0.005766 |
| | CCTCTTGATCGGGAACTC | | | |
| | CTGCTTCTCCTTG | | | |
| 230 | GACTCTGATGTTGGGTAG | P | 0.009787 | 0.002361 |
| | CTGGCCTCTGTGGGGATT | | | |
| | GTAAGTGCCCTGAG | | | |
| 231 | GAGGTGTTTGCATGTGGC | P | 0.01286 | 0.002536 |
| | CATTACCGTCATTGGCCTG | | | |
| | TGAAGCATTGGAC | | | |
| 232 | CACACTGGGGCTGCCTTT | N | 0.001533 | 0.000314 |
| | CTCTGACTCTGTCTTCCCC | | | |
| | AAGTCAGGGGGCT | | | |
| 233 | TACCACTGCAAAGTGATG | N | 0.002811 | 0.001328 |
| | GAAAAGGGTGGAGAACAG | | | |
| | GGGAGTAGCCAGGC | | | |
| 234 | GCTTTCTTAGGGAAATGAC | N | 0.01812 | 0.001642 |
| | AGGGCAAAGCAATTTTTCT | | | |
| | GTTGGCTTTGGG | | | |
| 235 | CTACGCCATGGGACATCT | N | 0.008083 | 0.01079 |
| | AATTCAGAGGAAGAAGGT | | | |
| | CCATGTCTTTGGGG | | | |
| 236 | GAGGATCATTACAGAGAC | N | 0.013942 | 0.000257 |
| | AGACTCTCCCGAGACATG | | | |
| | GGCCACACTGATAG | | | |
| 237 | CTGTGGGAGGGCTTCTTC | N | 0.028462 | 0.000297 |
| | CCTGTGCGCTGTTGCCCA | | | |
| | TCCAAGCCTAATAT | | | |
| 238 | GTAACTGTAAGTTCACATC | N | 0.008932 | 0.000714 |
| | AACCTCATGGGTTTGGCTT | | | |
| | GAGGCTGGTAGC | | | |
| 239 | CCTGGCCAAGTGAGGAAG | N | 0.024086 | 0.000229 |
| | GAAAGCAGAAAGGTGACG | | | |
| | ATTCTCACTCACCT | | | |
| 240 | CAGCCTGACGAGCTGCCC | N | 0.010261 | 0.015509 |
| | GAGGTGGATAACCTGACA | | | |
| | CTGGACGGGAATCC | | | |
| 241 | GCTCTGCACCATCCCTCA | P | 0.041028 | 0.01213 |
| | CCCAGACCGTAGACACCA | | | |
| | GGGAACCACATCTA | | | |
| 242 | CTGCGAGTTTTCGGGTGG | P | 0.027036 | 0.011983 |
| | GCAGACGCACTGTTGAAT | | | |
| | CTGGTAGCCAGGGT | | | |
| 243 | GAGCGTGATGATTGGGTG | P | 0.000645 | 0.001456 |
| | TTCATACGCTTGTGTGAGA | | | |
| | TGTGCCACCCTTG | | | |
| 244 | GAAACATTCTAGTAGCCTG | P | 0.001124 | 0.000461 |
| | GAGAAGTTGACCTACCTGT | | | |
| | GGAGATGCCTGC | | | |
| 245 | AGGTCTCCTCTGGGAGGT | P | 0.031257 | 0.004239 |
| | CTTGGCCGACTCAGGGAC | | | |
| | CTAAGCCACGTTAA | | | |
| 246 | CAGGCTCATAGCAGCTAC | N | 0.008003 | 0.004521 |
| | TGTGTAGAAAATTCCCCCT | | | |
| | ACTTCTAATTTGC | | | |
| 247 | TCTTGCTGACAGAATAGGT | N | 0.009211 | 0.003011 |
| | TCCGTTCTGGGCGGTGGT | | | |
| | TCTCGAGCCTGCC | | | |
| 248 | CCTCAGCAGCTGGTAATCT | N | 0.006996 | 0.013739 |
| | TGCTCTGCTTGACAACATC | | | |
| | TGAGTGCAGCCG | | | |
| 249 | CATTCTGGGACTACCGTG | N | 0.003676 | 0.001577 |
| | AAGCCTGGAGTAGGGAGA | | | |
| | GCGAGTTTGGGAGC | | | |
| 250 | GCTGGCGTGCCCATGTTG | N | 0.001542 | 0.002048 |
| | CAGATATTTTCCCGAGTTC | | | |
| | CCCAGAATGGATG | | | |
| 251 | GACCTCCAGAGTGAAGAT | N | 0.001336 | 8.77E−06 |
| | GGGTGACTAGATGATATGT | | | |
| | GTGGGTGGGGCCG | | | |
| 252 | GGGAACTGGCATTACTGG | N | 0.024337 | 0.00072 |
| | AACTAATGGTTTTAACCTC | | | |
| | CTTAACCACCAGC | | | |
| 253 | CTGGGCAGTGAAGTGGAT | N | 0.026178 | 0.007556 |
| | ATCACTGAAGGAGATAGG | | | |
| | AAGCCAGACTACAC | | | |
| 254 | GCAAAAGTGAAGCAGGAA | P | 0.012252 | 0.001468 |
| | AGAAGGGCCCTGGCAGGC | | | |
| | CAACAGGCTCAAAG | | | |
| 255 | AACAGCTCTGTGTGTGAA | N | 0.000599 | 0.00067 |
| | GGTGAGGACTCTTGGAAG | | | |
| | CAGGCCATCCTGGC | | | |
| 256 | CCATCTCCGGGACGTTCT | P | 0.046366 | 0.032238 |
| | CGGCTCTGCCTCATTGTGT | | | |
| | GCAGAAACTGTGG | | | |
| 257 | GGAGGCCAGACGTTGACG | N | 0.03009 | 0.000127 |
| | CTGCAGGGAGAGGGTGGT | | | |
| | GGGCGCAGCCGCTA | | | |
| 258 | GGTGGGGATTCTGGAACA | N | 0.01535 | 0.000204 |
| | ATCATCTTAGGGGGTGTG | | | |
| | CCATGCTGTTCCTG | | | |
| 259 | AGCTTCCCAAGCTGTATGT | N | 0.014478 | 0.009585 |
| | GAAGCTACCTTACTGTGTG | | | |
| | AGTTGTGCAATT | | | |
| 260 | ACTGCTGCTTCCTACCTGC | N | 0.003324 | 0.00088 |
| | AAGACGAACAATGTATGTT | | | |
| | TCAAGGGTGAGC | | | |
| 261 | GCGCCTCCAGGCCAAGAA | N | 0.024024 | 0.002229 |
| | GGAGGAGTTCATCAAGAC | | | |
| | TTTATCCAAGGAGG | | | |
| 262 | GTGGAAAGGATGGGGTGG | N | 0.006424 | 6.9E−05 |
| | AATACAGTTGTGGGCTATT | | | |
| | GGTAAGGTCCCAG | | | |
| 263 | TATTGCAGCCATCCATCTT | N | 0.001884 | 0.000123 |
| | GGGGGCTCATCCATCACA | | | |
| | CCCGGGTTGCTAG | | | |
| 264 | CGGCCCCTGAGCAAGACA | N | 0.002721 | 0.004042 |
| | GTACGCTTCAACGTGCTCA | | | |
| | AGGTCACCAAGGC | | | |
| 265 | CCCAGCTGAACCCGAGGC | N | 0.019929 | 0.004179 |
| | TAAAGAAGATGAGGCAAG | | | |
| | AGAAAATGTACCCC | | | |
| 266 | TAGCAGCTTGGGCACCTC | P | 0.01371 | 0.001928 |
| | CACTCTGTGCGGTCTGAT | | | |
| | GGCCCCAGCAAGGT | | | |
| 267 | GACCGCTATGCTCAGGAC | P | 0.037006 | 0.005895 |
| | ATGGGAGACAACTGCATTA | | | |
| | CTCAGTGATCAAG | | | |
| 268 | TGGAGGTGGTTTTGGTGG | N | 0.045541 | 0.006933 |
| | GAATGACAACTTTGGTCAT | | | |
| | GGAGGAAACTTCA | | | |
| 269 | ATGTGGACTGCCCTACATT | P | 0.020335 | 0.002738 |
| | TGGCCTGTGCCACTGGCC | | | |
| | AACCGGAAATGGT | | | |
| 270 | TTTTGTTAACGTCTGCCAC | N | 0.016459 | 0.002366 |
| | CCCCACTCTCACCCCCAA | | | |
| | GCTCTAAGCCCCC | | | |
| 271 | ACATGTTCCGATGCCTGTG | P | 0.003918 | 0.002067 |
| | GAAGACATGCCGACGTCT | | | |
| | CCTCTGCCTAGGG | | | |
| 272 | GAGTCTTCGTGGATGATGT | P | 0.002408 | 0.000801 |
| | GACCATTGAGGACCTGTC | | | |
| | AGGCTACATGGAG | | | |
| 273 | ACTCTGGCCCCTATGGCG | P | 0.005261 | 0.000485 |
| | GTGGAGGCCAGTACTTTG | | | |
| | CAAAACCACGAAAC | | | |
| 274 | TCTTCCATACATTAGTTCC | P | 0.018924 | 0.008322 |
| | CACCATCGCATGCCCAGG | | | |
| | GACCACTGCCTGG | | | |
| 275 | AAGCTAAGGCCGCGTTGG | N | 0.007037 | 0.00584 |
| | GGTAAGGCCCTCACTTCAT | | | |
| | CCTGCGACTAGCA | | | |
| 276 | CGACCGGCTCGTATTCCG | N | 0.032215 | 0.013902 |
| | ATCAGTCGCTTCCATTGTT | | | |
| | AGCATCGTACACG | | | |
| 277 | AGATGTGTTTTCAGAGCTA | N | 0.002118 | 0.001912 |
| | GGTACAGAGGAATGTTTG | | | |
| | CTACCTTTAGCGG | | | |
| 278 | CGGGTGCAAGCCCGTGTG | P | 0.006615 | 0.002452 |
| | TCTGGCCTCTTTCCTCGTG | | | |
| | AAGACGATGTGTC | | | |
| 279 | CAGTGGCTACCACCTGTA | P | 0.017095 | 0.013578 |
| | ATCTCAGCAGTTTGGGAG | | | |
| | ACCAAAGCAGGACG | | | |
| 280 | CAAGCAAAATTGTGGGCA | N | 0.025783 | 0.003476 |
| | AGAGAATCCGCGTGAAAC | | | |
| | TAGATGGCAGCCGG | | | |
| 281 | GAGGGCACCAGGCACAAC | N | 0.02207 | 0.000134 |
| | GACATCGAGCTCTACAGC | | | |
| | CAGTACCTGGAGGG | | | |
| 282 | TCTGCAAAGGGGCGTGCA | P | 0.00797 | 0.026713 |
| | GCTGCTGTGTCTGATGTG | | | |
| | GGGACAGCTCTTCT | | | |
| 283 | GTGTAAGGGTCCAGCTGA | N | 0.021321 | 0.001836 |
| | TCAAGAATGGCAAGAAAAT | | | |
| | CACAGCCTTTGTA | | | |
| 284 | GATGGGCACCTGGATAAC | N | 0.016792 | 4.55E−07 |
| | TCAGGATGGGGGCTGCTC | | | |
| | ACAAAGACCACATC | | | |
| 285 | GGAGCCCCTTGGAGTATG | P | 0.038278 | 0.009229 |
| | GCTTTTCACATGGGCTTCT | | | |
| | ATACCGCTTCGAC | | | |
| 286 | ACTGTCAGGCCAGTGCTG | P | 0.020498 | 0.003103 |
| | CTGCGGATGTGAGAAACC | | | |
| | GGTGATCCGAAGGC | | | |
| 287 | CCCCTGGGCTATCATCTG | P | 0.007544 | 0.000284 |
| | CATGGGGCTGGGGTCCTC | | | |
| | CTGTGCTATTTGTA | | | |
| 288 | CACAAGAGTGGTCATAAG | N | 0.014948 | 0.00028 |
| | GGGGTTTGAACTGAGTCC | | | |
| | CACTACCTCGGGGG | | | |
| 289 | ACCCCTGGGCTACCATCT | P | 0.007981 | 0.001869 |
| | GCATGGGGCTGGGGTCCT | | | |
| | CCTGTGCTATTTGT | | | |
| 290 | CCCTCTCAAGTAATGGCTC | N | 0.010546 | 0.000671 |
| | AGCTAATAAAGGCGCACAT | | | |
| | GACTCCCAAAAA | | | |
| 291 | GTACTTCGGGGCTCTACA | N | 0.009447 | 0.000317 |
| | GACAATCTGATGGATGACA | | | |
| | TAGAAAGGGCAGT | | | |
| 292 | TTCTCAGGAATCGGCGGG | N | 0.037168 | 0.000823 |
| | AAGAAGCCCCCTTGATGG | | | |
| | AGTCTGGTGGGGTT | | | |
| 293 | TGGTATTTGGGCAGCTGG | P | 0.002393 | 0.002545 |
| | TGATCGTTGGTCCCGGCG | | | |
| | CCCTTTCTTTACTG | | | |
| 294 | CTGTATGCCCAGGGAAAG | N | 0.003513 | 0.000732 |
| | TGGCGTTATAACAGGAAG | | | |
| | CAGAGTGGCTATGG | | | |
| 295 | CCAACGACTAACCCTGAAA | N | 0.004463 | 8.14E−05 |
| | TGGGGGTGTTCCAGCCTT | | | |
| | CAGCGAGATGGCC | | | |
| 296 | CAAGAGTGCCACAGATATT | N | 0.04305 | 0.000964 |
| | CTCCTGGGGGAGGATGCT | | | |
| | GGTGTTGGGAGGG | | | |
| 297 | GAACAATGGTCGTGCCAA | N | 0.020953 | 0.01742 |
| | AAAGGGCCGCGGCCACAT | | | |
| | GCAGCCTATTCGCT | | | |
| 298 | CGGCCTGATGGAGAGAAG | N | 0.008627 | 0.002771 |
| | GAACATGTTCGACTGGCT | | | |
| | CCTGATTACAATGC | | | |
| 299 | ACTCTGTAAGGAAGTTCCC | N | 0.016212 | 0.007996 |
| | AAATACAAACTTATAACCC | | | |
| | CAGCTGTGGTCT | | | |
| 300 | GTAACAGGGTGCAGTGTT | P | 0.008098 | 0.00186 |
| | GTTTATACTTCATTGCTCC | | | |
| | TTCAGGACATGGG | | | |
| 301 | TATGTCCTCTGATTGGGAC | P | 0.003643 | 0.000478 |
| | AAGGCACCTGCATTCACA | | | |
| | GGCGGCCCTGAGC | | | |
| 302 | GGCTTGGCCACCCTGCCG | N | 0.0296 | 0.0072 |
| | CTGCCCAGCCACATCCCT | | | |
| | TGGTTTTGTATTTT | | | |
| 303 | TCATGGCCGCCCTCAGAC | N | 0.005792 | 0.000672 |
| | CCCTTGTGAAGCCCAAGA | | | |
| | TCGTCAAAAAGAGA | | | |
| 304 | ATCCTCTGAGAAAACAGCC | P | 0.003984 | 0.000228 |
| | CACAGGACTGGGTCCTCC | | | |
| | TTATCCGTCTTGC | | | |
| 305 | AAATGACAAAGAGCGAGT | N | 0.028468 | 0.013861 |
| | GGCAGCTGCAATGGAAAA | | | |
| | CCCCAACTTACGGG | | | |
| 306 | AGCTCAGCGGTTACTTCG | P | 0.001345 | 0.000396 |
| | CGTGTCATCAAACCACCTC | | | |
| | TCTGGGTTGTTCG | | | |
| 307 | TAGAACTATTATTGACCAC | P | 0.009458 | 0.006369 |
| | GCCTCCTCCAAGTCCCAG | | | |
| | CGAGCCCGTGTAC | | | |
| 308 | GCACCTGCTGTAGACAGA | N | 0.007479 | 0.001297 |
| | AGACAGTATTCTGCAATGA | | | |
| | CTGAGAATGCAGT | | | |
| 309 | ACTGCTGCTTCCTACCTGC | N | 0.002691 | 0.002238 |
| | AAGACGCACAATGTATGTT | | | |
| | TCAAGGGTGAGC | | | |
| 310 | GTGCCCCTCTGTATCTTTT | N | 0.015388 | 0.006234 |
| | GAGAAGTGCGGAATAGGT | | | |
| | TGCTTCTACCACC | | | |
| 311 | TTGGGAGGCAGAGGCCGG | N | 0.013481 | 0.000858 |
| | TGGGTTGCTTTAGCTCAG | | | |
| | GAGTTGGAGACAAG | | | |
| 312 | CATATATTGCATGGAGGTA | N | 0.039958 | 0.031385 |
| | CCCCAATCTGAAGTCAGTA | | | |
| | AATGAACTAATC | | | |

TABLE 2A
143 Exemplary Positive and Negative Predictor Genes of GVHD Outcome and Housekeeping (R, reference, or HSK) genes

| | | | | | Accession No. Basic | | | |
|---|---|---|---|---|---|---|---|---|
| RNA143 Index | RNA192 Index | RNA1538 Index | ProbeID | Accession No. | (without decimal) | Gene Name | Symbol | Synonyms |
| 1 | 3 | — | 7570326 | NM_000024.4 | NM_000024 | adrenergic, | ADRB2 | B2AR; |
| | | | | | | beta-2-, | | BETA2AR; |
| | | | | | | receptor, | | BAR; |
| | | | | | | surface | | ADRBR; |
| | | | | | | (ADRB2), | | ADRB2R |
| | | | | | | mRNA. | | |
| 2 | 4 | — | 5270431 | NM_004538.3 | NM_004538 | nucleosome | NAP1L3 | MB20; |
| | | | | | | assembly | | NPL3; |
| | | | | | | protein 1-like | | MGC26312 |
| | | | | | | 3 (NAP1L3), | | |
| | | | | | | mRNA. | | |
| 3 | 5 | — | 4210754 | NM_001018069.1 | NM_001018069 | SERPINE1 | SERBP1 | CGI-55; |
| | | | | | | mRNA | | FLJ90489; |
| | | | | | | binding | | DKFZp564M2423; |
| | | | | | | protein 1 | | CHD3IP; |
| | | | | | | (SERBP1), | | PAIRBP1; |
| | | | | | | transcript | | PAI- |
| | | | | | | variant 3, | | RBP1; |
| | | | | | | mRNA. | | HABP4L |
| 4 | 6 | — | 2810255 | NM_015989.3 | NM_015989 | cysteinesulfinic | CSAD | PCAP; |
| | | | | | | acid | | MGC119355; |
| | | | | | | decarboxylase | | MGC119354; |
| | | | | | | (CSAD), | | MGC119357; |
| | | | | | | mRNA. | | CSD |
| 5 | 9 | — | 6840471 | NM_021601.3 | NM_021601 | CD79a | CD79A | MB-1; |
| | | | | | | molecule, | | IGA |
| | | | | | | immunoglobulin- | | |
| | | | | | | associated | | |
| | | | | | | alpha | | |
| | | | | | | (CD79A), | | |
| | | | | | | transcript | | |
| | | | | | | variant 2, | | |
| | | | | | | mRNA. | | |
| 6 | 10 | — | 4280743 | NM_000997.3 | NM_000997 | ribosomal | RPL37 | MGC99572 |
| | | | | | | protein L37 | | |
| | | | | | | (RPL37), | | |
| | | | | | | mRNA. | | |
| 7 | 12 | — | 4590139 | NM_006297.1 | NM_006297 | X-ray repair | XRCC1 | RCC |
| | | | | | | complementing | | |
| | | | | | | defective | | |
| | | | | | | repair in | | |
| | | | | | | Chinese | | |
| | | | | | | hamster cells | | |
| | | | | | | 1 (XRCC1), | | |
| | | | | | | mRNA. | | |
| 8 | 13 | — | 5340110 | NM_024921.2 | NM_024921 | premature | POF1B | FLJ22792; |
| | | | | | | ovarian | | POF |
| | | | | | | failure, 1B | | |
| | | | | | | (POF1B), | | |
| | | | | | | mRNA. | | |
| 9 | 14 | — | 2940048 | NM_001003789.1 | NM_001003789 | RAB, member | RABL2B | |
| | | | | | | of RAS | | |
| | | | | | | oncogene | | |
| | | | | | | family-like 2B | | |
| | | | | | | (RABL2B), | | |
| | | | | | | transcript | | |
| | | | | | | variant 1, | | |
| | | | | | | mRNA. | | |
| 10 | 17 | — | 1300671 | NM_005437.2 | NM_005437 | nuclear | NCOA4 | RFG; |
| | | | | | | receptor | | ARA70; |
| | | | | | | coactivator 4 | | DKFZp762E1112; |
| | | | | | | (NCOA4), | | PTC3; |
| | | | | | | mRNA. | | ELE1 |
| 11 | 21 | — | 7560037 | NM_133471.1 | NM_133471 | KIAA1949 | KIAA1949 | HKMT1098 |
| | | | | | | (KIAA1949), | | |
| | | | | | | mRNA. | | |
| 12 | 22 | — | 2030274 | NM_138923.1 | NM_138923 | TAF1 RNA | TAF1 | KAT4; |
| | | | | | | polymerase II, | | CCG1; |
| | | | | | | TATA box | | P250; |
| | | | | | | binding | | BA2R; |
| | | | | | | protein (TBP)- | | TAFII250; |
| | | | | | | associated | | NSCL2; |
| | | | | | | factor, | | TAF2A; |
| | | | | | | 250 kDa | | OF; |
| | | | | | | (TAF1), | | DYT3; |
| | | | | | | transcript | | CCGS |
| | | | | | | variant 2, | | |
| | | | | | | mRNA. | | |
| 13 | 24 | — | 6940088 | NM_201554.1 | NM_201554 | diacylglycerol | DGKA | MGC42356; |
| | | | | | | kinase, alpha | | DGK- |
| | | | | | | 80 kDa | | alpha; |
| | | | | | | (DGKA), | | DAGK1; |
| | | | | | | transcript | | MGC12821; |
| | | | | | | variant 4, | | DAGK |
| | | | | | | mRNA. | | |
| 14 | 25 | — | 580240 | NM_145755.1 | NM_145755 | tetratricopeptide | TTC21A | STI2; |
| | | | | | | repeat | | MGC70523; |
| | | | | | | domain 21A | | DKFZp686P18239; |
| | | | | | | (TTC21A), | | MGC156293 |
| | | | | | | mRNA. | | |
| 15 | 27 | — | 7400408 | NM_178471.1 | NM_178471 | G protein- | GPR119 | hGPCR2; |
| | | | | | | coupled | | GPCR2; |
| | | | | | | receptor 119 | | MGC119957 |
| | | | | | | (GPR119), | | |
| | | | | | | mRNA. | | |
| 16 | 29 | — | 1010224 | NM_020654.3 | NM_020654 | SUMO1/sentrin | SENP7 | KIAA1707; |
| | | | | | | specific | | MGC157730 |
| | | | | | | peptidase 7 | | |
| | | | | | | (SENP7), | | |
| | | | | | | transcript | | |
| | | | | | | variant 1, | | |
| | | | | | | mRNA. | | |
| 17 | 30 | — | 5700519 | NM_002082.2 | NM_002082 | G protein- | GRK6 | FLJ32135; |
| | | | | | | coupled | | GPRK6 |
| | | | | | | receptor | | |
| | | | | | | kinase 6 | | |
| | | | | | | (GRK6), | | |
| | | | | | | transcript | | |
| | | | | | | variant 2, | | |
| | | | | | | mRNA. | | |
| 18 | 31 | — | 7100615 | NM_001042472.1 | NM_001042472 | abhydrolase | ABHD12 | DKFZP434P106; |
| | | | | | | domain | | dJ965G21.2; |
| | | | | | | containing 12 | | C20orf22; |
| | | | | | | (ABHD12), | | ABHD12A; |
| | | | | | | transcript | | BEM46L2 |
| | | | | | | variant 1, | | |
| | | | | | | mRNA. | | |
| 19 | 32 | — | 2260615 | NM_004698.1 | NM_004698 | PRP3 pre- | PRPF3 | HPRP3P; |
| | | | | | | mRNA | | HPRP3; |
| | | | | | | processing | | Prp3p; |
| | | | | | | factor 3 | | RP18; |
| | | | | | | homolog (S. cerevisiae) | | PRP3 |
| | | | | | | (PRPF3), | | |
| | | | | | | mRNA. | | |
| 20 | 33 | — | 4200458 | NM_005249.3 | NM_005249 | forkhead box | FOXG1 | FKHL1; |
| | | | | | | G1 (FOXG1), | | KHL2; |
| | | | | | | mRNA. | | HFK3; |
| | | | | | | | | HBF2; |
| | | | | | | | | FOXG1C; |
| | | | | | | | | QIN; |
| | | | | | | | | FKHL2; |
| | | | | | | | | HBF-2; |
| | | | | | | | | HBF-1; |
| | | | | | | | | FKH2; |
| | | | | | | | | HFK1; |
| | | | | | | | | FKHL4; |
| | | | | | | | | HBF-G2; |
| | | | | | | | | BF2; |
| | | | | | | | | FHKL3; |
| | | | | | | | | BF1; |
| | | | | | | | | HFK2; |
| | | | | | | | | HBF-3; |
| | | | | | | | | FOXG1B; |
| | | | | | | | | FKHL3; |
| | | | | | | | | FOXG1A |
| 21 | 34 | — | 4810333 | NM_153701.1 | NM_153701 | interleukin 12 | IL12RB1 | CD212; |
| | | | | | | receptor, beta | | IL-12R- |
| | | | | | | 1 (IL12RB1), | | BETA1; |
| | | | | | | transcript | | IL12RB; |
| | | | | | | variant 2, | | MGC34454 |
| | | | | | | mRNA. | | |
| 22 | 36 | — | 1820035 | NM_001077268.1 | NM_001077268 | zinc finger, | ZFYVE19 | FLJ14840; |
| | | | | | | FYVE domain | | MPFYVE |
| | | | | | | containing 19 | | |
| | | | | | | (ZFYVE19), | | |
| | | | | | | mRNA. | | |
| 23 | 37 | — | 6770168 | NM_006371.3 | NM_006371 | cartilage | CRTAP | CASP; |
| | | | | | | associated | | OI7 |
| | | | | | | protein | | |
| | | | | | | (CRTAP), | | |
| | | | | | | mRNA. | | |
| 24 | 39 | — | 5360376 | NM_006762.1 | NM_006762 | lysosomal | LAPTM5 | MGC125860; |
| | | | | | | associated | | MGC125861 |
| | | | | | | multispanning | | |
| | | | | | | membrane | | |
| | | | | | | protein 5 | | |
| | | | | | | (LAPTM5), | | |
| | | | | | | mRNA. | | |
| 25 | 41 | — | 4850082 | NM_003780.3 | NM_003780 | UDP- | B4GALT2 | beta4Gal- |
| | | | | | | Gal:betaGlcNAc | | T2; |
| | | | | | | beta 1,4- | | B4Gal-T3; |
| | | | | | | galactosyltransferase, | | B4Gal-T2 |
| | | | | | | polypeptide 2 | | |
| | | | | | | (B4GALT2), | | |
| | | | | | | transcript | | |
| | | | | | | variant 2, | | |
| | | | | | | mRNA. | | |
| 26 | 42 | — | 2970017 | NM_005978.3 | NM_005978 | S100 calcium | S100A2 | S100L; |
| | | | | | | binding | | CAN19; |
| | | | | | | protein A2 | | MGC111539 |
| | | | | | | (S100A2), | | |
| | | | | | | mRNA. | | |
| 27 | 44 | — | 1110575 | NM_002494.2 | NM_002494 | NADH | NDUFC1 | MGC138266; |
| | | | | | | dehydrogenase | | KFYI; |
| | | | | | | (ubiquinone) | | MGC126847; |
| | | | | | | 1, | | MGC117464 |
| | | | | | | subcomplex | | |
| | | | | | | unknown, 1, | | |
| | | | | | | 6 kDa | | |
| | | | | | | (NDUFC1), | | |
| | | | | | | mRNA. | | |
| 28 | 45 | — | 1740382 | NM_000161.2 | NM_000161 | GTP | GCH1 | DYT5; |
| | | | | | | cyclohydrolase | | GTP-CH- |
| | | | | | | 1 (dopa- | | 1; |
| | | | | | | responsive | | GTPCH1; |
| | | | | | | dystonia) | | GCH |
| | | | | | | (GCH1), | | |
| | | | | | | transcript | | |
| | | | | | | variant 1, | | |
| | | | | | | mRNA. | | |
| 29 | 46 | — | 780184 | NM_006346.2 | NM_006346 | progesteroneimmunomodulatory | PIBF1 | RP11- |
| | | | | | | binding | | 505F3.1; |
| | | | | | | factor 1 | | KIAA1008; |
| | | | | | | (PIBF1), | | PIBF1; |
| | | | | | | mRNA. | | C13orf24 |
| 30 | 48 | — | 3610280 | NM_016446.2 | NM_016446 | chromosome | C9ORF127 | NGX6; |
| | | | | | | 9 open | | RP11- |
| | | | | | | reading frame | | 112J3.10; |
| | | | | | | 127 | | NAG-5; |
| | | | | | | (C9orf127), | | MGC120460 |
| | | | | | | mRNA. | | |
| 31 | 52 | — | 1510035 | NM_001981.2 | NM_001981 | epidermal | EPS15 | AF1P; |
| | | | | | | growth factor | | MLLT5; |
| | | | | | | receptor | | AF-1P |
| | | | | | | pathway | | |
| | | | | | | substrate 15 | | |
| | | | | | | (EPS15), | | |
| | | | | | | mRNA. | | |
| 32 | 53 | — | 6520605 | NM_005871.2 | NM_005871 | survival motor | SMNDC1 | SPF30; |
| | | | | | | neuron | | SMNR |
| | | | | | | domain | | |
| | | | | | | containing 1 | | |
| | | | | | | (SMNDC1), | | |
| | | | | | | mRNA. | | |
| 33 | 54 | — | 6250288 | NM_022474.2 | NM_022474 | membrane | MPP5 | FLJ12615; |
| | | | | | | protein, | | PALS1 |
| | | | | | | palmitoylated | | |
| | | | | | | 5 (MAGUK | | |
| | | | | | | p55 subfamily | | |
| | | | | | | member 5) | | |
| | | | | | | (MPP5), | | |
| | | | | | | mRNA. | | |
| 34 | 56 | — | 3420767 | NM_016173.3 | NM_016173 | HemKmethyltransferase | HEMK1 | FLJ22320 |
| | | | | | | family | | HEMK; |
| | | | | | | member 1 | | MTQ1 |
| | | | | | | (HEMK1), | | |
| | | | | | | mRNA. | | |
| 35 | 57 | — | 7510386 | NM_173843.1 | NM_173843 | interleukin 1 | IL1RN | ICIL-1RA; |
| | | | | | | receptor | | IRAP; IL- |
| | | | | | | antagonist | | 1ra3; |
| | | | | | | (IL1RN), | | MGC10430; |
| | | | | | | transcript | | IL1F3; |
| | | | | | | variant 4, | | IL1RA |
| | | | | | | mRNA. | | |
| 36 | 61 | — | 3610440 | NM_005360.3 | NM_005360 | v- | MAF | MGC71685 |
| | | | | | | mafmusculoaponeuroticfibrosarcoma | | |
| | | | | | | oncogene | | |
| | | | | | | homolog | | |
| | | | | | | (avian) (MAF), | | |
| | | | | | | transcript | | |
| | | | | | | variant 1, | | |
| | | | | | | mRNA. | | |
| 37 | 65 | — | 4150538 | NM_144675.1 | NM_144675 | GSG1-like | GSG1L | MGC18079; |
| | | | | | | (GSG1L), | | PRO19651 |
| | | | | | | mRNA. | | |
| 38 | 66 | — | 2450102 | NM_201438.1 | NM_201438 | periphilin 1 | PPHLN1 | HSPC206; |
| | | | | | | (PPHLN1), | | HSPC232; |
| | | | | | | transcript | | MGC48786 |
| | | | | | | variant 5, | | |
| | | | | | | mRNA. | | |
| 39 | 68 | — | 450398 | NM_004798.2 | NM_004798 | kinesin family | KIF3B | HH0048; |
| | | | | | | member3B | | KIAA0359 |
| | | | | | | (KIF3B), | | |
| | | | | | | mRNA. | | |
| 40 | 69 | — | 4810458 | NM_181309.1 | NM_181309 | interleukin 22 | IL22RA2 | CRF2-S1; |
| | | | | | | receptor, | | MGC150509; |
| | | | | | | alpha 2 | | IL- |
| | | | | | | (IL22RA2), | | 22BP; |
| | | | | | | transcript | | MGC150510; |
| | | | | | | variant 2, | | CRF2- |
| | | | | | | mRNA. | | 10; |
| | | | | | | | | CRF2X |
| 41 | 70 | — | 3890196 | NM_152850.2 | NM_152850 | phosphatidylinositol | PIGO | RP11- |
| | | | | | | glycan | | 182N22.4; |
| | | | | | | anchor | | DKFZp434M222; |
| | | | | | | biosynthesis, | | FLJ00135; |
| | | | | | | class O | | MGC3079; |
| | | | | | | (PIGO), | | MGC20536 |
| | | | | | | transcript | | |
| | | | | | | variant 2, | | |
| | | | | | | mRNA. | | |
| 42 | 71 | — | 1230156 | NM_004155.3 | NM_004155 | serpin | SERPINB9 | PI9; CAP- |
| | | | | | | peptidase | | 3; CAP3 |
| | | | | | | inhibitor, clade | | |
| | | | | | | B (ovalbumin), | | |
| | | | | | | member 9 | | |
| | | | | | | (SERPINB9), | | |
| | | | | | | mRNA. | | |
| 43 | 72 | — | 1190138 | NM_003328.2 | NM_003328 | TXK tyrosine | TXK | MGC22473; |
| | | | | | | kinase (TXK), | | PSCTK5; |
| | | | | | | mRNA. | | PTK4; |
| | | | | | | | | BTKL; |
| | | | | | | | | TKL; RLK |
| 44 | 73 | — | 3780139 | NM_020820.3 | NM_020820 | phosphatidylinositol | PREX1 | KIAA1415 |
| | | | | | | 3,4,5- | | |
| | | | | | | trisphosphate- | | |
| | | | | | | dependent | | |
| | | | | | | RAC | | |
| | | | | | | exchanger 1 | | |
| | | | | | | (PREX1), | | |
| | | | | | | mRNA. | | |
| 45 | 75 | — | 5340458 | NM_018044.2 | NM_018044 | NOL1/NOP2/ | NSUN5 | p120; |
| | | | | | | Sun domain | | FLJ10267; |
| | | | | | | family, | | WBSCR20; |
| | | | | | | member 5 | | p120 |
| | | | | | | (NSUN5), | | (NOL1); |
| | | | | | | transcript | | MGC986; |
| | | | | | | variant 2, | | WBSCR20A; |
| | | | | | | mRNA. | | (NOL1); |
| | | | | | | | | NOL1R; |
| | | | | | | | | NSUN5A |
| 46 | 76 | — | 70608 | NM_172177.1 | NM_172177 | mitochondrial | MRPL42 | PTD007; |
| | | | | | | ribosomal | | MRPS32; |
| | | | | | | protein L42 | | MRP-L31; |
| | | | | | | (MRPL42), | | RPML31; |
| | | | | | | nuclear gene | | HSPC204 |
| | | | | | | encoding | | |
| | | | | | | mitochondrial | | |
| | | | | | | protein, | | |
| | | | | | | transcript | | |
| | | | | | | variant 2, | | |
| | | | | | | mRNA. | | |
| 47 | 77 | — | 3460053 | NM_020808.3 | NM_020808 | signal-induced | SIPA1L2 | SPAL2; |
| | | | | | | proliferation- | | FLJ23126; |
| | | | | | | associated 1 | | KIAA1389; |
| | | | | | | like 2 | | FLJ23632 |
| | | | | | | (SIPA1L2), | | |
| | | | | | | mRNA. | | |
| 48 | 78 | — | 6220343 | NM_021098.2 | NM_021098 | calcium | CACNA1H | CACNA1HB; |
| | | | | | | channel, | | FLJ90484; |
| | | | | | | voltage- | | Cav3.2 |
| | | | | | | dependent, T | | |
| | | | | | | type, alpha 1H | | |
| | | | | | | subunit | | |
| | | | | | | (CACNA1H), | | |
| | | | | | | transcript | | |
| | | | | | | variant 1, | | |
| | | | | | | mRNA. | | |
| 49 | 79 | — | 6620753 | NM_006007.1 | NM_006007 | zinc finger, | ZFAND5 | ZFAND5A; |
| | | | | | | AN1-type | | ZA20D2; |
| | | | | | | domain 5 | | ZNF216 |
| | | | | | | (ZFAND5), | | |
| | | | | | | mRNA. | | |
| 50 | 80 | — | 5860605 | NM_013374.3 | NM_013374 | programmed | PDCD6IP | MGC17003; |
| | | | | | | cell death 6 | | Alix; |
| | | | | | | interacting | | DRIP4; |
| | | | | | | protein | | AIP1; |
| | | | | | | (PDCD6IP), | | HP95 |
| | | | | | | mRNA. | | |
| 51 | 81 | — | 160390 | NM_001014839.1 | NM_001014839 | neurochondrin | NCDN | KIAA0607 |
| | | | | | | (NCDN), | | |
| | | | | | | transcript | | |
| | | | | | | variant 1, | | |
| | | | | | | mRNA. | | |
| 52 | 82 | — | 3890136 | NM_006370.1 | NM_006370 | vesicle | VTI1B | VTI1; |
| | | | | | | transport | | VTI1L; |
| | | | | | | through | | VTI2 |
| | | | | | | interaction | | |
| | | | | | | with t- | | |
| | | | | | | SNAREs | | |
| | | | | | | homolog 1B | | |
| | | | | | | (yeast) | | |
| | | | | | | (VTI1B), | | |
| | | | | | | mRNA. | | |
| 53 | 84 | — | 2750592 | NM_032026.2 | NM_032026 | TatDDNase | TATDN1 | CDA11 |
| | | | | | | domain | | |
| | | | | | | containing 1 | | |
| | | | | | | (TATDN1), | | |
| | | | | | | mRNA. | | |
| 54 | 85 | — | 7330435 | NM_005436.2 | NM_005436 | coiled-coil | CCDC6 | TST1; |
| | | | | | | domain | | TPC; |
| | | | | | | containing 6 | | PTC; H4; |
| | | | | | | (CCDC6), | | D10S170; |
| | | | | | | mRNA. | | FLJ32286 |
| 55 | 86 | — | 7570500 | NM_032314.3 | NM_032314 | coenzyme Q5 | COQ5 | MGC4767; |
| | | | | | | homolog, | | MGC104303 |
| | | | | | | methyltransferase | | |
| | | | | | | (S. cerevisiae) | | |
| | | | | | | (COQ5), | | |
| | | | | | | mRNA. | | |
| 56 | 87 | — | 6020612 | NM_002158.3 | NM_002158 | forkhead box | FOXN2 | HTLF |
| | | | | | | N2 (FOXN2), | | |
| | | | | | | mRNA. | | |
| 57 | 88 | — | 840240 | NM_007124.2 | NM_007124 | utrophin | UTRN | DRP; |
| | | | | | | (UTRN), | | DMDL; |
| | | | | | | mRNA. | | DRP1; |
| | | | | | | | | FLJ23678 |
| 58 | 89 | — | 6450176 | NM_138711.3 | NM_138711 | peroxisome | PPARG | NR1C3; |
| | | | | | | proliferator- | | PPARG1; |
| | | | | | | activated | | PPARG2 |
| | | | | | | receptor | | |
| | | | | | | gamma | | |
| | | | | | | (PPARG), | | |
| | | | | | | transcript | | |
| | | | | | | variant 3, | | |
| | | | | | | mRNA. | | |
| 59 | 90 | — | 4060669 | NM_019083.1 | NM_019083 | coiled-coil | CCDC76 | FLJ10287; |
| | | | | | | domain | | FLJ11219 |
| | | | | | | containing 76 | | |
| | | | | | | (CCDC76), | | |
| | | | | | | mRNA. | | |
| 60 | 91 | — | 10220 | NM_001002246.1 | NM_001002246 | APC11 | ANAPC11 | HSPC214; |
| | | | | | | anaphase | | MGC882; |
| | | | | | | promoting | | Apc11p; |
| | | | | | | complex | | APC11 |
| | | | | | | subunit 11 | | |
| | | | | | | homolog | | |
| | | | | | | (yeast) | | |
| | | | | | | (ANAPC11), | | |
| | | | | | | transcript | | |
| | | | | | | variant 4, | | |
| | | | | | | mRNA. | | |
| 61 | 92 | — | 770541 | NM_001007277.1 | NM_001007277 | etoposide | EI24 | TP53I8; |
| | | | | | | induced 2.4 | | PIG8 |
| | | | | | | mRNA (EI24), | | |
| | | | | | | transcript | | |
| | | | | | | variant 2, | | |
| | | | | | | mRNA. | | |
| 62 | 93 | — | 7160270 | NM_004450.1 | NM_004450 | enhancer of | ERH | FLJ27340; |
| | | | | | | rudimentary | | DROER |
| | | | | | | homolog | | |
| | | | | | | (Drosophila) | | |
| | | | | | | (ERH), | | |
| | | | | | | mRNA. | | |
| 63 | 94 | — | 730497 | NM_032449.1 | NM_032449 | coiled-coil and | CC2D1B | RP11- |
| | | | | | | C2 domain | | 155O18.2; |
| | | | | | | containing 1B | | KIAA1836 |
| | | | | | | (CC2D1B), | | |
| | | | | | | mRNA. | | |
| 64 | 95 | — | 4220220 | NM_001009922.1 | NM_001009922 | ring finger and | RCHY1 | ARNIP; |
| | | | | | | CHY zinc | | PRO1996; |
| | | | | | | finger domain | | CHIMP; |
| | | | | | | containing 1 | | DKFZp586C1620; |
| | | | | | | (RCHY1), | | ZNF363; |
| | | | | | | transcript | | hARNIP; |
| | | | | | | variant 3, | | PIRH2; |
| | | | | | | mRNA. | | RNF199 |
| 65 | 96 | — | 1990653 | NM_006405.5 | NM_006405 | transmembrane 9 | TM9SF1 | HMP70; |
| | | | | | | superfamily | | MP70 |
| | | | | | | member 1 | | |
| | | | | | | (TM9SF1), | | |
| | | | | | | transcript | | |
| | | | | | | variant 1, | | |
| | | | | | | mRNA. | | |
| 66 | 97 | — | 5490717 | NM_198585.2 | NM_198585 | ectonucleoside | ENTPD8 | GLSR2492; |
| | | | | | | triphosphate | | UNQ2492; |
| | | | | | | diphosphohydrolase 8 | | NTPDase-8 |
| | | | | | | (ENTPD8), | | |
| | | | | | | transcript | | |
| | | | | | | variant 2, | | |
| | | | | | | mRNA. | | |
| 67 | 98 | — | 1010739 | NM_033364.3 | NM_033364 | chromosome | C3ORF15 | AAT1alpha; |
| | | | | | | 3 open | | AAT1; |
| | | | | | | reading frame | | DKFZp781A2221 |
| | | | | | | 15 (C3orf15), | | |
| | | | | | | mRNA. | | |
| 68 | 99 | — | 1340681 | NM_015633.1 | NM_015633 | FGFR1 | FGFR1OP2 | DKFZp564O1863; |
| | | | | | | oncogene | | HSPC123- |
| | | | | | | partner 2 | | like |
| | | | | | | (FGFR1OP2), | | |
| | | | | | | mRNA. | | |
| 69 | 100 | — | 2680497 | NM_014865.2 | NM_014865 | non- | NCAPD2 | hCAP-D2; |
| | | | | | | SMCcondensin | | KIAA0159; |
| | | | | | | I complex, | | CAP-D2; |
| | | | | | | subunit D2 | | CNAP1 |
| | | | | | | (NCAPD2), | | |
| | | | | | | mRNA. | | |
| 70 | 101 | — | 830440 | NM_003268.4 | NM_003268 | toll-like | TLR5 | MGC126430; |
| | | | | | | receptor 5 | | SLEB1; |
| | | | | | | (TLR5), | | MGC126431; |
| | | | | | | mRNA. | | FLJ10052; |
| | | | | | | | | TIL3 |
| 71 | 103 | — | 3800253 | NM_172388.1 | NM_172388 | nuclear factor | NFATC1 | NFATc; |
| | | | | | | of activated T- | | MGC138448; |
| | | | | | | cells, | | NFAT2; |
| | | | | | | cytoplasmic, | | NF-ATC |
| | | | | | | calcineurin- | | |
| | | | | | | dependent 1 | | |
| | | | | | | (NFATC1), | | |
| | | | | | | transcript | | |
| | | | | | | variant 4, | | |
| | | | | | | mRNA. | | |
| 72 | 104 | — | 2000669 | NM_024605.3 | NM_024605 | Rho GTPase | ARHGAP10 | FLJ20896; |
| | | | | | | activating | | PS-GAP; |
| | | | | | | protein 10 | | GRAF2; |
| | | | | | | (ARHGAP10), | | FLJ41791 |
| | | | | | | mRNA. | | |
| 73 | 105 | — | 6290181 | NM_058192.2 | NM_058192 | RNA | RPUSD1 | MGC19600; |
| | | | | | | pseudouridylate | | RLUCL; |
| | | | | | | synthase | | C16orf40 |
| | | | | | | domain | | |
| | | | | | | containing 1 | | |
| | | | | | | (RPUSD1), | | |
| | | | | | | mRNA. | | |
| 74 | 107 | — | 7050291 | NM_024756.1 | NM_024756 | multimerin 2 | MMRN2 | EndoGlyx- |
| | | | | | | (MMRN2), | | 1; |
| | | | | | | mRNA. | | FLJ13465; |
| | | | | | | | | EMILIN3; |
| | | | | | | | | ENDOGLYX1 |
| 75 | 108 | — | 3370280 | NM_016447.2 | NM_016447 | membrane | MPP6 | p55T; |
| | | | | | | protein, | | VAM-1; |
| | | | | | | palmitoylated | | VAM1; |
| | | | | | | 6 (MAGUK | | PALS2 |
| | | | | | | p55 subfamily | | |
| | | | | | | member 6) | | |
| | | | | | | (MPP6), | | |
| | | | | | | mRNA. | | |
| 76 | 109 | — | 1050040 | NM_004925.3 | NM_004925 | aquaporin 3 | AQP3 | GIL |
| | | | | | | (Gill blood | | |
| | | | | | | group) | | |
| | | | | | | (AQP3), | | |
| | | | | | | mRNA. | | |
| 77 | 110 | — | 6580379 | NM_006348.2 | NM_006348 | component of | COG5 | GOLTC1; |
| | | | | | | oligomericgolgi | | GTC90 |
| | | | | | | complex 5 | | |
| | | | | | | (COG5), | | |
| | | | | | | transcript | | |
| | | | | | | variant 1, | | |
| | | | | | | mRNA. | | |
| 78 | 111 | — | 730487 | NM_020320.2 | NM_020320 | arginyl- | RARS2 | dJ382I10.6; |
| | | | | | | tRNAsynthetase | | DALRD2; |
| | | | | | | 2, | | MGC14993; |
| | | | | | | mitochondrial | | PCH6; |
| | | | | | | (RARS2), | | PRO1992; |
| | | | | | | nuclear gene | | RARSL; |
| | | | | | | encoding | | MGC23778 |
| | | | | | | mitochondrial | | |
| | | | | | | protein, | | |
| | | | | | | mRNA. | | |
| 79 | 112 | — | 2140682 | NM_175617.2 | NM_175617 | metallothionein | MT1E | MT1; |
| | | | | | | 1E | | MTD |
| | | | | | | (functional) | | |
| | | | | | | (MT1E), | | |
| | | | | | | mRNA. | | |
| 80 | 113 | — | 2650148 | NM_018268.2 | NM_018268 | WD repeat | WDR41 | MSTP048; |
| | | | | | | domain 41 | | FLJ10904 |
| | | | | | | (WDR41), | | |
| | | | | | | mRNA. | | |
| 81 | 115 | — | 3130471 | NM_198465.2 | NM_198465 | Nik related | NRK | DKFZp686A17109; |
| | | | | | | kinase (NRK), | | FLJ16788; |
| | | | | | | mRNA. | | NESK; |
| | | | | | | | | MGC131849 |
| 82 | 116 | — | 4810274 | NM_199367.1 | NM_199367 | spastic | SPG7 | CAR; |
| | | | | | | paraplegia 7 | | FLJ37308; |
| | | | | | | (pure and | | SPG5C; |
| | | | | | | complicated | | MGC126332; |
| | | | | | | autosomal | | CMAR; |
| | | | | | | recessive) | | MGC126331; |
| | | | | | | (SPG7), | | PGN |
| | | | | | | nuclear gene | | |
| | | | | | | encoding | | |
| | | | | | | mitochondrial | | |
| | | | | | | protein, | | |
| | | | | | | transcript | | |
| | | | | | | variant 2, | | |
| | | | | | | mRNA. | | |
| 83 | 119 | — | 5670100 | NM_000355.2 | NM_000355 | transcobalamin | TCN2 | D22S750; |
| | | | | | | II; | | TC2; |
| | | | | | | macrocytic | | D22S676 |
| | | | | | | anemia | | |
| | | | | | | (TCN2), | | |
| | | | | | | mRNA. | | |
| 84 | 121 | — | 7320441 | NM_013332.3 | NM_013332 | hypoxia- | HIG2 | FLJ21076; |
| | | | | | | inducible | | MGC138388 |
| | | | | | | protein 2 | | |
| | | | | | | (HIG2), | | |
| | | | | | | transcript | | |
| | | | | | | variant 1, | | |
| | | | | | | mRNA. | | |
| 85 | 123 | — | 2060674 | NM_000067.1 | NM_000067 | carbonic | CA2 | Car2; CA- |
| | | | | | | anhydrase II | | II; CAII; |
| | | | | | | (CA2), mRNA. | | CA II |
| 86 | 124 | — | 6350671 | NM_023080.1 | NM_023080 | chromosome | C8ORF33 | FLJ20989 |
| | | | | | | 8 open | | |
| | | | | | | reading frame | | |
| | | | | | | 33 (C8orf33), | | |
| | | | | | | mRNA. | | |
| 87 | 125 | — | 770619 | NM_003473.2 | NM_003473 | signal | STAM | DKFZp686J2352; |
| | | | | | | transducing | | STAM1 |
| | | | | | | adaptor | | |
| | | | | | | molecule | | |
| | | | | | | (SH3 domain | | |
| | | | | | | and ITAM | | |
| | | | | | | motif) 1 | | |
| | | | | | | (STAM), | | |
| | | | | | | mRNA. | | |
| 88 | 126 | — | 540452 | NM_022743.1 | NM_022743 | SET and | SMYD3 | bA74P14.1; |
| | | | | | | MYND | | ZMYND1; |
| | | | | | | domain | | ZNFN3A1; |
| | | | | | | containing 3 | | FLJ21080; |
| | | | | | | (SMYD3), | | MGC104324 |
| | | | | | | mRNA. | | |
| 89 | 127 | — | 4200441 | NM_003003.2 | NM_003003 | SEC14-like 1 | SEC14L1 | SEC14L; |
| | | | | | | (S. cerevisiae) | | DKFZp686C06176; |
| | | | | | | (SEC14L1), | | PRELID4A |
| | | | | | | transcript | | |
| | | | | | | variant 1, | | |
| | | | | | | mRNA. | | |
| 90 | 128 | — | 6550279 | NM_000848.2 | NM_000848 | glutathione S- | GSTM2 | GST4; |
| | | | | | | transferase | | GSTM; |
| | | | | | | M2 (muscle) | | GSTM2-2; |
| | | | | | | (GSTM2), | | GTHMUS; |
| | | | | | | mRNA. | | MGC117303 |
| 91 | 129 | — | 4860392 | NM_178128.3 | NM_178128 | fatty acid | FADS6 | FP18279 |
| | | | | | | desaturase | | |
| | | | | | | domain family, | | |
| | | | | | | member 6 | | |
| | | | | | | (FADS6), | | |
| | | | | | | mRNA. | | |
| 92 | 130 | — | 3940735 | NM_003093.1 | NM_003093 | small nuclear | SNRPC | FLJ20302 |
| | | | | | | ribonucleoprotein | | |
| | | | | | | polypeptide C | | |
| | | | | | | (SNRPC), | | |
| | | | | | | mRNA. | | |
| 93 | 131 | — | 1850347 | NM_021067.3 | NM_021067 | GINS | GINS1 | PSF1; |
| | | | | | | complex | | KIAA0186; |
| | | | | | | subunit 1 | | RP4- |
| | | | | | | (Psf1 | | 691N24.2 |
| | | | | | | homolog) | | |
| | | | | | | (GINS1), | | |
| | | | | | | mRNA. | | |
| 94 | 133 | — | 7000703 | NM_016310.2 | NM_016310 | polymerase | POLR3K | C11; |
| | | | | | | (RNA) III | | RPC10; |
| | | | | | | (DNA | | C11- |
| | | | | | | directed) | | RNP3; |
| | | | | | | polypeptide K, | | My010; |
| | | | | | | 12.3 kDa | | RPC11; |
| | | | | | | (POLR3K), | | hRPC11 |
| | | | | | | mRNA. | | |
| 95 | 134 | — | 2690315 | NM_014901.4 | NM_014901 | ring finger | RNF44 | KIAA1100 |
| | | | | | | protein 44 | | |
| | | | | | | (RNF44), | | |
| | | | | | | mRNA. | | |
| 96 | 135 | — | 4900670 | NM_004255.2 | NM_004255 | cytochrome c | COX5A | COX-VA; |
| | | | | | | oxidase | | VA; COX |
| | | | | | | subunit Va | | |
| | | | | | | (COX5A), | | |
| | | | | | | nuclear gene | | |
| | | | | | | encoding | | |
| | | | | | | mitochondrial | | |
| | | | | | | protein, | | |
| | | | | | | mRNA. | | |
| 97 | 136 | — | 6900014 | NM_032177.2 | NM_032177 | RNA U, small | RNUXA | FLJ13193; |
| | | | | | | nuclear RNA | | PHAX |
| | | | | | | export adaptor | | |
| | | | | | | (phosphorylation | | |
| | | | | | | regulated) | | |
| | | | | | | (RNUXA), | | |
| | | | | | | mRNA. | | |
| 98 | 138 | — | 5570338 | NM_182922.2 | NM_182922 | HEAT repeat | HEATR3 | FLJ20718 |
| | | | | | | containing 3 | | |
| | | | | | | (HEATR3), | | |
| | | | | | | mRNA. | | |
| 99 | 139 | — | 4540241 | NM_032412.3 | NM_032412 | chromosome | C5ORF32 | ORF1- |
| | | | | | | 5 open | | FL49 |
| | | | | | | reading frame | | |
| | | | | | | 32 (C5orf32), | | |
| | | | | | | mRNA. | | |
| 100 | 140 | — | 2850360 | NM_001707.2 | NM_001707 | B-cell | BCL7B | |
| | | | | | | CLL/lymphoma | | |
| | | | | | | 7B | | |
| | | | | | | (BCL7B), | | |
| | | | | | | mRNA. | | |
| 101 | 141 | — | 6860653 | NM_006402.2 | NM_006402 | hepatitis B | HBXIP | MGC71071; |
| | | | | | | virus x | | XIP |
| | | | | | | interacting | | |
| | | | | | | protein | | |
| | | | | | | (HBXIP), | | |
| | | | | | | mRNA. | | |
| 102 | 142 | — | 2350209 | NM_139118.1 | NM_139118 | YY1 | YY1AP1 | YAP; |
| | | | | | | associated | | YY1AP; |
| | | | | | | protein 1 | | HCCA2; |
| | | | | | | (YY1AP1), | | FLJ10875; |
| | | | | | | transcript | | FLJ13914; |
| | | | | | | variant 2, | | HCCA1 |
| | | | | | | mRNA. | | |
| 103 | 143 | — | 3940754 | NM_006566.1 | NM_006566 | CD226 | CD226 | TLiSA1; |
| | | | | | | molecule | | PTA1; |
| | | | | | | (CD226), | | DNAM1; |
| | | | | | | mRNA. | | DNAM-1 |
| 104 | 144 | — | 6650747 | NM_152320.1 | NM_152320 | zinc finger | ZNF641 | FLJ31295; |
| | | | | | | protein 641 | | DKFZp667D1012 |
| | | | | | | (ZNF641), | | |
| | | | | | | mRNA. | | |
| 105 | 145 | — | 3780400 | NM_014212.3 | NM_014212 | homeobox | HOXC11 | HOX3H; |
| | | | | | | C11 | | MGC4906 |
| | | | | | | (HOXC11), | | |
| | | | | | | mRNA. | | |
| 106 | 146 | — | 6770017 | NM_007249.4 | NM_007249 | Kruppel-like | KLF12 | AP-2rep; |
| | | | | | | factor 12 | | AP2REP; |
| | | | | | | (KLF12), | | HSPC122 |
| | | | | | | mRNA. | | |
| 107 | 147 | — | 2340059 | NM_024516.2 | NM_024516 | chromosome | C16ORF53 | PA1; |
| | | | | | | 16 open | | MGC4606 |
| | | | | | | reading frame | | |
| | | | | | | 53 (C16orf53), | | |
| | | | | | | mRNA. | | |
| 108 | 148 | — | 4150593 | NM_015077.2 | NM_015077 | sterile alpha | SARM1 | SAMD2; |
| | | | | | | and TIR motif | | KIAA0524; |
| | | | | | | containing 1 | | SARM; |
| | | | | | | (SARM1), | | FLJ36296 |
| | | | | | | mRNA. | | |
| 109 | 149 | — | 2650408 | NM_018177.2 | NM_018177 | Nedd4 | N4BP2 | B3BP; |
| | | | | | | binding | | KIAA1413; |
| | | | | | | protein 2 | | FLJ10680 |
| | | | | | | (N4BP2), | | |
| | | | | | | mRNA. | | |
| 110 | 150 | — | 10435 | NM_001001660.2 | NM_001001660 | LYR motif | LYRM5 | |
| | | | | | | containing 5 | | |
| | | | | | | (LYRM5), | | |
| | | | | | | mRNA. | | |
| 111 | 151 | — | 2690528 | NM_004169.3 | NM_004169 | serinehydroxy | SHMT1 | MGC15229; |
| | | | | | | methyltransferase 1 | | MGC24556; |
| | | | | | | (soluble) | | SHMT; |
| | | | | | | (SHMT1), | | CSHMT |
| | | | | | | transcript | | |
| | | | | | | variant 1, | | |
| | | | | | | mRNA. | | |
| 112 | 152 | — | 130093 | NM_005951.2 | NM_005951 | metallothionein | MT1H | MGC70702; |
| | | | | | | 1H (MT1H), | | MT1 |
| | | | | | | mRNA. | | |
| 113 | 153 | — | 1010692 | NM_005234.3 | NM_005234 | nuclear | NR2F6 | EAR-2; |
| | | | | | | receptor | | EAR2; |
| | | | | | | subfamily 2, | | ERBAL2 |
| | | | | | | group F, | | |
| | | | | | | member 6 | | |
| | | | | | | (NR2F6), | | |
| | | | | | | mRNA. | | |
| 114 | 156 | — | 520431 | NM_014819.3 | NM_014819 | praja 2, RING- | PJA2 | KIAA0438; |
| | | | | | | H2 motif | | RNF131; |
| | | | | | | containing | | Neurodap1 |
| | | | | | | (PJA2), | | |
| | | | | | | mRNA. | | |
| 115 | 157 | — | 5560079 | NM_001077191.1 | NM_001077191 | G protein- | GPBAR1 | GPR131; |
| | | | | | | coupled bile | | M-BAR; |
| | | | | | | acid receptor | | GPCR; |
| | | | | | | 1 (GPBAR1), | | GPCR19; |
| | | | | | | transcript | | BG37; |
| | | | | | | variant 1, | | TGR5; |
| | | | | | | mRNA. | | MGC40597 |
| 116 | 158 | — | 670026 | NM_015986.2 | NM_015986 | cytokine | CRLF3 | CREME9; |
| | | | | | | receptor-like | | FRWS; |
| | | | | | | factor 3 | | CYTOR4; |
| | | | | | | (CRLF3), | | MGC20661 |
| | | | | | | mRNA. | | |
| 117 | 163 | — | 1770593 | NM_003956.3 | NM_003956 | cholesterol | CH25H | C25H |
| | | | | | | 25- | | |
| | | | | | | hydroxylase | | |
| | | | | | | (CH25H), | | |
| | | | | | | mRNA. | | |
| 118 | 166 | — | 1260438 | NM_001556.1 | NM_001556 | inhibitor of | IKBKB | IKK-beta; |
| | | | | | | kappa light | | NFKBIKB; |
| | | | | | | polypeptide | | IKK2; |
| | | | | | | gene | | FLJ40509; |
| | | | | | | enhancer in | | IKKB; |
| | | | | | | B-cells, kinase | | MGC131801 |
| | | | | | | beta (IKBKB), | | |
| | | | | | | mRNA. | | |
| 119 | 167 | — | 4050768 | NM_152889.1 | NM_152889 | carbohydrate | CHST13 | MGC119279; |
| | | | | | | (chondroitin 4) | | MGC119281; |
| | | | | | | sulfotransferase | | MGC119278; |
| | | | | | | 13 | | C4ST3 |
| | | | | | | (CHST13), | | |
| | | | | | | mRNA. | | |
| 120 | 168 | — | 1340349 | NM_001042588.1 | NM_001042588 | snurportin 1 | SNUPN | RNUT1; |
| | | | | | | (SNUPN), | | Snurportin1; |
| | | | | | | transcript | | KPNBL |
| | | | | | | variant 3, | | |
| | | | | | | mRNA. | | |
| 121 | 169 | — | 6940431 | NM_015253.1 | NM_015253 | WSC domain | WSCD1 | KIAA0523 |
| | | | | | | containing 1 | | |
| | | | | | | (WSCD1), | | |
| | | | | | | mRNA. | | |
| 122 | 170 | — | 3610241 | NM_000981.3 | NM_000981 | ribosomal | RPL19 | MGC71997; |
| | | | | | | protein L19 | | DKFZp779D216; |
| | | | | | | (RPL19), | | FLJ27452 |
| | | | | | | mRNA. | | |
| 123 | 171 | — | 6580577 | NM_031369.2 | NM_031369 | heterogeneous | HNRNPD | P37; |
| | | | | | | nuclear | | AUF1; |
| | | | | | | ribonucleoprotein | | hnRNPD0; |
| | | | | | | D (AU-rich | | AUF1A |
| | | | | | | element RNA | | |
| | | | | | | binding | | |
| | | | | | | protein 1, | | |
| | | | | | | 37 kDa) | | |
| | | | | | | (HNRNPD), | | |
| | | | | | | transcript | | |
| | | | | | | variant 2, | | |
| | | | | | | mRNA. | | |
| 124 | 172 | — | 3360228 | NM_001023.2 | NM_001023 | ribosomal | RPS20 | MGC102930; |
| | | | | | | protein S20 | | FLJ27451 |
| | | | | | | (RPS20), | | |
| | | | | | | mRNA. | | |
| 125 | 173 | — | 6130390 | NM_016093.2 | NM_016093 | ribosomal | RPL26L1 | RPL26P1; |
| | | | | | | protein L26- | | FLJ46904 |
| | | | | | | like 1 | | |
| | | | | | | (RPL26L1), | | |
| | | | | | | mRNA. | | |
| 126 | 175 | — | 1110017 | NM_032195.1 | NM_032195 | SON DNA | SON | FLJ21099; |
| | | | | | | binding | | SON3; |
| | | | | | | protein (SON), | | KIAA1019; |
| | | | | | | transcript | | BASS1; |
| | | | | | | variant b, | | NREBP; |
| | | | | | | mRNA. | | C21orf50; |
| | | | | | | | | DBP-5; |
| | | | | | | | | FLJ33914 |
| 127 | 176 | — | 2680097 | NM_016061.1 | NM_016061 | yippee-like 5 | YPEL5 | CGI-127 |
| | | | | | | (Drosophila) | | |
| | | | | | | (YPEL5), | | |
| | | | | | | mRNA. | | |
| 128 | 177 | — | 2480364 | NM_013379.2 | NM_013379 | dipeptidyl- | DPP7 | DPP2; |
| | | | | | | peptidase 7 | | DPPII; |
| | | | | | | (DPP7), | | QPP |
| | | | | | | mRNA. | | |
| 129 | 178 | — | 6330044 | NM_004034.1 | NM_004034 | annexin A7 | ANXA7 | ANX7; |
| | | | | | | (ANXA7), | | SNX |
| | | | | | | transcript | | |
| | | | | | | variant 2, | | |
| | | | | | | mRNA. | | |
| 130 | 179 | — | 240725 | NM_001033112.1 | NM_001033112 | poly(A) | PAIP2 | PAIP2A; |
| | | | | | | binding | | MGC72018 |
| | | | | | | protein | | |
| | | | | | | interacting | | |
| | | | | | | protein 2 | | |
| | | | | | | (PAIP2), | | |
| | | | | | | transcript | | |
| | | | | | | variant 1, | | |
| | | | | | | mRNA. | | |
| 131 | 180 | — | 3390192 | NM_006861.4 | NM_006861 | RAB35, | RAB35 | RAB1C; |
| | | | | | | member RAS | | H-ray; |
| | | | | | | oncogene | | RAY |
| | | | | | | family | | |
| | | | | | | (RAB35), | | |
| | | | | | | mRNA. | | |
| 132 | 181 | — | 4150670 | NM_007065.3 | NM_007065 | cell division | CDC37 | P50CDC37 |
| | | | | | | cycle 37 | | |
| | | | | | | homolog (S. cerevisiae) | | |
| | | | | | | (CDC37), | | |
| | | | | | | mRNA. | | |
| 133 | 182 | — | 7200037 | NM_005626.3 | NM_005626 | splicing factor, | SFRS4 | SRP75 |
| | | | | | | arginine/serine- | | |
| | | | | | | rich 4 | | |
| | | | | | | (SFRS4), | | |
| | | | | | | mRNA. | | |
| 134 | 183 | — | 5690202 | NM_018064.2 | NM_018064 | chromosome | C6ORF166 | FLJ10342; |
| | | | | | | 6 open | | dJ486L4.2 |
| | | | | | | reading frame | | |
| | | | | | | 166 | | |
| | | | | | | (C6orf166), | | |
| | | | | | | mRNA. | | |
| 135 | 184 | — | 3830538 | NM_030818.2 | NM_030818 | coiled-coil | CCDC130 | MGC10471 |
| | | | | | | domain | | |
| | | | | | | containing | | |
| | | | | | | 130 | | |
| | | | | | | (CCDC130), | | |
| | | | | | | mRNA. | | |
| 136 | 185 | — | 2490066 | NM_006110.1 | NM_006110 | CD2 | CD2BP2 | FWP010; |
| | | | | | | (cytoplasmic | | LIN1; |
| | | | | | | tail) binding | | Snu40 |
| | | | | | | protein 2 | | |
| | | | | | | (CD2BP2), | | |
| | | | | | | mRNA. | | |
| 137 | 186 | — | 4230050 | NM_006327.2 | NM_006327 | translocase of | TIMM23 | PRO1197; |
| | | | | | | inner | | TIMM23B; |
| | | | | | | mitochondrial | | MGC22767; |
| | | | | | | membrane 23 | | TIM23 |
| | | | | | | homolog | | |
| | | | | | | (yeast) | | |
| | | | | | | (TIMM23), | | |
| | | | | | | nuclear gene | | |
| | | | | | | encoding | | |
| | | | | | | mitochondrial | | |
| | | | | | | protein, | | |
| | | | | | | mRNA. | | |
| 138 | 187 | — | 7200598 | NM_005466.2 | NM_005466 | mediator | MED6 | NY-REN- |
| | | | | | | complex | | 28 |
| | | | | | | subunit 6 | | |
| | | | | | | (MED6), | | |
| | | | | | | mRNA. | | |
| 139 | 188 | — | 6110477 | NM_006600.2 | NM_006600 | nuclear | NUDC | NPD011; |
| | | | | | | distribution | | HNUDC; |
| | | | | | | gene C | | MNUDC |
| | | | | | | homolog (A. nidulans) | | |
| | | | | | | (NUDC), | | |
| | | | | | | mRNA. | | |
| 140 | 189 | — | 3130241 | NM_020141.3 | NM_020141 | chromosome | C1ORF119 | AD-020; |
| | | | | | | 1 open | | FLJ90710 |
| | | | | | | reading frame | | |
| | | | | | | 119 | | |
| | | | | | | (C1orf119), | | |
| | | | | | | mRNA. | | |
| 141 | 190 | — | 60390 | NM_030914.1 | NM_030914 | ubiquitin | URM1 | C9orf74; |
| | | | | | | related | | RP11- |
| | | | | | | modifier 1 | | 339B21.4; |
| | | | | | | homolog (S. cerevisiae) | | MGC2668 |
| | | | | | | (URM1), | | |
| | | | | | | mRNA. | | |
| 142 | 191 | — | 1450537 | NM_014607.3 | NM_014607 | UBX domain | UBXD2 | erasin; |
| | | | | | | containing 2 | | UBXDC1; |
| | | | | | | (UBXD2), | | FLJ23318; |
| | | | | | | mRNA. | | KIAA0242 |
| 143 | 192 | — | 610112 | NM_173607.3 | NM_173607 | chromosome | C14ORF24 | DKFZp686J1254; |
| | | | | | | 14 open | | FLJ38854 |
| | | | | | | reading frame | | |
| | | | | | | 24 (C14orf24), | | |
| | | | | | | transcript | | |
| | | | | | | variant 1, | | |
| | | | | | | mRNA. | | |

| | | P or N | | | | | |
|---|---|---|---|---|---|---|---|
| | | Predictor | | | | | |
| | | or | | | ABI Gene | | |
| RNA143 Index | Probe Sequence | HSK gene | Performance Rank | ABI Assay ID | Symbol | ABI Alias | ABI Gene Name |
| 1 | CAGCTGTG | N | 002N | Hs00240532_s1 | ADRB2 | ADRB2R, | adrenergic, |
| | AACATGGA | | | | | ADRBR, B2AR, | beta-2-, |
| | CTCTTCCCC | | | | | BAR, | receptor, |
| | CACTCCTCT | | | | | BETA2AR | surface |
| | TATTTGCTC | | | | | | |
| | ACACGGG | | | | | | |
| 2 | CCAGCCCA | P | 002P | Hs00270173_s1 | NAP1L3 | MB20, MGC26312, NPL3, | nucleosome |
| | TAAGACTAA | | | | | RP1- | assembly |
| | GGGTTTAAA | | | | | 32F7.3 | protein 1-like 3 |
| | TCTGCTTGC | | | | | | |
| | ACTAGCTGT | | | | | | |
| | GCCTTC | | | | | | |
| 3 | GTTCCTTTT | N | 003N | Hs00967385_g1 | SERBP1 | CGI- | SERPINE1 |
| | GCTGCCCA | | | | | 55, CHD3IP, | mRNA |
| | TTTGGGAG | | | | | DKFZp564M2423, | binding |
| | TATGTGGC | | | | | FLJ90489, | protein 1 |
| | AATTCCTAG | | | | | HABP4L, | |
| | TGCTCTTG | | | | | PAI- | |
| | | | | | | RBP1, PAIRBP1 | |
| 4 | GCCTTTTTA | P | 003P | Hs00211126_m1 | CSAD | CSD, FLJ44987, | cysteine |
| | GGCCACAG | | | | | FLJ45500, | sulfinic acid |
| | TGACCTGC | | | | | MGC119354, | decarboxylase |
| | GCAATGTTT | | | | | MGC119355, | |
| | ATATGCTTT | | | | | MGC119357, | |
| | GACCTAC | | | | | PCAP | |
| 5 | TCCTTAGTC | N | 005N | Hs00233566_m1 | CD79A | IGA, MB-1 | CD79a |
| | ATATTCCCC | | | | | | molecule, |
| | CAGTGGGG | | | | | | immunoglobulin- |
| | GGTGGGAG | | | | | | associated |
| | GGTAACCT | | | | | | alpha |
| | CACTCTTC | | | | | | |
| 6 | CCTGCGTC | P | 005P | Hs02340038_g1 | RPL37 | DKFZp686G1699, | ribosomal |
| | ACAGGGAA | | | | | MGC99572 | protein L37 |
| | GCAACCTA | | | | | | |
| | CAGAGAAG | | | | | | |
| | CAGCAGCT | | | | | | |
| | CCCCAAGA | | | | | | |
| | GA | | | | | | |
| 7 | ATCCCAGC | P | 006P | Hs00959834_m1 | XRCC1 | RCC | X-ray repair |
| | TTTGAGGA | | | | | | complementing |
| | GGCCCTGA | | | | | | defective |
| | TGGACAAC | | | | | | repair in |
| | CCCTCCCT | | | | | | Chinese |
| | GGCATTCG | | | | | | hamster cells 1 |
| | TT | | | | | | |
| 8 | TAGTGGCT | N | 007N | Hs00227769_m1 | POF1B | FLJ22792, | premature |
| | GGGAAAAG | | | | | POF, POF2B, | ovarian |
| | GGGTGTGC | | | | | RP1- | failure, 1B |
| | GAGGGGAA | | | | | 75N13.2 | |
| | CTGGGGAT | | | | | | |
| | GCTTAATGTG | | | | | | |
| 9 | CACCTCGG | P | 007P | Hs00255244_m1 | RABL2B | FLJ93981, | RAB, member |
| | GGACAATT | | | | | FLJ98216, | of RAS |
| | CCTTGGGC | | | | | FLJ78724, | oncogene |
| | TTCTCCTGA | | | | | MGC117180, | family-like |
| | GGTAATGAT | | | | | RP11- | 2B, RAB, |
| | TTACCCCC | | | | | 395L14.2 | member of |
| | | | | | | | RAS |
| | | | | | | | oncogene |
| | | | | | | | family-like 2A |
| 10 | AGGAGCCT | N | 009N | Hs01033772_g1 | NCOA4 | ARA70, DKFZp762E1112, | nuclear |
| | TTCCAGTTA | | | | | ELE1, | receptor |
| | TCTTGAGTT | | | | | PTC3, | coactivator 4 |
| | GCAGCTCT | | | | | RFG, RP11- | |
| | GTAGTTTCT | | | | | 481A12.4 | |
| | TGAGGCC | | | | | | |
| 11 | GCCACGCT | N | 011N | Hs00292978_m1 | KIAA1949 | DAAP- | KIAA1949 |
| | TACTTGCTG | | | | | 285E11.2, | |
| | TGTCTGCG | | | | | HKMT1098 | |
| | TGGAATTCT | | | | | | |
| | CTCCTCTGT | | | | | | |
| | CCCCTCC | | | | | | |
| 12 | GACCCAAA | P | 011P | Hs00270322_m1 | TAF1 | BA2R, CCG1, | TAF1 RNA |
| | CAACCCCG | | | | | CCGS, | polymerase II, |
| | CATGCTTCA | | | | | DYT3, DYT3/ | TATA box |
| | GGAGAACA | | | | | TAF1, | binding |
| | CAAGGATG | | | | | KAT4, N- | protein (TBP)- |
| | GACATGGAA | | | | | TAF1, NSCL2, | associated |
| | | | | | | OF, P250, | factor, |
| | | | | | | TAF2A, | 250 kDa |
| | | | | | | TAFII250, | |
| | | | | | | XDP | |
| 13 | GTACCAGA | P | 012P | Hs00176278_m1 | DGKA | DAGK, DAGK1, | diacylglycerol |
| | CCTAAGTG | | | | | DGK- | kinase, alpha |
| | ACAAGAGA | | | | | alpha, MGC12821, MGC42356 | 80 kDa |
| | CTGGAAGT | | | | | | |
| | GGTTGGGC | | | | | | |
| | TGGAGGGT | | | | | | |
| | GC | | | | | | |
| 14 | AGGATGCA | N | 013N | Hs00377534_m1 | TTC21A | DKFZp686P18239, | tetratricopeptide |
| | GTCACCAA | | | | | MGC156293, | repeat |
| | CTACAAACT | | | | | MGC70523, | domain 21A |
| | GGCCTGGA | | | | | STI2 | |
| | AGTACAGT | | | | | | |
| | CATCACGCC | | | | | | |
| 15 | GCTCTATCC | N | 014N | Hs02825719_s1 | GPR119 | GPCR2, MGC119957, | G protein- |
| | TGGACCCC | | | | | RP1- | coupled |
| | CTTCCTTAT | | | | | 20I3.4 | receptor 119 |
| | CACTGGCA | | | | | | |
| | TTGTGCAG | | | | | | |
| | GTGGCCTG | | | | | | |
| 16 | CTGTACTTC | N | 015N | Hs00221046_m1 | SENP7 | KIAA1707, | SUMO1/sentrin |
| | CACGTGAC | | | | | MGC157730 | specific |
| | TGGGTGCT | | | | | | peptidase 7 |
| | GAGGGGAG | | | | | | |
| | TTAAAGCCT | | | | | | |
| | CCCTGGTG | | | | | | |
| 17 | TCCAAGAG | P | 015P | Hs00357776_g1 | GRK6 | FLJ32135, | G protein- |
| | CTGAATGTC | | | | | GPRK6 | coupled |
| | TTTGGGCT | | | | | | receptor |
| | GGATGGCT | | | | | | kinase 6 |
| | CAGTTCCC | | | | | | |
| | CCAGACCTG | | | | | | |
| 18 | ACCTTGGC | N | 016N | Hs01018047_m1 | ABHD12 | ABHD12A; | abhydrolase |
| | TACAGGCA | | | | | BEM46L2, | domain |
| | CAAATACAT | | | | | C20ORF22, | containing 12 |
| | TTACAAGAG | | | | | DKFZp434P106, | |
| | CCCTGAGC | | | | | RP5- | |
| | TGCCACGG | | | | | 965G21.2, | |
| | | | | | | dJ965G21.2 | |
| 19 | GCATGGGG | P | 016P | Hs00757030_m1 | PRPF3 | HPRP3, HPRP3P, PRP3, | PRP3 pre- |
| | CTGAACACT | | | | | Prp3p, | mRNA |
| | ACTGGGAC | | | | | RP18 | processing |
| | CTTGCGCT | | | | | | factor 3 |
| | GAGTGAAT | | | | | | homolog (S. cerevisiae) |
| | CTGTGTTAG | | | | | | |
| 20 | GTTGTTTCA | N | 017N | Hs01850784_s1 | FOXG1 | BF1, BF2, | forkhead box |
| | GTTGGCAA | | | | | FHKL3, FKH2, | G1 |
| | CACTGCCC | | | | | FKHL1, | |
| | ATTCAATTG | | | | | FKHL2, | |
| | AATCAGAA | | | | | FKHL3, FKHL4, | |
| | GGGGACAA | | | | | FOXG1A, | |
| | | | | | | FOXG1B, | |
| | | | | | | FOXG1C, | |
| | | | | | | HBF- | |
| | | | | | | 1, HBF- | |
| | | | | | | 2, HBF- | |
| | | | | | | 3, HBF- | |
| | | | | | | G2, HBF2, | |
| | | | | | | HFK1, HFK2, | |
| | | | | | | HFK3, | |
| | | | | | | KHL2, QIN | |
| 21 | GGGAAGAT | P | 017P | Hs00538167_m1 | IL12RB1 | CD212, IL- | interleukin 12 |
| | GCCCTATCT | | | | | 12R- | receptor, beta 1 |
| | CTCGGGTG | | | | | BETA1, IL12RB, | |
| | CTGCCTAC | | | | | MGC34454 | |
| | AACGTGGC | | | | | | |
| | TGTCATCTC | | | | | | |
| 22 | GATAGGCC | P | 018P | Hs00262564_m1 | ZFYVE19 | FLJ14840, | zinc finger, |
| | CCTTCCTGA | | | | | MPFYVE | FYVE domain |
| | GCCTTGGT | | | | | | containing 19 |
| | GTCCCTGG | | | | | | |
| | AATGAGGA | | | | | | |
| | AAGATTCTC | | | | | | |
| 23 | TCCCACTTT | N | 019N | Hs01035151_m1 | CRTAP | CASP, LEPREL3 | cartilage |
| | AGGGTGGC | | | | | | associated |
| | AGCCAGTA | | | | | | protein |
| | GGCCAAAC | | | | | | |
| | TCCAAAGA | | | | | | |
| | CCGTTGCTG | | | | | | |
| 24 | CCACAGGT | N | 020N | Hs00198882_m1 | LAPTM5 | CLAST6, | lysosomal |
| | TAGTTCAGT | | | | | FLJ61683, | protein |
| | CAAAGCAG | | | | | FLJ97251, | transmembrane 5 |
| | GCAACCCC | | | | | MGC125860, | |
| | CTTGTGGG | | | | | MGC125861, | |
| | CACTGACCC | | | | | RP5- | |
| | | | | | | 1166H10.3 | |
| 25 | GATCTTGG | N | 021N | Hs00243566_m1 | B4GALT2 | B4Gal- | UDP- |
| | GGTTGGCC | | | | | T2, B4Gal- | Gal:betaGlcNAc |
| | TTTGCATGG | | | | | T3, beta4Gal- | beta 1,4- |
| | GAGGCAGG | | | | | T2 | galactosyltransferase, |
| | TGGGGCTT | | | | | | polypeptide 2 |
| | GGATCAGTA | | | | | | |
| 26 | CTCAGCTG | P | 021P | Hs00195582_m1 | S100A2 | CAN19, MGC111539, | S100 calcium |
| | GAGTGCTG | | | | | RP11- | binding |
| | GGAGATGA | | | | | 49N14.8, | protein A2 |
| | GGGCCTCC | | | | | S100L | |
| | TGGATCCT | | | | | | |
| | GCTCCCTT | | | | | | |
| | CT | | | | | | |
| 27 | GGCCCTTC | P | 022P | Hs00159587_m1 | NDUFC1 | KFYI, MGC117464, | NADH |
| | AGTGCGAT | | | | | MGC126847, | dehydrogenase |
| | CAAAGTTCT | | | | | MGC138266 | (ubiquinone) |
| | ACGTGCGA | | | | | | 1, |
| | GAGCCGCC | | | | | | subcomplex |
| | GAATGCCAA | | | | | | unknown, 1, |
| | | | | | | | 6 kDa |
| 28 | TGCACAAAA | N | 023N | Hs00609198_m1 | GCH1 | DYT14, DYT5, | GTP |
| | CCACTGCC | | | | | DYT5a, | cyclohydrolase 1 |
| | AGATAACCA | | | | | GCH, | |
| | GAGGGGCC | | | | | GTP-CH- | |
| | TGGGAAGG | | | | | 1, GTPCH1, | |
| | GAGAAGAA | | | | | HPABH4B | |
| 29 | GTCCACTA | P | 023P | Hs00197131_m1 | PIBF1 | C13ORF24, | progesterone |
| | CGAGGTAC | | | | | KIAA1008, | immunomodulatory |
| | TTCAAAAGC | | | | | PIBF, RP11- | binding |
| | CCAGTAAT | | | | | 505F3.1 | factor 1 |
| | GGTGGTCA | | | | | | |
| | GATACCATG | | | | | | |
| 30 | TTCCACCAC | P | 024P | Hs00255552_m1 | TMEM8B | C9ORF127, | transmembrane |
| | GTTCTCCG | | | | | MGC120460, | protein 8B |
| | AGGGTTTG | | | | | NAG- | |
| | GGAATGTC | | | | | 5, NGX6, RP11- | |
| | TGTGCCTTC | | | | | 112J3.10, | |
| | ACTGTGTC | | | | | RP11- | |
| | | | | | | 112J3.10- | |
| | | | | | | 001 | |
| 31 | CTGGCTCC | P | 026P | Hs00179978_m1 | EPS15 | AF- | epidermal |
| | AGGGCCTG | | | | | 1P, AF1P, | growth factor |
| | TGCTTGAAA | | | | | MLLT5 | receptor |
| | AGGACAGA | | | | | | pathway |
| | TAAGTATTG | | | | | | substrate 15 |
| | CCCAGAGC | | | | | | |
| 32 | CAGGTTGT | N | 027N | Hs00195343_m1 | SMNDC1 | SMNR, SPF30 | survival motor |
| | CTGCATTTG | | | | | | neuron |
| | TTGGTGTAA | | | | | | domain |
| | GTGAACAT | | | | | | containing 1 |
| | CATCACAGT | | | | | | |
| | TATCCTG | | | | | | |
| 33 | CCCTCTGT | P | 027P | Hs00223885_m1 | MPP5 | FLJ12615; | membrane |
| | GGTTCTGA | | | | | PALS1 | protein, |
| | CTGGAGAC | | | | | | palmitoylated |
| | CCCAGTGT | | | | | | 5 (MAGUK |
| | GGGGGAGG | | | | | | p55 subfamily |
| | TCTTACCATT | | | | | | member 5) |
| 34 | AATTGCTG | P | 028P | Hs00275076_m1 | HEMK1 | FLJ22320, | HemKmethyltransferase |
| | GAGGAAGA | | | | | HEMK, MTQ1 | family |
| | GCCATGAG | | | | | | member 1 |
| | CCGAGGAA | | | | | | |
| | TGCAGACA | | | | | | |
| | GCCTCTTCTC | | | | | | |
| 35 | GGCACTTG | N | 029N | Hs00893626_m1 | IL1RN | DIRA, ICIL- | interleukin 1 |
| | GAGACTTG | | | | | 1RA, IL- | receptor |
| | TATGAAAGA | | | | | 1RN, IL- | antagonist |
| | TGGCTGTG | | | | | 1ra, IL- | |
| | CCTCTGCC | | | | | 1ra3, IL1F3, | |
| | TGTCTCCCC | | | | | IL1RA, IRAP, | |
| | | | | | | MGC10430, MVCD4 | |
| 36 | GCAGCGAC | N | 031N | Hs00193519_m1 | MAF | MGC71685, | v- |
| | AACCCGTC | | | | | c-MAF | mafmusculoaponeuroticfibrosarcoma |
| | CTCTCCCG | | | | | | oncogene |
| | AGTTTTTCA | | | | | | homolog |
| | TAACTGAG | | | | | | (avian) |
| | CCCACTCGC | | | | | | |
| 37 | AGGGCAGG | N | 033N | Hs00376245_m1 | GSG1L | MGC18079, | GSG1-like |
| | CCCAAGGG | | | | | PRO19651, | |
| | AATGCACA | | | | | UNQ5831 | |
| | GGGCTGCA | | | | | | |
| | CAGAGTGA | | | | | | |
| | CTTTGGGA | | | | | | |
| | CA | | | | | | |
| 38 | TGTTTGAGT | P | 033P | Hs00212889_m1 | PPHLN1 | HSPC206, | periphilin 1 |
| | TGACTTCAC | | | | | HSPC232, | |
| | AGTCAGTTT | | | | | MGC48786 | |
| | GATCAGTAT | | | | | | |
| | GGTCCCCC | | | | | | |
| | ACCTGG | | | | | | |
| 39 | TGCTGCAA | P | 034P | Hs01122781_m1 | KIF3B | HH0048, KIAA0359 | kinesin family |
| | CTGGGGCG | | | | | | Member 3B |
| | TGGGCCGC | | | | | | |
| | TCTCTGCTT | | | | | | |
| | TTCCTGTCT | | | | | | |
| | GACTCTGA | | | | | | |
| 40 | GGGGGTGG | N | 035N | Hs00364814_m1 | IL22RA2 | CRF2- | interleukin 22 |
| | AGGAGAAT | | | | | 10, CRF2- | receptor, |
| | AAGAGGCA | | | | | S1, CRF2X, | alpha 2 |
| | GAGCAAGA | | | | | IL- | |
| | GCTAGAGA | | | | | 22BP, IL- | |
| | ATTGGTTTCC | | | | | 22RA2, MGC150509, | |
| | | | | | | MGC150510, | |
| | | | | | | UNQ5793/PRO19598/ | |
| | | | | | | PRO19822 | |
| 41 | CCTGGGCA | P | 035P | Hs00912503_m1 | PIGO | DKFZp434M222, | phosphatidylinositol |
| | TAGCTTTGG | | | | | FLJ00135, MGC20536, | glycan |
| | TGATGAGA | | | | | MGC3079, | anchor |
| | GTGGATGG | | | | | RP11- | biosynthesis, |
| | TGCTGTGA | | | | | 182N22.4, | class O |
| | GCTCCTGGT | | | | | UNQ632/ | |
| | | | | | | PRO1249 | |
| 42 | CAGACAAA | N | 036N | Hs00244603_m1 | SERPINB9 | CAP- | serpin |
| | CTGTTTTCC | | | | | CAP3, PI9 | peptidase |
| | ACAGCAGT | | | | | | inhibitor, clade |
| | TGAACCATT | | | | | | B (ovalbumin), |
| | CCACATTCC | | | | | | member 9 |
| | CACCAGC | | | | | | |
| 43 | GTAGCCAA | P | 036P | Hs01053640_m1 | TXK | BTKL, MGC22473, PSCTK5, PTK4, | TXK tyrosine |
| | AGCTCACC | | | | | RLK, | kinase |
| | TTTGAACAG | | | | | TKL | |
| | ATCCCGGT | | | | | | |
| | GACATTCTA | | | | | | |
| | TTTCCAGG | | | | | | |
| 44 | GGCAGTTT | N | 037N | Hs00368207_m1 | PREX1 | KIAA1415, | phosphatidylinositol- |
| | GTCCCCCC | | | | | P-REX1 | 3,4,5- |
| | AGCTTCGG | | | | | | trisphosphate- |
| | TATGCCTTC | | | | | | dependent |
| | AGGGAAAG | | | | | | Rac exchange |
| | GTCACAGCT | | | | | | factor 1 |
| 45 | ACGTGCTC | N | 038N | Hs00216128_m1 | NSUN5 | FLJ10267, | NOP2/Sun |
| | CCTCTGCC | | | | | MGC986, | domain family, |
| | AGGAGGAG | | | | | NOL1, NOL1R, | member 5 |
| | AATGAAGA | | | | | NSUN5A, | |
| | CGTGGTGC | | | | | WBSCR20, | |
| | GAGATGCG | | | | | WBSCR20A, | |
| | CT | | | | | p120 | |
| 46 | GACAGATG | P | 038P | Hs00204112_m1 | MRPL42 | HSPC204, | mitochondrial |
| | ATGCGGAG | | | | | MRP- | ribosomal |
| | GTTCCTGG | | | | | L31, MRPL31, | protein L42 |
| | GGGAATCA | | | | | MRPS32, | |
| | AAGAGAAAT | | | | | PTD007, | |
| | GTGCCTCAT | | | | | RPML31 | |
| 47 | TCAGACCG | N | 039N | Hs00384853_m1 | SIPA1L2 | FLJ23126, | signal-induced |
| | AGAAGCAG | | | | | FLJ23632, | proliferation- |
| | GGTGAGAG | | | | | KIAA1389, | associated 1 |
| | ATTCTAACG | | | | | SPAL2 | like 2 |
| | ACTGGATG | | | | | | |
| | CTGCTAGTA | | | | | | |
| 48 | ATCAGGCC | P | 039P | Hs00234934_m1 | CACNA1H | CACNA1HB, | calcium |
| | TCCCCTACA | | | | | Cav3.2, | channel, |
| | TCTGGGGG | | | | | ECA6, EIG6, | voltage- |
| | CGTTGGCC | | | | | FLJ90484 | dependent, T |
| | GCGAGATT | | | | | | type, alpha 1H |
| | CCCATTGAC | | | | | | subunit |
| 49 | TGTACTTGG | N | 040N | Hs00829622_s1 | ZFAND5 | RP11- | zinc finger, |
| | GTGTAGGA | | | | | 63P12.8, ZA20D2, | AN1-type |
| | CTCTAGTGT | | | | | ZFAND5A, ZNF216 | domain 5 |
| | TCTTGGGT | | | | | | |
| | GTATTGCAT | | | | | | |
| | GGGCTGC | | | | | | |
| 50 | AGAGCCTT | P | 040P | Hs00183813_m1 | PDCD6IP | AIP1, Alix, | programmed |
| | GTGTCCCT | | | | | DRIP4, HP95, | cell death 6 |
| | AAAGTTCTG | | | | | MGC17003 | interacting |
| | TCCCAGTC | | | | | | protein |
| | AGCAGTCTT | | | | | | |
| | TATAGTCC | | | | | | |
| 51 | AGGCCTGG | N | 041N | Hs00379444_m1 | NCDN | KIAA0607 | neurochondrin |
| | TGGGGGGT | | | | | | |
| | GGGGAAAC | | | | | | |
| | CTCCTTCCA | | | | | | |
| | CCTGAGCT | | | | | | |
| | TGCTTGAAG | | | | | | |
| 52 | GAGCTGGG | P | 041P | Hs00762282_s1 | VTI1B | VTI1, VTI1- | vesicle |
| | GGAACAAC | | | | | LIKE, VTI1L, | transport |
| | GAGACCAG | | | | | VTI2 | through |
| | TTAGAACGT | | | | | | interaction |
| | ACCAAGAG | | | | | | with t- |
| | TAGACTGGT | | | | | | SNAREs |
| | | | | | | | homolog 1B |
| | | | | | | | (yeast) |
| 53 | CGGTGTGT | P | 042P | Hs00757279_mH | TATDN1 | CDA11, FLJ43280 | TatDDNase |
| | AGGGGGAG | | | | | | domain |
| | TGGTGCATT | | | | | | containing 1 |
| | CATTTGATG | | | | | | |
| | GTACCAAG | | | | | | |
| | GAAGCAGC | | | | | | |
| 54 | AGAGGAGA | N | 043N | Hs00193731_m1 | CCDC6 | D10S170, | coiled-coil |
| | GCCAAGCG | | | | | FLJ32286, | domain |
| | CTAGCATG | | | | | H4, PTC, | containing 6 |
| | CCTTTTGCC | | | | | TPC, TST1 | |
| | TCTGCATAT | | | | | | |
| | CTGTGCAC | | | | | | |
| 55 | GGAGCTGC | P | 043P | Hs00260456_m1 | COQ5 | MGC104303, | coenzyme Q5 |
| | TTCAGTCCA | | | | | MGC4767 | homolog, |
| | TCTCCCAG | | | | | | methyltransferase |
| | AGGCATTT | | | | | | (S. cerevisiae) |
| | GGTCTGTAT | | | | | | |
| | CTTTGCTC | | | | | | |
| 56 | ACTGCCAG | N | 044N | Hs00939664_m1 | FOXN2 | HTLF | forkhead box |
| | TAGATGAC | | | | | | N2 |
| | CAGTCACA | | | | | | |
| | AGTGAACC | | | | | | |
| | ACTTCTCAG | | | | | | |
| | TTGCCAATC | | | | | | |
| 57 | ACCGCACG | P | 044P | Hs01126016_m1 | UTRN | DMDL, DRP, | utrophin |
| | ACACCAGC | | | | | DRP1, FLJ23678, | |
| | ACGGATCT | | | | | RP11- | |
| | CACGGAGG | | | | | 352E13.1 | |
| | TCATGGAG | | | | | | |
| | CAGATTCACA | | | | | | |
| 58 | GGTGGGTG | N | 045N | Hs01115513_m1 | PPARG | CIMT1, GLM1, | peroxisome |
| | TGTAGTCGT | | | | | NR1C3, | proliferator- |
| | GGTACTTTA | | | | | PPARG1, | activated |
| | CGCCTCGG | | | | | PPARG2, | receptor |
| | TGTTTAGG | | | | | PPARg | gamma |
| | GAGGAGCC | | | | | amma | |
| 59 | GTCTCGGT | P | 045P | Hs00219487_m1 | CCDC76 | FLJ10287, | coiled-coil |
| | TCAAATTCC | | | | | FLJ11219, | domain |
| | AAACCTACC | | | | | RP11- | containing 76 |
| | ATCTTCAGT | | | | | 305E17.1 | |
| | TGTGCGAC | | | | | | |
| | CTTGGGC | | | | | | |
| 60 | AGGCCTCT | N | 046N | Hs00212858_m1 | ANAPC11 | APC11, Apc11p, | anaphase |
| | GGGTGCCT | | | | | HSPC214, MGC882 | promoting |
| | GTGTTCTC | | | | | | complex |
| | GGCATATA | | | | | | subunit 11 |
| | GATGTGGT | | | | | | |
| | CTCGGTGT | | | | | | |
| | GT | | | | | | |
| 61 | CACTAAACC | P | 046P | Hs00903035_g1 | EI24 | PIG8, TP53I8 | etoposide |
| | TGAACTTTT | | | | | | induced 2.4 |
| | CAACTCCG | | | | | | mRNA |
| | TTGGTGGT | | | | | | |
| | GGGAGGCA | | | | | | |
| | GCGGGCAG | | | | | | |
| 62 | GGTTGGGG | N | 047N | Hs00427977_m1 | ERH | DROER, FLJ27340 | enhancer of |
| | TGGGCTTG | | | | | | rudimentary |
| | GAACACAG | | | | | | homolog |
| | GTGTGTAC | | | | | | (Drosophila) |
| | AGCGTGCT | | | | | | |
| | GTAGTGGA | | | | | | |
| | AG | | | | | | |
| 63 | GGAGATTA | P | 047P | Hs00383486_m1 | CC2D1B | KIAA1836, | coiled-coil and |
| | GTGACTCA | | | | | RP11- | C2 domain |
| | CCTGCAGT | | | | | 155O18.2 | containing 1B |
| | TGGGAGCC | | | | | | |
| | AGCTACAA | | | | | | |
| | CCCAAATCAT | | | | | | |
| 64 | CTTCCAAG | N | 048N | Hs00295839_m1 | RCHY1 | ARNIP, CHIMP, | ring finger and |
| | GGCTAGGA | | | | | DKFZp586C1620, | CHY zinc |
| | TTACAGGC | | | | | PIRH2, | finger domain |
| | ATGAGCCA | | | | | PRO1996, | containing 1 |
| | CTGTGCTT | | | | | RNF199, | |
| | GGTCCAGA | | | | | ZNF363, | |
| | TG | | | | | hARNIP | |
| 65 | GGGCCATT | P | 048P | Hs00197392_m1 | TM9SF1 | HMP70, MP70 | transmembrane 9 |
| | AACTCAGC | | | | | | superfamily |
| | AGCCATCTT | | | | | | member 1 |
| | GTTGTATGC | | | | | | |
| | CCTGACCT | | | | | | |
| | GCTGCATC | | | | | | |
| 66 | AGGGCCAC | N | 049N | Hs01651150_m1 | ENTPD8 | GLSR2492, | ectonucleoside |
| | ATGCTGCC | | | | | NTPDase- | triphosphate |
| | TGCAAACA | | | | | 8, UNQ2492, | diphosphohydrolase 8 |
| | GGGCAAGA | | | | | UNQ2492/ | |
| | CCACGGAG | | | | | PRO5779 | |
| | GCACAGGG | | | | | | |
| | GT | | | | | | |
| 67 | CTGAAGGG | P | 049P | Hs00398565_m1 | C3orf15 | AAT1, AAT1alpha, DKFZp781A2221 | chromosome |
| | CCAGATGG | | | | | | 3 open |
| | TAACTACAT | | | | | | reading frame |
| | TAGGGTTT | | | | | | 15 |
| | GCGGGTCT | | | | | | |
| | GATGGTCGC | | | | | | |
| 68 | AGCTGAAA | N | 050N | Hs00381867_m1 | FGFR1OP2 | DKFZp564O1863, DKFZp586C1423, | FGFR1 |
| | GTGGGGGT | | | | | FLJ37569, HSPC123, | oncogene |
| | AAAGGTGG | | | | | HSPC123- | partner 2 |
| | AGTAATCTG | | | | | like, WIT3.0 | |
| | TGGATTTGT | | | | | | |
| | TTCTGTTG | | | | | | |
| 69 | GATCCTAG | P | 050P | Hs00274505_m1 | NCAPD2 | CAP- | non-SMC |
| | GAAGTCTG | | | | | D2, CNAP1, | condensin I |
| | TTCCTGTCC | | | | | KIAA0159, | complex, |
| | TCCCTGTG | | | | | hCAP- | subunit D2 |
| | CAGGGTAT | | | | | D2 | |
| | CCTGTAGGG | | | | | | |
| 70 | TGCCCAGG | N | 051N | Hs00152825_m1 | TLR5 | FLJ10052, | toll-like |
| | GCAGGTGC | | | | | MGC126430, | receptor 5 |
| | TTATCTGAC | | | | | MGC126431, RP11- | |
| | CTTAACAGT | | | | | 239E10.1, | |
| | GCTCTCATC | | | | | SLEB1, TIL3 | |
| | ATGGTGG | | | | | | |
| 71 | GAAAGGAG | N | 052N | Hs00542678_m1 | NFATC1 | MGC138448, | nuclear factor |
| | AGACGGAC | | | | | NF- | of activated T- |
| | ATCGGGAG | | | | | ATC, NFAT2, | cells, |
| | GAAGAACA | | | | | NFATc | cytoplasmic, |
| | CACGGGTA | | | | | | calcineurin- |
| | CGGCTGGT | | | | | | dependent 1 |
| | GT | | | | | | |
| 72 | GCTGTTGG | P | 052P | Hs00226305_m1 | ARHGAP10 | FLJ20896, | Rho GTPase |
| | TGCAAGGG | | | | | FLJ41791, | activating |
| | AGATGGTC | | | | | GRAF2, | protein 10 |
| | TCAAGTCA | | | | | PS- | |
| | GAGGGAAG | | | | | GAP, PSGAP | |
| | CAGAGACG | | | | | | |
| | CG | | | | | | |
| 73 | TGGCTCCC | N | 053N | Hs00369703_m1 | RPUSD1 | C16ORF40, | RNA |
| | ACACAGCC | | | | | MGC19600, | pseudouridylate |
| | ATGCATTGT | | | | | RLUCL | synthase |
| | CACTCTGC | | | | | | domain |
| | CTCCGGGA | | | | | | containing 1 |
| | CCCCAGCTT | | | | | | |
| 74 | CCCACATC | N | 054N | Hs00226971_m1 | MMRN2 | EMILIN3, | multimerin 2 |
| | AAGGGAGA | | | | | EndoGlyx- | |
| | GATCAGGT | | | | | 1, FLJ13465 | |
| | GGAGGTAA | | | | | | |
| | TTGGATCTT | | | | | | |
| | GGGGGCG | | | | | | |
| | GT | | | | | | |
| 75 | CTGTGGTG | P | 054P | Hs00212785_m1 | MPP6 | PALS2, VAM- | membrane |
| | GATGCAGG | | | | | 1, VAM1, p55T | protein, |
| | AATCACTAC | | | | | | palmitoylated |
| | CAAGCTTCT | | | | | | 6 (MAGUK |
| | GACCGACT | | | | | | p55 subfamily |
| | CTGACTTG | | | | | | member 6) |
| 76 | GCTTCTACA | N | 055N | Hs00185020_m1 | AQP3 | GIL | aquaporin 3 |
| | GGCTTTTG | | | | | | (Gill blood |
| | GGAAGTAG | | | | | | group) |
| | GGTGGATG | | | | | | |
| | TGGGTAGG | | | | | | |
| | GCTGGGAGG | | | | | | |
| 77 | GTTGAGGA | P | 055P | Hs00197140_m1 | COG5 | CDG2I, FLJ41732, FLJ44289, | component of |
| | ACCACTGG | | | | | GOLTC1, | oligomericgolgi |
| | CACATCCC | | | | | GTC90 | complex 5 |
| | AAGCTAAG | | | | | | |
| | ATACAAGGT | | | | | | |
| | TAAATGGCC | | | | | | |
| 78 | AGAGTCGC | N | 056N | Hs00368084_m1 | RARS2 | ArgRS, DALRD2, | arginyl- |
| | GGGGACAC | | | | | MGC14993, MGC23778, | tRNAsynthetase |
| | AGGAGTCT | | | | | PCH6, PRO1992, RARSL, | 2, |
| | TCCTACAGT | | | | | RP3- | mitochondrial |
| | ACACACAC | | | | | 382I10.6, | |
| | GCCCGCCTC | | | | | dJ382I10.6 | |
| 79 | CGTGGGAC | P | 056P | Hs01582977_gH | MT1E | MT1, MTD | metallothionein |
| | ACAAACCC | | | | | | 1E |
| | CAACTGTAC | | | | | | |
| | CCCCTATG | | | | | | |
| | GTTTCAGAA | | | | | | |
| | CAGAGCTG | | | | | | |
| 80 | GCTGAGCG | N | 057N | Hs00217534_m1 | WDR41 | FLJ10904, | WD repeat |
| | CAACTGCC | | | | | MSTP048 | domain 41 |
| | CCATCTGA | | | | | | |
| | CCACTGAC | | | | | | |
| | TCAAATACG | | | | | | |
| | AACTGCTTG | | | | | | |
| 81 | CAGAAGTG | N | 058N | Hs00872692_m1 | NRK | DKFZp686A17109, | Nik related |
| | TGGAGGGG | | | | | FLJ16788, | kinase |
| | GGCTCCTG | | | | | MGC131849, | |
| | ACTAGACAA | | | | | NESK, | |
| | TTTCCCTAG | | | | | RP1- | |
| | CCCTTGTG | | | | | 82J11.1 | |
| 82 | TCCCTTCAA | P | 058P | Hs00275795_m1 | SPG7 | CAR, CMAR, | spastic |
| | CGTAGTCAT | | | | | FLJ37308, | paraplegia 7 |
| | CCCCTGGT | | | | | MGC126331, MGC126332, | (pure and |
| | GGTGGAAG | | | | | PGN, SPG5C | complicated |
| | CAAGACGA | | | | | | autosomal |
| | CGGCCCCT | | | | | | recessive) |
| 83 | CTGCAGGT | N | 060N | Hs00165902_m1 | TCN2 | D22S676, | transcobalamin |
| | CTCCCATG | | | | | D22S750, | II |
| | AAGGCCAC | | | | | II, TC, TCII, | |
| | CCCATGGT | | | | | TC- | |
| | CTGATGGG | | | | | 2, TC2, TCII | |
| | CATGAAGC | | | | | | |
| | AT | | | | | | |
| 84 | GTCGTTCCT | N | 061N | Hs00203383_m1 | C7orf68 | FLJ21076, | chromosome |
| | CCAACATA | | | | | HIG- | 7 open |
| | GTGTGTATT | | | | | 2, HIG2, MGC138388 | reading frame |
| | GGTCTGAA | | | | | | 68 |
| | GGGGGTGG | | | | | | |
| | TGGGATGC | | | | | | |
| 85 | AGTACCTTG | N | 062N | Hs00163869_m1 | CA2 | CA- | carbonic |
| | ACTTTGTTC | | | | | II, CAII, Car2 | anhydrase II |
| | ACAGCATG | | | | | | |
| | TAGGGTGA | | | | | | |
| | TGAGCACT | | | | | | |
| | CACAATTG | | | | | | |
| 86 | GGCTTGGT | P | 062P | Hs00535769_m1 | C8orf33 | FLJ20989 | chromosome |
| | CTAGCAGT | | | | | | 8 open |
| | AACACCAG | | | | | | reading frame |
| | TGTCTGGG | | | | | | 33 |
| | AAGATGCC | | | | | | |
| | TGTTGCAAAG | | | | | | |
| 87 | TCTGTAGC | N | 063N | Hs00610137_m1 | STAM | DKFZp686J2352, STAM1 | signal |
| | CTCTGCATA | | | | | | transducing |
| | CTACTGGC | | | | | | adaptor |
| | TGTCATCAC | | | | | | molecule |
| | ACCAGCGT | | | | | | (SH3 domain |
| | ACAGTAGC | | | | | | and ITAM |
| | | | | | | | motif) 1 |
| 88 | GAAGAATG | P | 063P | Hs00224208_m1 | SMYD3 | FLJ21080, | SET and |
| | CGACGCCA | | | | | KMT3E, | MYND |
| | ACATCAGA | | | | | MGC104324, | domain |
| | GCATCCTAA | | | | | ZMYND1, | containing 3 |
| | GGGAACGC | | | | | ZNFN3A1, | |
| | AGTCAGAGG | | | | | bA74P14.1 | |
| 89 | CGCCCACC | N | 064N | Hs00608163_m1 | SEC14L1 | DKFZp686C06176, | SEC14-like 1 |
| | CAGCGGCG | | | | | PRELID4A, | (S. cerevisiae) |
| | ACATTGTAC | | | | | SEC14L | |
| | AGACTCCT | | | | | | |
| | CTCACCTCT | | | | | | |
| | AGATAGCA | | | | | | |
| 90 | ATGTCCTTG | P | 064P | Hs00265266_g1 | GSTM2 | GST4, GSTM, | glutathione S- |
| | AGAGAAAC | | | | | GSTM2- | transferase |
| | CAAGTATTT | | | | | 2, GTHMUS, | mu 2 (muscle) |
| | GAGCCCAG | | | | | MGC117303 | |
| | CTGCCTGG | | | | | | |
| | ATGCCTTC | | | | | | |
| 91 | GTGTGTTTT | N | 065N | Hs00698292_m1 | FADS6 | FP18279 | fatty acid |
| | GTCGGGAG | | | | | | desaturase |
| | GGAACTCC | | | | | | domain family, |
| | AGGGGAAG | | | | | | member 6 |
| | TGAGGGGA | | | | | | |
| | GAAGGTTCC | | | | | | |
| 92 | CGGCTGCA | P | 065P | Hs00853882_g1 | SNRPC | FLJ20302, | small nuclear |
| | TTTCAACAA | | | | | RP3- | ribonucleoprotein |
| | GGAAAGAT | | | | | 375P9.1, | polypeptide C |
| | ACCTCCTAC | | | | | U1C, Yhc1 | |
| | TCCATTCTC | | | | | | |
| | TGCTCCT | | | | | | |
| 93 | CCAGTATCA | N | 066N | Hs01040835_m1 | GINS1 | KIAA0186, | GINS |
| | CCACTTTG | | | | | PSF1, RP4- | complex |
| | GAAGGGGA | | | | | 691N24.2 | subunit 1 |
| | CAGTGAAAT | | | | | | (Psf1 |
| | TGGGGCTA | | | | | | homolog) |
| | GAGAAGGA | | | | | | |
| 94 | CCTTTTGAG | N | 067N | Hs00363121_m1 | POLR3K | C11, C11- | polymerase |
| | GTGAAGAG | | | | | RNP3, My010, | (RNA) III |
| | CCAGGGGG | | | | | RPC10, | (DNA |
| | TCAGGAAAT | | | | | RPC11, | directed) |
| | ATGGCCTAT | | | | | RPC12.5, | polypeptide K, |
| | CTGCCAG | | | | | hRPC11 | 12.3 kDa |
| 95 | CCCAGCCC | P | 067P | Hs00208576_m1 | RNF44 | KIAA1100 | ring finger |
| | TGGCTGGG | | | | | | protein 44 |
| | CCCAGCGC | | | | | | |
| | CTGTGTTCT | | | | | | |
| | GTGTTAGAA | | | | | | |
| | AGGTTTTA | | | | | | |
| 96 | AACTGGGC | N | 068N | Hs00362067_m1 | COX5A | COX, COX- | cytochrome c |
| | CTTGACAAA | | | | | VA, VA | oxidase |
| | GTGTAAAC | | | | | | subunit Va |
| | CGCATGGA | | | | | | |
| | TGGGCTTC | | | | | | |
| | CCCAAGGAT | | | | | | |
| 97 | GGCAATTTT | P | 068P | Hs00536084_m1 | PHAX | FLJ13193, | phosphorylated |
| | AAGGATAAA | | | | | RNUXA | adaptor for |
| | AACTAACAT | | | | | | RNA export |
| | TGGCCAGG | | | | | | |
| | CACGGTGG | | | | | | |
| | CTCACGC | | | | | | |
| 98 | TCTGTACAT | P | 069P | Hs00608563_m1 | HEATR3 | FLJ20718 | HEAT repeat |
| | TCTGTAAAA | | | | | | containing 3 |
| | ACTTCAAAA | | | | | | |
| | CCTGGCCA | | | | | | |
| | GGCATGGT | | | | | | |
| | GGCTCAC | | | | | | |
| 99 | GCCACCTC | N | 070N | Hs00260900_m1 | C5orf32 | ORF1- | chromosome |
| | TGACAGGT | | | | | FL49 | 5 open |
| | GTGCCTGC | | | | | | reading frame |
| | CCCCATCT | | | | | | 32 |
| | CTTCTGATT | | | | | | |
| | GCTGTTAAC | | | | | | |
| 100 | TCTGGACG | P | 070P | Hs00156055_m1 | BCL7B | 0 | B-cell |
| | GAGCTGCT | | | | | | CLL/lymphoma |
| | GGCAGCTT | | | | | | 7B |
| | CTGCGAGA | | | | | | |
| | AGAGAGAG | | | | | | |
| | ATGTGGAA | | | | | | |
| | GG | | | | | | |
| 101 | ATGATCCA | N | 071N | Hs00246261_m1 | HBXIP | MGC71071, | hepatitis B |
| | GAAACACG | | | | | XIP | virus × |
| | ATGGCATC | | | | | | interacting |
| | ACGGTGGC | | | | | | protein |
| | AGTGCACA | | | | | | |
| | AAATGGCC | | | | | | |
| | TC | | | | | | |
| 102 | TGCAACTG | P | 071P | Hs00217433_m1 | YY1AP1 | FLJ10875, | YY1 |
| | GGGCTCTT | | | | | FLJ13914, | associated |
| | GAGCAGCT | | | | | HCCA1, | protein 1 |
| | TGCTTTAGC | | | | | HCCA2, RP11- | |
| | CTGCTCCC | | | | | 243J18.1, | |
| | ACTCTGTGG | | | | | YAP, YY1AP | |
| 103 | CTTGCCGC | N | 072N | Hs00170832_m1 | CD226 | DNAM- | CD226 |
| | CATCCCAG | | | | | 1, DNAM1, | molecule |
| | GTCTAGCC | | | | | PTA1, TLiSA1 | |
| | TTAGGAGC | | | | | | |
| | AAATGTAGT | | | | | | |
| | AGATAGTCG | | | | | | |
| 104 | AGCCAGGG | P | 072P | Hs01075391_m1 | ZNF641 | DKFZp667D1012, FLJ31295 | zinc finger |
| | GGGCCAGA | | | | | | protein 641 |
| | CCTTGTTCA | | | | | | |
| | TGTGTGGG | | | | | | |
| | TCTGTCTTC | | | | | | |
| | CTTATGCC | | | | | | |
| 105 | TTGAAGATT | N | 073N | Hs00204415_m1 | HOXC11 | HOX3H, MGC4906 | homeobox |
| | GGGGTGGT | | | | | | C11 |
| | GGAGGCAG | | | | | | |
| | TAGGGAGA | | | | | | |
| | TGGGATTG | | | | | | |
| | GGCACCTCC | | | | | | |
| 106 | CCATGGCA | P | 073P | Hs00971557_m1 | KLF12 | AP- | Kruppel-like |
| | AAGCACAA | | | | | 2rep, AP2REP, | factor 12 |
| | ATGGACCC | | | | | HSPC122 | |
| | CCGAGGCC | | | | | | |
| | TATCTCCCA | | | | | | |
| | GACAAAGTA | | | | | | |
| 107 | ACCTCAAG | N | 074N | Hs00225908_m1 | C16orf53 | FLJ22459, | chromosome |
| | CTCCCAAA | | | | | GAS, MGC4606, | 16 open |
| | CAGCACGT | | | | | PA1 | reading frame |
| | TGCGGGAA | | | | | | 53 |
| | AGAGGAAG | | | | | | |
| | AGAGAGTG | | | | | | |
| | TG | | | | | | |
| 108 | AGCTGTGT | P | 074P | Hs00248344_m1 | SARM1 | FLJ36296, | sterile alpha |
| | GACCGGGA | | | | | KIAA0524, | and TIR motif |
| | GTAGTCACT | | | | | SAMD2, | containing 1 |
| | TAACCTATG | | | | | SARM | |
| | TCTCCCCTT | | | | | | |
| | CCTCACC | | | | | | |
| 109 | GAGGTATTT | N | 075N | Hs00905983_m1 | N4BP2 | B3BP, FLJ10680, | NEDD4 |
| | AAAGTGCTT | | | | | KIAA1413 | binding |
| | TGAGACCT | | | | | | protein 2 |
| | GATTCATGC | | | | | | |
| | CCCCCAAA | | | | | | |
| | GGGTGGT | | | | | | |
| 110 | ATGTATGGA | P | 075P | Hs01390827_g1 | LYRM5 | 0 | LYR motif |
| | GTCATTACT | | | | | | containing 5 |
| | TCTGACCTT | | | | | | |
| | GAAATAGC | | | | | | |
| | CTGCTGGT | | | | | | |
| | GACTGGC | | | | | | |
| 111 | CCAGGCTT | N | 076N | Hs00541038_m1 | SHMT1 | CSHMT, | serine |
| | TCCTGCTC | | | | | MGC15229, | hydroxymethyltransferase 1 |
| | CACCTGAG | | | | | MGC24556, | (soluble) |
| | ATAACCAAC | | | | | SHMT | |
| | TCCCTCCC | | | | | | |
| | GTAATCAGG | | | | | | |
| 112 | CTTCTCGCT | P | 076P | Hs00823168_g1 | MT1H | MGC70702, | metallothionein |
| | TGGGAACT | | | | | MT1 | 1H |
| | CCAGTCTC | | | | | | |
| | ACCTCGGC | | | | | | |
| | TTGCAATG | | | | | | |
| | GACCCCAAC | | | | | | |
| 113 | CCCCTAGC | N | 077N | Hs00172870_m1 | NR2F6 | EAR- | nuclear |
| | ATGAACTTG | | | | | 2, EAR2, ERBAL2 | receptor |
| | TGGGATGG | | | | | | subfamily 2, |
| | TGGGGTTG | | | | | | group F, |
| | GCTTCCCT | | | | | | member 6 |
| | GGCATGATG | | | | | | |
| 114 | AGCCCAGG | P | 078P | Hs01122981_m1 | PJA2 | KIAA0438, | praja ring |
| | TCTAAATGT | | | | | Neurodap1, | finger 2 |
| | AATGGTTG | | | | | RNF131 | |
| | GTTTATTGT | | | | | | |
| | TCTATAACC | | | | | | |
| | CCAGCCC | | | | | | |
| 115 | CTGGATCA | N | 079N | Hs01937849_s1 | GPBAR1 | BG37, GPCR19, | G protein- |
| | GAGACCCT | | | | | GPR131, | coupled bile |
| | GCCTCTGTT | | | | | M- | acid receptor 1 |
| | TGACCCCG | | | | | BAR, MGC40597, | |
| | CACTGACT | | | | | TGR5 | |
| | GAATAAAGC | | | | | | |
| 116 | GCACGTGT | P | 079P | Hs00367579_m1 | CRLF3 | CREME9, | cytokine |
| | GTATCCAAT | | | | | CYTOR4, | receptor-like |
| | CTGCCTGT | | | | | FRWS, MGC20661, | factor 3 |
| | GACATGCA | | | | | p48.2 | |
| | TTTTACTCT | | | | | | |
| | TTGCAGAG | | | | | | |
| 117 | CGGTGGGT | N | 082N | Hs02379634_s1 | CH25H | C25H | cholesterol |
| | GCCCCTAA | | | | | | 25- |
| | GACTCGGG | | | | | | hydroxylase |
| | ACTGCTGT | | | | | | |
| | GCCTTTCAC | | | | | | |
| | ACTTGAATG | | | | | | |
| 118 | GTGCTGGG | P | 083P | Hs00233287_m1 | IKBKB | FLJ33771, | inhibitor of |
| | CCGGGGAG | | | | | FLJ36218, | kappa light |
| | TCCCTGTCT | | | | | FLJ38368, | polypeptide |
| | CTCACAGC | | | | | FLJ40509, | gene |
| | ATCTAGCA | | | | | IKK- | enhancer in |
| | GTATTATTA | | | | | beta, IKK2, | B-cells, kinase |
| | | | | | | IKKB, MGC131801, | beta |
| | | | | | | NFKBIKB | |
| 119 | CAGAGCCC | N | 084N | Hs00541730_m1 | CHST13 | C4ST3, MGC119278, | carbohydrate |
| | CTGGTGCA | | | | | MGC119279, | (chondroitin 4) |
| | ATGCGGTC | | | | | MGC119281 | sulfotransferase |
| | ACAGGTTTT | | | | | | 13 |
| | ATGGGACT | | | | | | |
| | TTGGTGAGC | | | | | | |
| 120 | CCCAAGTT | P | 084P | Hs00371639_m1 | SNUPN | KPNBL, RNUT1, | snurportin 1 |
| | GAAGGGTT | | | | | Snurportin1 | |
| | CTTCCCATA | | | | | | |
| | GCCCAGAC | | | | | | |
| | CACCCTGG | | | | | | |
| | ATGCCTCAT | | | | | | |
| 121 | CCTGGACT | N | 085N | Hs00384007_m1 | WSCD1 | KIAA0523 | WSC domain |
| | AAGCCAAT | | | | | | containing 1 |
| | GACACCTT | | | | | | |
| | CCATCTTTC | | | | | | |
| | CAGCTATG | | | | | | |
| | GTGACTGGG | | | | | | |
| 122 | ATGGGCAT | HSK | 01HSK | Hs02338565_gH | RPL19 | DKFZp779D216, | ribosomal |
| | AGGTAAGC | | | | | FLJ27452, MGC71997 | protein L19 |
| | GGAAGGGT | | | | | | |
| | ACAGCCAA | | | | | | |
| | TGCCCGAA | | | | | | |
| | TGCCAGAGAA | | | | | | |
| 123 | CCCCCAGT | HSK | 02HSK | Hs01086912_m1 | HNRNPD | AUF1, AUF1A, | heterogeneous |
| | ATTGTAGAG | | | | | HNRPD, | nuclear |
| | CAAGTCTTG | | | | | P37, hnRNPD0 | ribonucleoprotein |
| | TGTTAAAAG | | | | | | D (AU-rich |
| | CCCAGTGT | | | | | | element RNA |
| | GACAGTG | | | | | | binding |
| | | | | | | | protein 1, |
| | | | | | | | 37 kDa) |
| 124 | CGCGCGCA | HSK | 03HSK | Hs00828752_gH | RPS20 | FLJ27451, | ribosomal |
| | ACAGCCAT | | | | | MGC102930 | protein S20 |
| | GGCTTTTAA | | | | | | |
| | GGATACCG | | | | | | |
| | GAAAAACA | | | | | | |
| | CCCGTGGAG | | | | | | |
| 125 | TCATCTACA | HSK | 04HSK | Hs01631495_s1 | RPL26L1 | FLJ46904, | ribosomal |
| | TCGAGCGG | | | | | RPL26P1 | protein L26- |
| | GTGCAGCG | | | | | | like 1 |
| | TGAGAAGG | | | | | | |
| | CCAACGGC | | | | | | |
| | ACAACTGTC | | | | | | |
| 126 | GTGTTTAAC | HSK | 06HSK | Hs00371372_m1 | SON | BASS1, C21ORF50, | SON DNA |
| | CTAATGCTC | | | | | DBP- | binding |
| | AGCCTTGG | | | | | 5, FLJ21099, | protein |
| | TACTCCATT | | | | | FLJ33914, | |
| | CCCTTCTCC | | | | | HSPC310, | |
| | TTCCCC | | | | | KIAA1019, | |
| | | | | | | NREBP, | |
| | | | | | | SON3 | |
| 127 | GTGACTTCT | HSK | 07HSK | Hs00763191_s1 | YPEL5 | CGI-127 | yippee-like 5 |
| | GAGTACAG | | | | | | (Drosophila) |
| | TTAAGTTCC | | | | | | |
| | TCCTATTTG | | | | | | |
| | CCACTGGG | | | | | | |
| | CTGTTGG | | | | | | |
| 128 | TCACTCAAG | HSK | 08HSK | Hs01115161_m1 | DPP7 | DPP2, DPPII, | dipeptidyl- |
| | CAGCTGGC | | | | | QPP | peptidase 7 |
| | GGCAGAGG | | | | | | |
| | GAAGGGGC | | | | | | |
| | TGAATAAAC | | | | | | |
| | GCCTGGAG | | | | | | |
| 129 | ACTGAAAG | HSK | 10HSK | Hs00559413_m1 | ANXA7 | ANX7, RP11- | annexin A7 |
| | CTCTGCCTT | | | | | 537A6.8, | |
| | CCGGAATC | | | | | SNX, SYN | |
| | CCTCTAAGT | | | | | EXIN | |
| | CTGCTTGAT | | | | | | |
| | AGAGTGG | | | | | | |
| 130 | CTGAGGCT | HSK | 11HSK | Hs00212868_m1 | PAIP2 | HSPC218, | poly(A) |
| | ACAAGTTAG | | | | | MGC72018, | binding |
| | TCAGCAGA | | | | | PAIP2A | protein |
| | TGAGTGCC | | | | | | interacting |
| | AGTCCAGC | | | | | | protein 2 |
| | CTTTTCTGG | | | | | | |
| 131 | GTGGGGAC | HSK | 12HSK | Hs00199284_m1 | RAB35 | H- | RAB35, |
| | TCAGGGCT | | | | | ray, RAB1C, | member RAS |
| | GGACCGAC | | | | | RAY | oncogene |
| | GTCCTAGT | | | | | | family |
| | GGACCTGA | | | | | | |
| | TGTGAAATTC | | | | | | |
| 132 | CCGGCTCT | HSK | 13HSK | Hs00606477_m1 | CDC37 | P50CDC37 | cell division |
| | CGTCACTG | | | | | | cycle 37 |
| | GGCTCTGT | | | | | | homolog (S. cerevisiae) |
| | TTTCACTGT | | | | | | |
| | TCGTCTGCT | | | | | | |
| | GTCTGTGT | | | | | | |
| 133 | TGGCCTTTC | HSK | 14HSK | Hs00194538_m1 | SRSF4 | SFRS4, SRP75 | serine/arginine- |
| | CTACAGGG | | | | | | rich splicing |
| | AGCTCAGT | | | | | | factor 4 |
| | AACCTGGA | | | | | | |
| | CGGCTCTA | | | | | | |
| | AGGCTGGAA | | | | | | |
| 134 | CAAGCTTTC | HSK | 15HSK | Hs00363236_m1 | AKIRIN2 | C6ORF166, | akirin 2 |
| | GTCAGTGG | | | | | FBI1, FLJ10342, | |
| | CAACCACT | | | | | dJ486L4.2 | |
| | CTTAGGCA | | | | | | |
| | GCAGCAAC | | | | | | |
| | TGGTTTTGG | | | | | | |
| 135 | GGTCCTGG | HSK | 16HSK | Hs00229388_m1 | CCDC130 | MGC10471, | coiled-coil |
| | TGAGGGTG | | | | | SB115 | domain |
| | TTTGTGCCT | | | | | | containing |
| | TGTGAGAC | | | | | | 130 |
| | TCCGTACAT | | | | | | |
| | TAAAGACC | | | | | | |
| 136 | GCCCAGTT | HSK | 17HSK | Hs00272036_m1 | CD2BP2 | FWP010, | CD2 |
| | TGGTGGGC | | | | | LIN1, Snu40, | (cytoplasmic |
| | CCTTCTTTC | | | | | U5- | tail) binding |
| | CTGGACTTT | | | | | 52K | protein 2 |
| | GTGGAGGA | | | | | | |
| | GGCACCAA | | | | | | |
| 137 | TCCTCCCC | HSK | 18HSK | Hs00197056_m1 | TIMM23 | FLJ40725, | translocase of |
| | CATGAACTA | | | | | FLJ56773, | inner |
| | GAAAACCA | | | | | FLJ57459, | mitochondrial |
| | CTTACTCCC | | | | | FLJ79448, | membrane 23 |
| | AGAATTCAG | | | | | MGC71995, | homolog |
| | GTCGTGC | | | | | MGC87383, | (yeast), translocase |
| | | | | | | RP11- | of inner |
| | | | | | | 481A12.7, | mitochondrial |
| | | | | | | TIM23, RP11- | membrane 23 |
| | | | | | | 592B15.7, | homolog B |
| | | | | | | bA592B15.7 | (yeast) |
| 138 | CTTCTGTAA | HSK | 20HSK | Hs00193824_m1 | MED6 | NY-REN- | mediator |
| | CCTTTCCTC | | | | | 28 | complex |
| | TCCCGGAC | | | | | | subunit 6 |
| | TTGAGCAA | | | | | | |
| | CCTACACA | | | | | | |
| | CTCACATG | | | | | | |
| 139 | CATCAGGA | HSK | 21HSK | Hs00702452_s1 | NUDC | HNUDC, | nuclear |
| | GAAAGGCT | | | | | MNUDC, | distribution |
| | GGGTCTTG | | | | | NPD011 | gene C |
| | GGACCTTG | | | | | | homolog (A. nidulans) |
| | TCCTCCCC | | | | | | |
| | AGTTGGCC | | | | | | |
| | TA | | | | | | |
| 140 | ACCAGTTTT | HSK | 22HSK | Hs00220038_m1 | TMEM167B | AD- | transmembrane |
| | TACAGCCT | | | | | 020, C1ORF119, | protein |
| | CCTGGGTG | | | | | FLJ90710 | 167B |
| | GGTCGTCT | | | | | | |
| | TGACCCAA | | | | | | |
| | ACTCTTGTG | | | | | | |
| 141 | CTGGGGAG | HSK | 23HSK | Hs00229455_m1 | URM1 | C9ORF74, | ubiquitin |
| | ATACTTGAT | | | | | MGC2668, | related |
| | GGCGCGAA | | | | | RP11- | modifier 1 |
| | TGTCCGTTT | | | | | 339B21.4 | |
| | TCTCTCCCT | | | | | | |
| | TCCCACC | | | | | | |
| 142 | GGCTGTAA | HSK | 24HSK | Hs00412682_m1 | UBXN4 | FLJ23318, | UBX domain |
| | AATGAGAAT | | | | | KIAA0242, | protein 4 |
| | TCTGCCCC | | | | | KIAA2042, | |
| | CTCACCTCT | | | | | UBXD2, | |
| | TACCCCAG | | | | | UBXDC1, | |
| | TACTATTC | | | | | erasin | |
| 143 | CTCCAGCC | HSK | 25HSK | Hs00380814_m1 | FAM177A1 | C14ORF24, | family with |
| | TGGGCGAC | | | | | DKFZp686J1254, | sequence |
| | AGAGTGAG | | | | | FLJ38854 | similarity 177, |
| | ACTCCATCT | | | | | | member A1 |
| | TGGGGGGA | | | | | | |
| | AAAAAGTAT | | | | | | |

TABLE 2B
192 Exemplary Positive and Negative GVHD Predictor Genes and Housekeeping (“HSK”) Genes (RNA192)

| RNA192 | | | | | | | | | | |
|---|---|---|---|---|---|---|---|---|---|---|
| Index | | | | | | | | | | |
| (SEQ | | RNA1546 | | | Accession | | | | | P or N |
| ID NO: | | Index | | | No. Basic | | | | | Predictor |
| 1547- | RNA1538 | (SEQ | | Accession | (without | | | | Probe | or HSK |
| 1738) | Index | ID NO) | ProbeID | No. | decimal) | Gene Name | Symbol | Synonyms | Sequence | gene |
| 1547 | 1 | 1196 | 6280672 | NM_030938.2 | NM_030938 | transmembrane protein | TMEM49 | VMP1; | ATATTCCATC | N |
| | | | | | | 49 (TMEM49), mRNA. | | DKFZP566I133 | CTGCCCAAC | |
| | | | | | | | | | CCTTCCTCTC | |
| | | | | | | | | | CCATCCTCAA | |
| | | | | | | | | | AAAAGGGCC | |
| | | | | | | | | | AT | |
| 1548 | 2 | 12 | 4200575 | NM_014232.1 | NM_014232 | vesicle-associated | VAMP2 | SYB2; | GCCCAGAGA | P |
| | | | | | | membrane protein 2 | | VAMP-2; | GAGCTGTCCT | |
| | | | | | | (synaptobrevin 2) | | FLJ11460 | CTCATTGGGT | |
| | | | | | | (VAMP2), mRNA. | | | GAACTGATTG | |
| | | | | | | | | | AGGAAGGGT | |
| | | | | | | | | | CT | |
| 1549 | — | — | 7570326 | NM_000024.4 | NM_000024 | adrenergic, beta-2-, | ADRB2 | B2AR; | CAGCTGTGAA | N |
| | | | | | | receptor, surface | | BETA2AR; | CATGGACTCT | |
| | | | | | | (ADRB2), mRNA. | | BAR; | TCCCCCACTC | |
| | | | | | | | | ADRBR; | CTCTTATTTG | |
| | | | | | | | | ADRB2R | CTCACACGGG | |
| 1550 | — | — | 5270431 | NM_004538.3 | NM_004538 | nucleosome assembly | NAP1L3 | MB20; | CCAGCCCATA | P |
| | | | | | | protein 1-like 3 | | NPL3; | AGACTAAGG | |
| | | | | | | (NAP1L3), mRNA. | | MGC26312 | GTTTAAATCT | |
| | | | | | | | | | GCTTGCACTA | |
| | | | | | | | | | GCTGTGCCTTC | |
| 1551 | — | — | 4210754 | NM_001018069.1 | NM_001018069 | SERPINE1 mRNA | SERBP1 | CGI-55; | GTTCCTTTTG | N |
| | | | | | | binding protein 1 | | FLJ90489; | CTGCCCATTT | |
| | | | | | | (SERBP1), transcript | | DKFZp564M2423; | GGGAGTATG | |
| | | | | | | variant3, mRNA. | | CHD3IP; | TGGCAATTCC | |
| | | | | | | | | PAIRBP1; | TAGTGCTCTTG | |
| | | | | | | | | PAI-RBP1; | | |
| | | | | | | | | HABP4L | | |
| 1552 | — | — | 2810255 | NM_015989.3 | NM_015989 | cysteinesulfinic acid | CSAD | PCAP; | GCCTTTTTAG | P |
| | | | | | | decarboxylase | | MGC119355; | GCCACAGTG | |
| | | | | | | (CSAD), mRNA. | | MGC119354; | ACCTGCGCA | |
| | | | | | | | | MGC119357; | ATGTTTATAT | |
| | | | | | | | | CSD | GCTTTGACCT | |
| | | | | | | | | | AC | |
| 1553 | 3 | 461 | 830553 | NM_017455.2 | NM_017455 | neuroplastin (NPTN), | NPTN | SDFR1; | ACCTAACGGT | N |
| | | | | | | transcript variant alpha, | | GP55; | TCTCATGCGG | |
| | | | | | | mRNA. | | DKFZp686L2477; | TGCGTAATTG | |
| | | | | | | | | np65; np55; | TAGATGCATG | |
| | | | | | | | | GP65; | TACTTGTGTG | |
| | | | | | | | | SDR1; | | |
| | | | | | | | | MGC102805 | | |
| 1554 | 4 | 1256 | 6580711 | NM_001129.3 | NM_001129 | AE binding protein 1 | AEBP1 | FLJ33612; | TCAGCACATG | P |
| | | | | | | (AEBP1), mRNA. | | ACLP | GAAGGCCCC | |
| | | | | | | | | | TGGTATGGAC | |
| | | | | | | | | | ACTGAAAGGA | |
| | | | | | | | | | AGGGCTGGT | |
| | | | | | | | | | CC | |
| 1555 | — | — | 6840471 | NM_021601.3 | NM_021601 | CD79a molecule, | CD79A | MB-1; IGA | TCCTTAGTCA | N |
| | | | | | | immunoglobulin- | | | TATTCCCCCA | |
| | | | | | | associated alpha | | | GTGGGGGGT | |
| | | | | | | (CD79A), transcript | | | GGGAGGGTA | |
| | | | | | | variant 2, mRNA. | | | ACCTCACTCT | |
| | | | | | | | | | TC | |
| 1556 | — | — | 4280743 | NM_000997.3 | NM_000997 | ribosomal protein L37 | RPL37 | MGC99572 | CCTGCGTCA | P |
| | | | | | | (RPL37), mRNA. | | | CAGGGAAGC | |
| | | | | | | | | | AACCTACAGA | |
| | | | | | | | | | GAAGCAGCA | |
| | | | | | | | | | GCTCCCCAA | |
| | | | | | | | | | GAGA | |
| 1557 | 5 | 1309 | 6960594 | NM_145869.1 | NM_145869 | annexin A11 | ANXA11 | ANX11; | TCACAGTTCT | N |
| | | | | | | (ANXA11), transcript | | CAP50 | GGAGGCTGA | |
| | | | | | | variant c, mRNA. | | | GAAGATCGT | |
| | | | | | | | | | GAGGCTGCA | |
| | | | | | | | | | TCTGGCAAG | |
| | | | | | | | | | GGCC | |
| 1558 | — | — | 4590139 | NM_006297.1 | NM_006297 | X-ray repair | XRCC1 | RCC | ATCCCAGCTT | P |
| | | | | | | complementing | | | TGAGGAGGC | |
| | | | | | | defective repair in | | | CCTGATGGA | |
| | | | | | | Chinese hamster cells | | | CAACCCCTCC | |
| | | | | | | 1 (XRCC1), mRNA. | | | CTGGCATTCG | |
| | | | | | | | | | TT | |
| 1559 | — | — | 5340110 | NM_024921.2 | NM_024921 | premature ovarian | POF1B | FLJ22792; | TAGTGGCTG | N |
| | | | | | | failure, 1B (POF1B), | | POF | GGAAAAGGG | |
| | | | | | | mRNA. | | | GTGTGCGAG | |
| | | | | | | | | | GGGAACTGG | |
| | | | | | | | | | GGATGCTTAA | |
| | | | | | | | | | TGTG | |
| 1560 | — | — | 2940048 | NM_001003789.1 | NM_001003789 | RAB, member of RAS | RABL2B | | CACCTCGGG | P |
| | | | | | | oncogene family-like | | | GACAATTCCT | |
| | | | | | | 2B (RABL2B), | | | TGGGCTTCTC | |
| | | | | | | transcript variant 1, | | | CTGAGGTAAT | |
| | | | | | | mRNA. | | | GATTTACCCCC | |
| 1561 | 6 | 224 | 6480095 | NM_030918.5 | NM_030918 | sortingnexin family | SNX27 | MGC126873; | GACCCCCTTT | N |
| | | | | | | member27 (SNX27), | | MGC20471; | TAAGCCAGTG | |
| | | | | | | mRNA. | | MGC126871; | AGCTGGGCT | |
| | | | | | | | | MY014; | TCAGTTTTTC | |
| | | | | | | | | KIAA0488 | CCAGGCCAT | |
| | | | | | | | | | GC | |
| 1562 | 7 | 220 | 6400148 | NM_080430.2 | NM_080430 | selenoprotein M | SELM | MGC40146; | GAATACTTCT | P |
| | | | | | | (SELM), mRNA. | | SEPM | CTTGCTGAGA | |
| | | | | | | | | | GCCGATGCC | |
| | | | | | | | | | CGTCCCCGG | |
| | | | | | | | | | GCCAGCAGG | |
| | | | | | | | | | GAT | |
| 1563 | — | — | 1300671 | NM_005437.2 | NM_005437 | nuclear receptor | NCOA4 | RFG; | AGGAGCCTTT | N |
| | | | | | | coactivator 4 (NCOA4), | | ARA70; | CCAGTTATCT | |
| | | | | | | mRNA. | | DKFZp762E1112; | TGAGTTGCAG | |
| | | | | | | | | PTC3; | CTCTGTAGTT | |
| | | | | | | | | ELE1 | TCTTGAGGCC | |
| 1564 | 8 | 254 | 7610537 | NM_002129.2 | NM_002129 | high-mobility group box | HMGB2 | HMG2 | GCAAAAGTGA | P |
| | | | | | | 2 (HMGB2), mRNA. | | | AGCAGGAAA | |
| | | | | | | | | | GAAGGGCCC | |
| | | | | | | | | | TGGCAGGCC | |
| | | | | | | | | | AACAGGCTCA | |
| | | | | | | | | | AAG | |
| 1565 | 9 | 1535 | 6960278 | NM_178552.2 | NM_178552 | chromosome 22 open | C22ORF33 | EAN57; | CTCGGCTACA | N |
| | | | | | | reading frame 33 | | MGC35206; | ACATGCGGT | |
| | | | | | | (C22orf33), mRNA. | | cE81G9.2 | CAAACTTGTT | |
| | | | | | | | | | TCGAGGGGC | |
| | | | | | | | | | TGCTGAGGA | |
| | | | | | | | | | GAC | |
| 1566 | 10 | 1067 | 5560133 | NM_152468.3 | NM_152468 | transmembrane | TMC8 | EVIN2; | AAGCAGCTG | P |
| | | | | | | channel-like 8 (TMC8), | | EVER2; | GTGTGGCAG | |
| | | | | | | mRNA. | | EV2; | GTTCAGGAG | |
| | | | | | | | | MGC40121; | AAGTGGCAC | |
| | | | | | | | | MGC102701 | CTGGTGGAG | |
| | | | | | | | | | GACCT | |
| 1567 | — | — | 7560037 | NM_133471.1 | NM_133471 | KIAA1949 (KIAA1949), | KIAA1949 | HKMT1098 | GCCACGCTTA | N |
| | | | | | | mRNA. | | | CTTGCTGTGT | |
| | | | | | | | | | CTGCGTGGA | |
| | | | | | | | | | ATTCTCTCCT | |
| | | | | | | | | | CTGTCCCCTCC | |
| 1568 | — | — | 2030274 | NM_138923.1 | NM_138923 | TAF1 RNA polymerase | TAF1 | KAT4; | GACCCAAACA | P |
| | | | | | | II, TATA box binding | | CCG1; | ACCCCGCAT | |
| | | | | | | protein (TBP)- | | P250; | GCTTCAGGA | |
| | | | | | | associated factor, | | BA2R; | GAACACAAG | |
| | | | | | | 250 kDa (TAF1), | | TAFII250; | GATGGACAT | |
| | | | | | | transcript variant 2, | | NSCL2; | GGAA | |
| | | | | | | mRNA. | | TAF2A; OF; | | |
| | | | | | | | | DYT3; | | |
| | | | | | | | | CCGS | | |
| 1569 | 11 | 508 | 1230017 | NM_018367.4 | NM_018367 | phytoceramidase, | PHCA | FLJ11238; | GGATTCTAGG | N |
| | | | | | | alkaline (PHCA), | | APHC | TGGACATTAC | |
| | | | | | | mRNA. | | | AGAGTTGAAT | |
| | | | | | | | | | TCCTCACTAC | |
| | | | | | | | | | CCCCTCCCGC | |
| 1570 | — | — | 6940088 | NM_201554.1 | NM_201554 | diacylglycerol kinase, | DGKA | MGC42356; | GTACCAGAC | P |
| | | | | | | alpha 80 kDa (DGKA), | | DGK- | CTAAGTGACA | |
| | | | | | | transcript variant 4, | | alpha; | AGAGACTGG | |
| | | | | | | mRNA. | | DAGK1; | AAGTGGTTG | |
| | | | | | | | | MGC12821; | GGCTGGAGG | |
| | | | | | | | | DAGK | GTGC | |
| 1571 | — | — | 580240 | NM_145755.1 | NM_145755 | tetratricopeptide repeat | TTC21A | STI2; | AGGATGCAG | N |
| | | | | | | domain 21A (TTC21A), | | MGC70523; | TCACCAACTA | |
| | | | | | | mRNA. | | DKFZp686P18239; | CAAACTGGC | |
| | | | | | | | | MGC156293 | CTGGAAGTAC | |
| | | | | | | | | | AGTCATCACG | |
| | | | | | | | | | CC | |
| 1572 | 12 | 754 | 2940075 | NM_018571.5 | NM_018571 | amyotrophic lateral | ALS2CR2 | ILPIPA; | GCTGTCCCTT | P |
| | | | | | | sclerosis 2 (juvenile) | | ILPIP; | GGGAATGGG | |
| | | | | | | chromosome region, | | PAPK; | CCCTCAGAG | |
| | | | | | | candidate 2 | | MGC102916; | GACAGTGCTT | |
| | | | | | | (ALS2CR2), mRNA. | | CALS- | CCAAGTACAT | |
| | | | | | | | | 21; | CT | |
| | | | | | | | | PRO1038 | | |
| 1573 | — | — | 7400408 | NM_178471.1 | NM_178471 | G protein-coupled | GPR119 | hGPCR2; | GCTCTATCCT | N |
| | | | | | | receptor 119 | | GPCR2; | GGACCCCCT | |
| | | | | | | (GPR119), mRNA. | | MGC119957 | TCCTTATCAC | |
| | | | | | | | | | TGGCATTGTG | |
| | | | | | | | | | CAGGTGGCC | |
| | | | | | | | | | TG | |
| 1574 | 13 | 1197 | 6290021 | NM_002811.3 | NM_002811 | proteasome (prosome, | PSMD7 | P40; S12; | GCTCTCTGCC | P |
| | | | | | | macropain) 26S | | MOV34 | TCCGGTCACT | |
| | | | | | | subunit, non-ATPase, | | | CTTGCTGTGG | |
| | | | | | | 7 (PSMD7), mRNA. | | | TGCTACGTG | |
| | | | | | | | | | GAAGTGAATGG | |
| 1575 | — | — | 1010224 | NM_020654.3 | NM_020654 | SUMO1/sentrin | SENP7 | KIAA1707; | CTGTACTTCC | N |
| | | | | | | specific peptidase 7 | | MGC157730 | ACGTGACTG | |
| | | | | | | (SENP7), transcript | | | GGTGCTGAG | |
| | | | | | | variant 1, mRNA. | | | GGGAGTTAAA | |
| | | | | | | | | | GCCTCCCTG | |
| | | | | | | | | | GTG | |
| 1576 | — | — | 5700519 | NM_002082.2 | NM_002082 | G protein-coupled | GRK6 | FLJ32135; | TCCAAGAGCT | P |
| | | | | | | receptor kinase 6 | | GPRK6 | GAATGTCTTT | |
| | | | | | | (GRK6), transcript | | | GGGCTGGAT | |
| | | | | | | variant 2, mRNA. | | | GGCTCAGTTC | |
| | | | | | | | | | CCCCAGACC | |
| | | | | | | | | | TG | |
| 1577 | — | — | 7100615 | NM_001042472.1 | NM_001042472 | abhydrolase domain | ABHD12 | DKFZP434P106; | ACCTTGGCTA | N |
| | | | | | | containing 12 | | dJ965G21.2; | CAGGCACAA | |
| | | | | | | (ABHD12), transcript | | C20orf22; | ATACATTTAC | |
| | | | | | | variant 1, mRNA. | | ABHD12A; | AAGAGCCCT | |
| | | | | | | | | BEM46L2 | GAGCTGCCA | |
| | | | | | | | | | CGG | |
| 1578 | — | — | 2260615 | NM_004698.1 | NM_004698 | PRP3 pre-mRNA | PRPF3 | HPRP3P; | GCATGGGGC | P |
| | | | | | | processing factor 3 | | HPRP3; | TGAACACTAC | |
| | | | | | | homolog (S. cerevisiae) | | Prp3p; | TGGGACCTT | |
| | | | | | | (PRPF3), | | RP18; | GCGCTGAGT | |
| | | | | | | mRNA. | | PRP3 | GAATCTGTGT | |
| | | | | | | | | | TAG | |
| 1579 | — | — | 4200458 | NM_005249.3 | NM_005249 | forkhead box G1 | FOXG1 | FKHL1; | GTTGTTTCAG | N |
| | | | | | | (FOXG1), mRNA. | | KHL2; | TTGGCAACAC | |
| | | | | | | | | HFK3; | TGCCCATTCA | |
| | | | | | | | | HBF2; | ATTGAATCAG | |
| | | | | | | | | FOXG1C; | AAGGGGACAA | |
| | | | | | | | | QIN; | | |
| | | | | | | | | FKHL2; | | |
| | | | | | | | | HBF-2; | | |
| | | | | | | | | HBF-1; | | |
| | | | | | | | | FKH2; | | |
| | | | | | | | | HFK1; | | |
| | | | | | | | | FKHL4; | | |
| | | | | | | | | HBF-G2; | | |
| | | | | | | | | BF2; | | |
| | | | | | | | | FHKL3; | | |
| | | | | | | | | BF1; HFK2; | | |
| | | | | | | | | HBF-3; | | |
| | | | | | | | | FOXG1B; | | |
| | | | | | | | | FKHL3; | | |
| | | | | | | | | FOXG1A | | |
| 1580 | — | — | 4810333 | NM_153701.1 | NM_153701 | interleukin 12 receptor, | IL12RB1 | CD212; IL- | GGGAAGATG | P |
| | | | | | | beta 1 (IL12RB1), | | 12R- | CCCTATCTCT | |
| | | | | | | transcript variant 2, | | BETA1; | CGGGTGCTG | |
| | | | | | | mRNA. | | IL12RB; | CCTACAACGT | |
| | | | | | | | | MGC34454 | GGCTGTCATC | |
| | | | | | | | | | TC | |
| 1581 | 14 | 406 | 540446 | NM_012459.1 | NM_012459 | translocase of inner | TIMM8B | MGC102866; | GGACTTGTTA | N |
| | | | | | | mitochondrial | | TIM8B; | CTAAGCAGAT | |
| | | | | | | membrane 8 homolog | | DDP2; | TTAAGGGTCA | |
| | | | | | | B (yeast) (TIMM8B), | | MGC117373; | GTGGGGGAA | |
| | | | | | | nuclear gene encoding | | FLJ21744 | GGCTATCAACC | |
| | | | | | | mitochondrial protein, | | | | |
| | | | | | | mRNA. | | | | |
| 1582 | — | — | 1820035 | NM_001077268.1 | NM_001077268 | zinc finger, FYVE | ZFYVE19 | FLJ14840; | GATAGGCCC | P |
| | | | | | | domain containing 19 | | MPFYVE | CTTCCTGAGC | |
| | | | | | | (ZFYVE19), mRNA. | | | CTTGGTGTCC | |
| | | | | | | | | | CTGGAATGA | |
| | | | | | | | | | GGAAAGATTC | |
| | | | | | | | | | TC | |
| 1583 | — | — | 6770168 | NM_006371.3 | NM_006371 | cartilage associated | CRTAP | CASP; OI7 | TCCCACTTTA | N |
| | | | | | | protein (CRTAP), | | | GGGTGGCAG | |
| | | | | | | mRNA. | | | CCAGTAGGC | |
| | | | | | | | | | CAAACTCCAA | |
| | | | | | | | | | AGACCGTTG | |
| | | | | | | | | | CTG | |
| 1584 | 15 | 658 | 2260296 | NR_003654.1 | NR_003654 | SCAN domain | SCAND2 | | GAACCAGTA | P |
| | | | | | | containing 2 | | | GTCCAGGGT | |
| | | | | | | (SCAND2) on | | | GGCTCACAAA | |
| | | | | | | chromosome 15. | | | GACCACTTTG | |
| | | | | | | | | | AGGCTCTTGC | |
| | | | | | | | | | TC | |
| 1585 | — | — | 5360376 | NM_006762.1 | NM_006762 | lysosomal associated | LAPTM5 | MGC125860; | CCACAGGTTA | N |
| | | | | | | multispanning | | MGC125861 | GTTCAGTCAA | |
| | | | | | | membrane protein 5 | | | AGCAGGCAA | |
| | | | | | | (LAPTM5), mRNA. | | | CCCCCTTGTG | |
| | | | | | | | | | GGCACTGAC | |
| | | | | | | | | | CC | |
| 1586 | 16 | 172 | 4830113 | NM_016619.1 | NM_016619 | placenta-specific 8 | PLAC8 | C15; onzin | TAAGGCCCT | P |
| | | | | | | (PLAC8), mRNA. | | | GCACTGAAAA | |
| | | | | | | | | | TGCAAGCTCA | |
| | | | | | | | | | GGCGCCGGT | |
| | | | | | | | | | GGTCGTTGT | |
| | | | | | | | | | GAC | |
| 1587 | — | — | 4850082 | NM_003780.3 | NM_003780 | UDP-Gal:betaGlcNAc | B4GALT2 | beta4Gal- | GATCTTGGG | N |
| | | | | | | beta 1,4- | | T2; B4Gal- | GTTGGCCTTT | |
| | | | | | | galactosyltransferase, | | T3; B4Gal- | GCATGGGAG | |
| | | | | | | polypeptide 2 | | T2 | GCAGGTGGG | |
| | | | | | | (B4GALT2), transcript | | | GCTTGGATCA | |
| | | | | | | variant 2, mRNA. | | | GTA | |
| 1588 | — | — | 2970017 | NM_005978.3 | NM_005978 | S100 calcium binding | S100A2 | S100L; | CTCAGCTGG | P |
| | | | | | | protein A2 (S100A2), | | CAN19; | AGTGCTGGG | |
| | | | | | | mRNA. | | MGC111539 | AGATGAGGG | |
| | | | | | | | | | CCTCCTGGAT | |
| | | | | | | | | | CCTGCTCCCT | |
| | | | | | | | | | TCT | |
| 1589 | 17 | 1357 | 7380601 | NM_024896.2 | NM_024896 | endoplasmic reticulum | ERMP1 | FXNA; | GATAGGATTC | N |
| | | | | | | metallopeptidase 1 | | KIAA1815; | CTTAAGATGT | |
| | | | | | | (ERMP1), mRNA. | | bA207C16.3 | TACCACCCAG | |
| | | | | | | | | | GGGGCCACA | |
| | | | | | | | | | AGCCAGCCT | |
| | | | | | | | | | GC | |
| 1590 | — | — | 1110575 | NM_002494.2 | NM_002494 | NADH dehydrogenase | NDUFC1 | MGC138266; | GGCCCTTCA | P |
| | | | | | | (ubiquinone) 1, | | KFYI; | GTGCGATCAA | |
| | | | | | | subcomplex unknown, | | MGC126847; | AGTTCTACGT | |
| | | | | | | 1, 6 kDa (NDUFC1), | | MGC117464 | GCGAGAGCC | |
| | | | | | | mRNA. | | | GCCGAATGC | |
| | | | | | | | | | CAA | |
| 1591 | — | — | 1740382 | NM_000161.2 | NM_000161 | GTP cyclohydrolase 1 | GCH1 | DYT5; | TGCACAAAAC | N |
| | | | | | | (dopa-responsive | | GTP-CH-1; | CACTGCCAG | |
| | | | | | | dystonia) (GCH1), | | GTPCH1; | ATAACCAGAG | |
| | | | | | | transcript variant 1, | | GCH | GGGCCTGGG | |
| | | | | | | mRNA. | | | AAGGGAGAA | |
| | | | | | | | | | GAA | |
| 1592 | — | — | 780184 | NM_006346.2 | NM_006346 | progesteroneimmunomodulatory | PIBF1 | RP11- | GTCCACTACG | P |
| | | | | | | binding factor | | 505F3.1; | AGGTACTTCA | |
| | | | | | | 1 (PIBF1), mRNA. | | KIAA1008; | AAAGCCCAGT | |
| | | | | | | | | PIBF1; | AATGGTGGTC | |
| | | | | | | | | C13orf24 | AGATACCATG | |
| 1593 | 18 | 757 | 2970397 | NM_145288.1 | NM_145288 | zinc finger protein 342 | ZNF342 | ZNF296 | GTACCGCTG | N |
| | | | | | | (ZNF342), mRNA. | | | CCAACACCCA | |
| | | | | | | | | | TTGACCTCCT | |
| | | | | | | | | | CGTTTTTGCC | |
| | | | | | | | | | CGCCTTCTCCA | |
| 1594 | — | — | 3610280 | NM_016446.2 | NM_016446 | chromosome 9 open | C9ORF127 | NGX6; | TTCCACCACG | P |
| | | | | | | reading frame 127 | | RP11- | TTCTCCGAGG | |
| | | | | | | (C9orf127), mRNA. | | 112J3.10; | GTTTGGGAAT | |
| | | | | | | | | NAG-5; | GTCTGTGCCT | |
| | | | | | | | | MGC120460 | TCACTGTGTC | |
| 1595 | 19 | 237 | 6960593 | NM_004439.4 | NM_004439 | EPH receptor A5 | EPHA5 | EHK1; | CTGTGGGAG | N |
| | | | | | | (EPHA5), transcript | | TYRO4; | GGCTTCTTCC | |
| | | | | | | variant 1, mRNA. | | HEK7; | CTGTGCGCT | |
| | | | | | | | | CEK7 | GTTGCCCATC | |
| | | | | | | | | | CAAGCCTAAT | |
| | | | | | | | | | AT | |
| 1596 | 20 | 1330 | 7150685 | NM_012117.1 | NM_012117 | chromobox homolog 5 | CBX5 | HP1- | TCAGAGGAT | P |
| | | | | | | (HP1 alpha homolog, | | ALPHA; | GAGGAGGAG | |
| | | | | | | Drosophila) (CBX5), | | HP1; | TATGTTGTGG | |
| | | | | | | mRNA. | | HP1Hs- | AGAAGGTGC | |
| | | | | | | | | alpha | TAGACAGGC | |
| | | | | | | | | | GCGT | |
| 1597 | 21 | 570 | 1660072 | NM_130787.2 | NM_130787 | adaptor-related protein | AP2A1 | CLAPA1; | CTCCACTGGT | N |
| | | | | | | complex 2, alpha 1 | | AP2- | GACAGAGAA | |
| | | | | | | subunit (AP2A1), | | ALPHA; | GACACCAGG | |
| | | | | | | transcript variant 2, | | ADTAA | GTTTGGGGG | |
| | | | | | | mRNA. | | | ATGCCTGGG | |
| | | | | | | | | | ACTT | |
| 1598 | — | — | 1510035 | NM_001981.2 | NM_001981 | epidermal growth | EPS15 | AF1P; | CTGGCTCCA | P |
| | | | | | | factor receptor | | MLLT5; AF- | GGGCCTGTG | |
| | | | | | | pathway substrate 15 | | 1P | CTTGAAAAGG | |
| | | | | | | (EPS15), mRNA. | | | ACAGATAAGT | |
| | | | | | | | | | ATTGCCCAGA | |
| | | | | | | | | | GC | |
| 1599 | — | — | 6520605 | NM_005871.2 | NM_005871 | survival motor neuron | SMNDC1 | SPF30; | CAGGTTGTCT | N |
| | | | | | | domain containing 1 | | SMNR | GCATTTGTTG | |
| | | | | | | (SMNDC1), mRNA. | | | GTGTAAGTGA | |
| | | | | | | | | | ACATCATCAC | |
| | | | | | | | | | AGTTATCCTG | |
| 1600 | — | — | 6250288 | NM_022474.2 | NM_022474 | membrane protein, | MPP5 | FLJ12615; | CCCTCTGTG | P |
| | | | | | | palmitoylated 5 | | PALS1 | GTTCTGACTG | |
| | | | | | | (MAGUK p55 | | | GAGACCCCA | |
| | | | | | | subfamily member 5) | | | GTGTGGGGG | |
| | | | | | | (MPP5), mRNA. | | | AGGTCTTACC | |
| | | | | | | | | | ATT | |
| 1601 | 22 | 207 | 6060196 | NM_145912.5 | NM_145912 | NFAT activating | NFAM1 | FLJ40652; | GGGACTCAG | N |
| | | | | | | protein with ITAM motif | | CNAIP; | CATTTTCCAG | |
| | | | | | | 1 (NFAM1), mRNA. | | bK126B4.4 | TCTTTTTCAG | |
| | | | | | | | | | GGGTAGACA | |
| | | | | | | | | | GGGGAGCCT | |
| | | | | | | | | | GGG | |
| 1602 | — | — | 3420767 | NM_016173.3 | NM_016173 | HemKmethyltransferase | HEMK1 | FLJ22320; | AATTGCTGGA | P |
| | | | | | | family member 1 | | HEMK; | GGAAGAGCC | |
| | | | | | | (HEMK1), mRNA. | | MTQ1 | ATGAGCCGA | |
| | | | | | | | | | GGAATGCAG | |
| | | | | | | | | | ACAGCCTCTT | |
| | | | | | | | | | CTC | |
| 1603 | — | — | 7510386 | NM_173843.1 | NM_173843 | interleukin 1 receptor | IL1RN | ICIL-1RA; | GGCACTTGG | N |
| | | | | | | antagonist (IL1RN), | | IRAP; IL- | AGACTTGTAT | |
| | | | | | | transcript variant 4, | | 1ra3; | GAAAGATGG | |
| | | | | | | mRNA. | | MGC10430; | CTGTGCCTCT | |
| | | | | | | | | IL1F3; | GCCTGTCTCC | |
| | | | | | | | | IL1RA | CC | |
| 1604 | 23 | 14 | 5220196 | NM_006565.2 | NM_006565 | CCCTC-binding factor | CTCF | | ATGTAGCAGA | P |
| | | | | | | (zinc finger protein) | | | ATGGCACCC | |
| | | | | | | (CTCF), mRNA. | | | AGACCACTG | |
| | | | | | | | | | CCCACCAGT | |
| | | | | | | | | | GACGGACAT | |
| | | | | | | | | | GCAC | |
| 1605 | 24 | 1329 | 7150278 | NM_000201.1 | NM_000201 | intercellular adhesion | ICAM1 | P3.58; BB2; | GCAGTGATCA | N |
| | | | | | | molecule 1 (CD54), | | CD54 | GGGTCCTGC | |
| | | | | | | human rhinovirus | | | AAGCAGTGG | |
| | | | | | | receptor (ICAM1), | | | GGAAGGGGG | |
| | | | | | | mRNA. | | | CCAAGGTATT | |
| | | | | | | | | | GGA | |
| 1606 | 25 | 271 | 2510253 | NM_145306.2 | NM_145306 | chromosome 10 open | C1CORF35 | | ACATGTTCCG | P |
| | | | | | | reading frame 35 | | | ATGCCTGTG | |
| | | | | | | (C10orf35), mRNA. | | | GAAGACATG | |
| | | | | | | | | | CCGACGTCT | |
| | | | | | | | | | CCTCTGCCTA | |
| | | | | | | | | | GGG | |
| 1607 | — | — | 3610440 | NM_005360.3 | NM_005360 | v- | MAF | MGC71685 | GCAGCGACA | N |
| | | | | | | mafmusculoaponeuroticfibrosarcoma | | | ACCCGTCCTC | |
| | | | | | | oncogene homolog | | | TCCCGAGTTT | |
| | | | | | | (avian) (MAF), | | | TTCATAACTG | |
| | | | | | | transcript variant 1, | | | AGCCCACTC | |
| | | | | | | mRNA. | | | GC | |
| 1608 | 26 | 457 | 830324 | NM_001459.2 | NM_001459 | fms-related tyrosine | FLT3LG | | ACACAGAGG | P |
| | | | | | | kinase 3 ligand | | | AAGTTGGCTA | |
| | | | | | | (FLT3LG), mRNA. | | | GAGGCCGGT | |
| | | | | | | | | | CCCTTCCTTG | |
| | | | | | | | | | GGCCCCTCT | |
| | | | | | | | | | CAT | |
| 1609 | 27 | 1042 | 5290008 | NM_015112.2 | NM_015112 | microtubule associated | MAST2 | FLJ39200; | TCAGGAGGG | N |
| | | | | | | serine/threonine kinase | | RP4- | GCCAAGAAC | |
| | | | | | | 2 (MAST2), mRNA. | | 533D7.1; | CAGGGGGCC | |
| | | | | | | | | KIAA0807; | ATCAAAAGCA | |
| | | | | | | | | MAST205; | TCGGGATTTG | |
| | | | | | | | | MTSSK | GCA | |
| 1610 | 28 | 231 | 6650451 | NM_015057.3 | NM_015057 | MYC binding protein 2 | MYCBP2 | FLJ21597; | GAGGTGTTTG | P |
| | | | | | | (MYCBP2), mRNA. | | PAM; | CATGTGGCC | |
| | | | | | | | | FLJ13826; | ATTACCGTCA | |
| | | | | | | | | FLJ10106; | TTGGCCTGTG | |
| | | | | | | | | FLJ21646; | AAGCATTGGAC | |
| | | | | | | | | DKFZp686M08244; | | |
| | | | | | | | | KIAA0916 | | |
| 1611 | — | — | 4150538 | NM_144675.1 | NM_144675 | GSG1-like (GSG1L), | GSG1L | MGC18079; | AGGGCAGGC | N |
| | | | | | | mRNA. | | PRO19651 | CCAAGGGAA | |
| | | | | | | | | | TGCACAGGG | |
| | | | | | | | | | CTGCACAGA | |
| | | | | | | | | | GTGACTTTGG | |
| | | | | | | | | | GACA | |
| 1612 | — | — | 2450102 | NM_201438.1 | NM_201438 | periphilin 1 (PPHLN1), | PPHLN1 | HSPC206; | TGTTTGAGTT | P |
| | | | | | | transcript variant 5, | | HSPC232; | GACTTCACAG | |
| | | | | | | mRNA. | | MGC48786 | TCAGTTTGAT | |
| | | | | | | | | | CAGTATGGTC | |
| | | | | | | | | | CCCCACCTGG | |
| 1613 | 29 | 774 | 3140095 | NM_177543.1 | NM_177543 | phosphatidic acid | PPAP2C | PAP-2c; | AGGCTCGGG | N |
| | | | | | | phosphatase type 2C | | PAP2-g; | GGTCCCCGC | |
| | | | | | | (PPAP2C), transcript | | LPP2 | GTCCCAGGC | |
| | | | | | | variant 3, mRNA. | | | CCAGGGGGA | |
| | | | | | | | | | TGGGGGTCG | |
| | | | | | | | | | CGAGA | |
| 1614 | — | — | 450398 | NM_004798.2 | NM_004798 | kinesin family member | KIF3B | HH0048; | TGCTGCAACT | P |
| | | | | | | 3B (KIF3B), mRNA. | | KIAA0359 | GGGGCGTGG | |
| | | | | | | | | | GCCGCTCTCT | |
| | | | | | | | | | GCTTTTCCTG | |
| | | | | | | | | | TCTGACTCTGA | |
| 1615 | — | — | 4810458 | NM_181309.1 | NM_181309 | interleukin 22 receptor, | IL22RA2 | CRF2-S1; | GGGGGTGGA | N |
| | | | | | | alpha 2 (IL22RA2), | | MGC150509; | GGAGAATAA | |
| | | | | | | transcript variant 2, | | IL-22BP; | GAGGCAGAG | |
| | | | | | | mRNA. | | MGC150510; | CAAGAGCTA | |
| | | | | | | | | CRF2- | GAGAATTGGT | |
| | | | | | | | | 10; CRF2X | TTCC | |
| 1616 | — | — | 3890196 | NM_152850.2 | NM_152850 | phosphatidylinositol | PIGO | RP11- | CCTGGGCAT | P |
| | | | | | | glycan anchor | | 182N22.4; | AGCTTTGGTG | |
| | | | | | | biosynthesis, class O | | DKFZp434M222; | ATGAGAGTG | |
| | | | | | | (PIGO), transcript | | FLJ00135; | GATGGTGCT | |
| | | | | | | variant 2, mRNA. | | MGC3079; | GTGAGCTCCT | |
| | | | | | | | | MGC20536 | GGT | |
| 1617 | — | — | 1230156 | NM_004155.3 | NM_004155 | serpin peptidase | SERPINB9 | PI9; CAP-3; | CAGACAAACT | N |
| | | | | | | inhibitor, clade B | | CAP3 | GTTTTCCACA | |
| | | | | | | (ovalbumin), member 9 | | | GCAGTTGAAC | |
| | | | | | | (SERPINB9), mRNA. | | | CATTCCACAT | |
| | | | | | | | | | TCCCACCAGC | |
| 1618 | — | — | 1190138 | NM_003328.2 | NM_003328 | TXK tyrosine kinase | TXK | MGC22473; | GTAGCCAAA | P |
| | | | | | | (TXK), mRNA | | PSCTK5; | GCTCACCTTT | |
| | | | | | | | | PTK4; | GAACAGATCC | |
| | | | | | | | | BTKL; TKL; | CGGTGACATT | |
| | | | | | | | | RLK | CTATTTCCAGG | |
| 1619 | — | — | 3780139 | NM_020820.3 | NM_020820 | phosphatidylinositol | PREX1 | KIAA1415 | GGCAGTTTGT | N |
| | | | | | | 3,4,5-trisphosphate- | | | CCCCCCAGC | |
| | | | | | | dependent RAC | | | TTCGGTATGC | |
| | | | | | | exchanger 1 (PREX1), | | | CTTCAGGGAA | |
| | | | | | | mRNA. | | | AGGTCACAG | |
| | | | | | | | | | CT | |
| 1620 | 30 | 351 | 130241 | NM_001007468.1 | NM_001007468 | SWI/SNF related, | SMARCB1 | Sfh1p; | TACGCCTTCA | P |
| | | | | | | matrix associated, actin | | RDT; | GCGAGAACC | |
| | | | | | | dependent regulator of | | hSNFS; | CTCTGCCCAC | |
| | | | | | | chromatin, subfamily b, | | SNF5; | AGTGGAGATT | |
| | | | | | | member 1 | | Snr1; | GCCATCCGG | |
| | | | | | | (SMARCB1), transcript | | SNF5L1; | AA | |
| | | | | | | variant 2, mRNA. | | INI1; | | |
| | | | | | | | | BAF47 | | |
| 1621 | — | — | 5340458 | NM_018044.2 | NM_018044 | NOL1/NOP2/Sun | NSUN5 | p120; | ACGTGCTCC | N |
| | | | | | | domain family, | | FLJ10267; | CTCTGCCAG | |
| | | | | | | member 5 (NSUN5), | | WBSCR20; | GAGGAGAAT | |
| | | | | | | transcript variant 2, | | p120 | GAAGACGTG | |
| | | | | | | mRNA. | | (NOL1); | GTGCGAGAT | |
| | | | | | | | | MGC986; | GCGCT | |
| | | | | | | | | WBSCR20A; | | |
| | | | | | | | | (NOL1); | | |
| | | | | | | | | NOL1R; | | |
| | | | | | | | | NSUN5A | | |
| 1622 | — | — | 70608 | NM_172177.1 | NM_172177 | mitochondrial | MRPL42 | PTD007; | GACAGATGAT | P |
| | | | | | | ribosomal protein L42 | | MRPS32; | GCGGAGGTT | |
| | | | | | | (MRPL42), nuclear | | MRP-L31; | CCTGGGGGA | |
| | | | | | | gene encoding | | RPML31; | ATCAAAGAGA | |
| | | | | | | mitochondrial protein, | | HSPC204 | AATGTGCCTC | |
| | | | | | | transcript variant 2, | | | AT | |
| | | | | | | mRNA. | | | | |
| 1623 | — | — | 3460053 | NM_020808.3 | NM_020808 | signal-induced | SIPA1L2 | SPAL2; | TCAGACCGA | N |
| | | | | | | proliferation-associated | | FLJ23126; | GAAGCAGGG | |
| | | | | | | 1 like 2 (SIPA1L2), | | KIAA1389; | TGAGAGATTC | |
| | | | | | | mRNA. | | FLJ23632 | TAACGACTGG | |
| | | | | | | | | | ATGCTGCTAG | |
| | | | | | | | | | TA | |
| 1624 | — | — | 6220343 | NM_021098.2 | NM_021098 | calcium channel, | CACNA1H | CACNA1HB; | ATCAGGCCTC | P |
| | | | | | | voltage-dependent, T | | FLJ90484; | CCCTACATCT | |
| | | | | | | Type, alpha 1H subunit | | Cav3.2 | GGGGGCGTT | |
| | | | | | | (CACNA1H), transcript | | | GGCCGCGAG | |
| | | | | | | variant 1, mRNA. | | | ATTCCCATTG | |
| | | | | | | | | | AC | |
| 1625 | — | — | 6620753 | NM_006007.1 | NM_006007 | zinc finger, AN1-type | ZFAND5 | ZFAND5A; | TGTACTTGGG | N |
| | | | | | | domain 5 (ZFAND5), | | ZA20D2; | TGTAGGACTC | |
| | | | | | | mRNA. | | ZNF216 | TAGTGTTCTT | |
| | | | | | | | | | GGGTGTATTG | |
| | | | | | | | | | CATGGGCTGC | |
| 1626 | — | — | 5860605 | NM_013374.3 | NM_013374 | programmed cell death | PDCD6IP | MGC17003; | AGAGCCTTGT | P |
| | | | | | | 6 interacting protein | | Alix; | GTCCCTAAAG | |
| | | | | | | (PDCD6IP), mRNA. | | DRIP4; | TTCTGTCCCA | |
| | | | | | | | | AIP1; HP95 | GTCAGCAGT | |
| | | | | | | | | | CTTTATAGTCC | |
| 1627 | — | — | 160390 | NM_001014839.1 | NM_001014839 | neurochondrin | NCDN | KIAA0607 | AGGCCTGGT | N |
| | | | | | | (NCDN), transcript | | | GGGGGGTGG | |
| | | | | | | variant 1, mRNA. | | | GGAAACCTC | |
| | | | | | | | | | CTTCCACCTG | |
| | | | | | | | | | AGCTTGCTTG | |
| | | | | | | | | | AAG | |
| 1628 | — | — | 3890136 | NM_006370.1 | NM_006370 | vesicle transport | VTI1B | VTI1; | GAGCTGGGG | P |
| | | | | | | through interaction with | | VTI1L; VTI2 | GAACAACGA | |
| | | | | | | t-SNAREs homolog 1B | | | GACCAGTTAG | |
| | | | | | | (yeast) (VTI1B), | | | AACGTACCAA | |
| | | | | | | mRNA. | | | GAGTAGACT | |
| | | | | | | | | | GGT | |
| 1629 | 31 | 181 | 5090288 | NM_171999.2 | NM_171999 | sal-like 3 (Drosophila) | SALL3 | ZNF796 | GTGGTCTGTA | N |
| | | | | | | (SALL3), mRNA. | | | GCCCAATAAC | |
| | | | | | | | | | TGGGGAACG | |
| | | | | | | | | | AGTTACAGAC | |
| | | | | | | | | | AAACATCACCG | |
| 1630 | — | — | 2750592 | NM_032026.2 | NM_032026 | TatDDNase domain | TATDN1 | CDA11 | CGGTGTGTA | P |
| | | | | | | containing 1 | | | GGGGGAGTG | |
| | | | | | | (TATDN1), mRNA. | | | GTGCATTCAT | |
| | | | | | | | | | TTGATGGTAC | |
| | | | | | | | | | CAAGGAAGC | |
| | | | | | | | | | AGC | |
| 1631 | — | — | 7330435 | NM_005436.2 | NM_005436 | coiled-coil domain | CCDC6 | TST1; TPC; | AGAGGAGAG | N |
| | | | | | | containing 6 (CCDC6), | | PTC; H4; | CCAAGCGCT | |
| | | | | | | mRNA. | | D10S170; | AGCATGCCTT | |
| | | | | | | | | FLJ32286 | TTGCCTCTGC | |
| | | | | | | | | | ATATCTGTGC | |
| | | | | | | | | | AC | |
| 1632 | — | — | 7570500 | NM_032314.3 | NM_032314 | coenzyme Q5 | COQ5 | MGC4767; | GGAGCTGCT | P |
| | | | | | | homolog, | | MGC104303 | TCAGTCCATC | |
| | | | | | | methyltransferase (S. cerevisiae) | | | TCCCAGAGG | |
| | | | | | | (COQ5), | | | CATTTGGTCT | |
| | | | | | | mRNA. | | | GTATCTTTGC | |
| | | | | | | | | | TC | |
| 1633 | — | — | 6020612 | NM_002158.3 | NM_002158 | forkhead box N2 | FOXN2 | HTLF | ACTGCCAGTA | N |
| | | | | | | (FOXN2), mRNA. | | | GATGACCAGT | |
| | | | | | | | | | CACAAGTGAA | |
| | | | | | | | | | CCACTTCTCA | |
| | | | | | | | | | GTTGCCAATC | |
| 1634 | — | — | 840240 | NM_007124.2 | NM_007124 | utrophin (UTRN), | UTRN | DRP; | ACCGCACGA | P |
| | | | | | | mRNA. | | DMDL; | CACCAGCAC | |
| | | | | | | | | DRP1; | GGATCTCAC | |
| | | | | | | | | FLJ23678 | GGAGGTCAT | |
| | | | | | | | | | GGAGCAGAT | |
| | | | | | | | | | TCACA | |
| 1635 | — | — | 6450176 | NM_138711.3 | NM_138711 | peroxisome | PPARG | NR1C3; | GGTGGGTGT | N |
| | | | | | | proliferator-activated | | PPARG1; | GTAGTCGTG | |
| | | | | | | receptor gamma | | PPARG2 | GTACTTTACG | |
| | | | | | | (PPARG), transcript | | | CCTCGGTGTT | |
| | | | | | | variant 3, mRNA. | | | TAGGGAGGA | |
| | | | | | | | | | GCC | |
| 1636 | — | — | 4060669 | NM_019083.1 | NM_019083 | coiled-coil domain | CCDC76 | FLJ10287; | GTCTCGGTTC | P |
| | | | | | | containing 76 | | FLJ11219 | AAATTCCAAA | |
| | | | | | | (CCDC76), mRNA. | | | CCTACCATCT | |
| | | | | | | | | | TCAGTTGTGC | |
| | | | | | | | | | GACCTTGGGC | |
| 1637 | — | — | 10220 | NM_001002246.1 | NM_001002246 | APC11 anaphase | ANAPC11 | HSPC214; | AGGCCTCTG | N |
| | | | | | | promoting complex | | MGC882; | GGTGCCTGT | |
| | | | | | | subunit 11 homolog | | Apc11p; | GTTCTCGGCA | |
| | | | | | | (yeast) (ANAPC11), | | APC11 | TATAGATGTG | |
| | | | | | | transcript variant 4, | | | GTCTCGGTGT | |
| | | | | | | mRNA. | | | GT | |
| 1638 | — | — | 770541 | NM_001007277.1 | NM_001007277 | etoposide induced 2.4 | EI24 | TP53I8; | CACTAAACCT | P |
| | | | | | | mRNA (EI24), | | PIG8 | GAACTTTTCA | |
| | | | | | | transcript variant 2, | | | ACTCCGTTGG | |
| | | | | | | mRNA. | | | TGGTGGGAG | |
| | | | | | | | | | GCAGCGGGC | |
| | | | | | | | | | AG | |
| 1639 | — | — | 7160270 | NM_004450.1 | NM_004450 | enhancer of | ERH | FLJ27340; | GGTTGGGGT | N |
| | | | | | | rudimentary homolog | | DROER | GGGCTTGGA | |
| | | | | | | (Drosophila) (ERH), | | | ACACAGGTGT | |
| | | | | | | mRNA. | | | GTACAGCGT | |
| | | | | | | | | | GCTGTAGTG | |
| | | | | | | | | | GAAG | |
| 1640 | — | — | 730497 | NM_032449.1 | NM_032449 | coiled-coil and C2 | CC2D1B | RP11- | GGAGATTAGT | P |
| | | | | | | domain containing 1B | | 155O18.2; | GACTCACCTG | |
| | | | | | | (CC2D1B), mRNA. | | KIAA1836 | CAGTTGGGA | |
| | | | | | | | | | GCCAGCTAC | |
| | | | | | | | | | AACCCAAATC | |
| | | | | | | | | | AT | |
| 1641 | — | — | 4220220 | NM_001009922.1 | NM_001009922 | ring finger and CHY | RCHY1 | ARNIP; | CTTCCAAGG | N |
| | | | | | | zinc finger domain | | PRO1996; | GCTAGGATTA | |
| | | | | | | containing 1 (RCHY1), | | CHIMP; | CAGGCATGA | |
| | | | | | | transcript variant 3, | | DKFZp586C1620; | GCCACTGTG | |
| | | | | | | mRNA. | | ZNF363; | CTTGGTCCAG | |
| | | | | | | | | hARNIP; | ATG | |
| | | | | | | | | PIRH2; | | |
| | | | | | | | | RNF199 | | |
| 1642 | — | — | 1990653 | NM_006405.5 | NM_006405 | transmembrane 9 | TM9SF1 | HMP70; | GGGCCATTAA | P |
| | | | | | | superfamily member 1 | | MP70 | CTCAGCAGC | |
| | | | | | | (TM9SF1), transcript | | | CATCTTGTTG | |
| | | | | | | variant 1, mRNA. | | | TATGCCCTGA | |
| | | | | | | | | | CCTGCTGCATC | |
| 1643 | — | — | 5490717 | NM_198585.2 | NM_198585 | ectonucleoside | ENTPD8 | GLSR2492; | AGGGCCACA | N |
| | | | | | | triphosphate | | UNQ2492; | TGCTGCCTG | |
| | | | | | | diphosphohydrolase 8 | | NTPDase-8 | CAAACAGGG | |
| | | | | | | (ENTPD8), transcript | | | CAAGACCAC | |
| | | | | | | variant 2, mRNA. | | | GGAGGCACA | |
| | | | | | | | | | GGGGT | |
| 1644 | — | — | 1010739 | NM_033364.3 | NM_033364 | chromosome 3 open | C3ORF15 | AAT1alpha; | CTGAAGGGC | P |
| | | | | | | reading frame 15 | | AAT1; | CAGATGGTAA | |
| | | | | | | (C3orf15), mRNA. | | DKFZp781A2221 | CTACATTAGG | |
| | | | | | | | | | GTTTGCGGG | |
| | | | | | | | | | TCTGATGGTC | |
| | | | | | | | | | GC | |
| 1645 | — | — | 1340681 | NM_015633.1 | NM_015633 | FGFR1 oncogene | FGFR1OP2 | DKFZp564O1863; | AGCTGAAAGT | N |
| | | | | | | partner 2 | | HSPC123- | GGGGGTAAA | |
| | | | | | | (FGFR1OP2), mRNA. | | like | GGTGGAGTA | |
| | | | | | | | | | ATCTGTGGAT | |
| | | | | | | | | | TTGTTTCTGT | |
| | | | | | | | | | TG | |
| 1646 | — | — | 2680497 | NM_014865.2 | NM_014865 | non-SMCcondensin I | NCAPD2 | hCAP-D2; | GATCCTAGGA | P |
| | | | | | | complex, subunit D2 | | KIAA0159; | AGTCTGTTCC | |
| | | | | | | (NCAPD2), mRNA. | | CAP-D2; | TGTCCTCCCT | |
| | | | | | | | | CNAP1 | GTGCAGGGT | |
| | | | | | | | | | ATCCTGTAGGG | |
| 1647 | — | — | 830440 | NM_003268.4 | NM_003268 | toll-like receptor 5 | TLR5 | MGC126430; | TGCCCAGGG | N |
| | | | | | | (TLR5), mRNA. | | SLEB1; | CAGGTGCTTA | |
| | | | | | | | | MGC126431; | TCTGACCTTA | |
| | | | | | | | | FLJ10052; | ACAGTGCTCT | |
| | | | | | | | | TIL3 | CATCATGGTGG | |
| 1648 | 32 | 272 | 2810082 | NM_016470.6 | NM_016470 | chromosome 20 open | C20ORF111 | dJ1183I21.1; | GAGTCTTCGT | P |
| | | | | | | reading frame 111 | | HSPC207; | GGATGATGT | |
| | | | | | | (C20orf111), mRNA. | | Perit1 | GACCATTGAG | |
| | | | | | | | | | GACCTGTCA | |
| | | | | | | | | | GGCTACATG | |
| | | | | | | | | | GAG | |
| 1649 | — | — | 3800253 | NM_172388.1 | NM_172388 | nuclear factor of | NFATC1 | NFATc; | GAAAGGAGA | N |
| | | | | | | activated T-cells, | | MGC138448; | GACGGACAT | |
| | | | | | | cytoplasmic, | | NFAT2; | CGGGAGGAA | |
| | | | | | | calcineurin-dependent | | NF-ATC | GAACACACG | |
| | | | | | | 1 (NFATC1), transcript | | | GGTACGGCT | |
| | | | | | | variant 4, mRNA. | | | GGTGT | |
| 1650 | — | — | 2000669 | NM_024605.3 | NM_024605 | Rho GTPase activating | ARHGAP10 | FLJ20896; | GCTGTTGGT | P |
| | | | | | | protein 10 | | PS-GAP; | GCAAGGGAG | |
| | | | | | | (ARHGAP10), mRNA. | | GRAF2; | ATGGTCTCAA | |
| | | | | | | | | FLJ41791 | GTCAGAGGG | |
| | | | | | | | | | AAGCAGAGA | |
| | | | | | | | | | CGCG | |
| 1651 | — | — | 6290181 | NM_058192.2 | NM_058192 | RNA pseudouridylate | RPUSD1 | MGC19600; | TGGCTCCCA | N |
| | | | | | | synthase domain | | RLUCL; | CACAGCCAT | |
| | | | | | | containing 1 | | C16orf40 | GCATTGTCAC | |
| | | | | | | (RPUSD1), mRNA. | | | TCTGCCTCCG | |
| | | | | | | | | | GGACCCCAG | |
| | | | | | | | | | CTT | |
| 1652 | 33 | 1084 | 5690333 | NM_003400.3 | NM_003400 | exportin 1 (CRM1 | XPO1 | DKFZp686B1823; | GTGCTGCATT | P |
| | | | | | | homolog, yeast) | | CRM1 | GTCTGAAGTT | |
| | | | | | | (XPO1), mRNA. | | | AGCACCTCTT | |
| | | | | | | | | | GGACTGAATC | |
| | | | | | | | | | GTTTGTCTAG | |
| 1653 | — | — | 7050291 | NM_024756.1 | NM_024756 | multimerin 2 (MMRN2), | MMRN2 | EndoGlyx- | CCCACATCAA | N |
| | | | | | | mRNA. | | 1; | GGGAGAGAT | |
| | | | | | | | | FLJ13465; | CAGGTGGAG | |
| | | | | | | | | EMILIN3; | GTAATTGGAT | |
| | | | | | | | | ENDOGLYX1 | CTTGGGGGC | |
| | | | | | | | | | GGT | |
| 1654 | — | — | 3370280 | NM_016447.2 | NM_016447 | membrane protein, | MPP6 | p55T; VAM- | CTGTGGTGG | P |
| | | | | | | palmitoylated 6 | | 1; VAM1; | ATGCAGGAAT | |
| | | | | | | (MAGUK p55 | | PALS2 | CACTACCAAG | |
| | | | | | | subfamily member 6) | | | CTTCTGACCG | |
| | | | | | | (MPP6), mRNA. | | | ACTCTGACTTG | |
| 1655 | — | — | 1050040 | NM_004925.3 | NM_004925 | aquaporin 3 (Gill blood | AQP3 | GIL | GCTTCTACAG | N |
| | | | | | | group) (AQP3), mRNA. | | | GCTTTTGGGA | |
| | | | | | | | | | AGTAGGGTG | |
| | | | | | | | | | GATGTGGGT | |
| | | | | | | | | | AGGGCTGGG | |
| | | | | | | | | | AGG | |
| 1656 | — | — | 6580379 | NM_006348.2 | NM_006348 | component of | COG5 | GOLTC1; | GTTGAGGAA | P |
| | | | | | | oligomericgolgi | | GTC90 | CCACTGGCA | |
| | | | | | | complex 5 (COG5), | | | CATCCCAAGC | |
| | | | | | | transcript variant 1, | | | TAAGATACAA | |
| | | | | | | mRNA. | | | GGTTAAATGG | |
| | | | | | | | | | CC | |
| 1657 | — | — | 730487 | NM_020320.2 | NM_020320 | arginyl- | RARS2 | dJ382I10.6; | AGAGTCGCG | N |
| | | | | | | tRNAsynthetase 2, | | DALRD2; | GGGACACAG | |
| | | | | | | mitochondrial | | MGC14993; | GAGTCTTCCT | |
| | | | | | | (RARS2), nuclear gene | | PCH6; | ACAGTACACA | |
| | | | | | | encoding mitochondrial | | PRO1992; | CACGCCCGC | |
| | | | | | | protein, mRNA. | | RARSL; | CTC | |
| | | | | | | | | MGC23778 | | |
| 1658 | — | — | 2140682 | NM_175617.2 | NM_175617 | metallothionein 1E | MT1E | MT1; MTD | CGTGGGACA | P |
| | | | | | | (functional) (MT1E), | | | CAAACCCCAA | |
| | | | | | | mRNA. | | | CTGTACCCCC | |
| | | | | | | | | | TATGGTTTCA | |
| | | | | | | | | | GAACAGAGC | |
| | | | | | | | | | TG | |
| 1659 | — | — | 2650148 | NM_018268.2 | NM_018268 | WD repeat domain 41 | WDR41 | MSTP048; | GCTGAGCGC | N |
| | | | | | | (WDR41), mRNA. | | FLJ10904 | AACTGCCCCA | |
| | | | | | | | | | TCTGACCACT | |
| | | | | | | | | | GACTCAAATA | |
| | | | | | | | | | CGAACTGCTTG | |
| 1660 | 34 | 1316 | 7000735 | NM_002882.2 | NM_002882 | RAN binding protein 1 | RANBP1 | MGC88701 | CTGTTCCGAT | P |
| | | | | | | (RANBP1), mRNA. | | | TTGCCTCTGA | |
| | | | | | | | | | GAACGATCTC | |
| | | | | | | | | | CCAGAATGG | |
| | | | | | | | | | AAGGAGCGA | |
| | | | | | | | | | GG | |
| 1661 | — | — | 3130471 | NM_198465.2 | NM_198465 | Nik related kinase | NRK | DKFZp686A17109; | CAGAAGTGT | N |
| | | | | | | (NRK), mRNA. | | FLJ16788; | GGAGGGGGG | |
| | | | | | | | | NESK; | CTCCTGACTA | |
| | | | | | | | | MGC131849 | GACAATTTCC | |
| | | | | | | | | | CTAGCCCTTG | |
| | | | | | | | | | TG | |
| 1662 | — | — | 4810274 | NM_199367.1 | NM_199367 | spastic paraplegia 7 | SPG7 | CAR; | TCCCTTCAAC | P |
| | | | | | | (pure and complicated | | FLJ37308; | GTAGTCATCC | |
| | | | | | | autosomal recessive) | | SPG5C; | CCTGGTGGT | |
| | | | | | | (SPG7), nuclear gene | | MGC126332; | GGAAGCAAG | |
| | | | | | | encoding mitochondrial | | CMAR; | ACGACGGCC | |
| | | | | | | protein, transcript | | MGC126331; | CCT | |
| | | | | | | variant 2, mRNA. | | PGN | | |
| 1663 | 35 | 1369 | 7510687 | NM_006662.2 | NM_006662 | Snf2-related CREBBP | SRCAP | EAF1; | CTAGTCCCCC | N |
| | | | | | | activator protein | | SWR1; | CACTAGAGAC | |
| | | | | | | (SRCAP), mRNA. | | DOMO1; | TGAGAAGTTG | |
| | | | | | | | | KIAA0309; | CCTCGCAAAC | |
| | | | | | | | | FLJ44499 | GAGCAGGGGC | |
| 1664 | 36 | 1085 | 5690358 | NM_014254.1 | NM_014254 | transmembrane protein | TMEM5 | HP10481 | GAGGCTTGC | P |
| | | | | | | 5 (TMEM5), mRNA. | | | TCCTATGGCT | |
| | | | | | | | | | CCATTCCTGT | |
| | | | | | | | | | GGTGGAAGA | |
| | | | | | | | | | CGTGATGACA | |
| | | | | | | | | | GC | |
| 1665 | — | — | 5670100 | NM_000355.2 | NM_000355 | transcobalamin II; | TCN2 | D22S750; | CTGCAGGTCT | N |
| | | | | | | macrocytic anemia | | TC2; | CCCATGAAG | |
| | | | | | | (TCN2), mRNA. | | D22S676 | GCCACCCCA | |
| | | | | | | | | | TGGTCTGATG | |
| | | | | | | | | | GGCATGAAG | |
| | | | | | | | | | CAT | |
| 1666 | 37 | 1187 | 6270020 | NM_145799.2 | NM_145799 | septin 6 (SEPT6), | SEPT6 | SEP2; | GATGGAGTT | P |
| | | | | | | transcript variant I, | | RP5- | GACCTGGCA | |
| | | | | | | mRNA. | | 876A24.2; | ATGATCTGTG | |
| | | | | | | | | MGC16619; | GCTAACATGC | |
| | | | | | | | | SEPT2; | CGTCTCTCTG | |
| | | | | | | | | MGC20339; | CC | |
| | | | | | | | | KIAA0128 | | |
| 1667 | — | — | 7320441 | NM_013332.3 | NM_013332 | hypoxia-inducible | HIG2 | FLJ21076; | GTCGTTCCTC | N |
| | | | | | | protein 2 (HIG2), | | MGC138388 | CAACATAGTG | |
| | | | | | | transcript variant 1, | | | TGTATTGGTC | |
| | | | | | | mRNA. | | | TGAAGGGGG | |
| | | | | | | | | | TGGTGGGAT | |
| | | | | | | | | | GC | |
| 1668 | 38 | 59 | 1170332 | NM_014911.3 | NM_014911 | AP2 associated kinase | AAK1 | DKFZp686K16132; | GAGCACCTT | P |
| | | | | | | 1 (AAK1), mRNA. | | MGC164568; | GTTACAGTTC | |
| | | | | | | | | FLJ45252; | CGGCCTCTC | |
| | | | | | | | | FLJ23712; | AGTATGTGG | |
| | | | | | | | | FLJ25931; | GCTAAATGCC | |
| | | | | | | | | KIAA1048; | AGC | |
| | | | | | | | | FLJ42882; | | |
| | | | | | | | | DKFZp686F03202; | | |
| | | | | | | | | MGC164570; | | |
| | | | | | | | | FLJ31060; | | |
| | | | | | | | | MGC138170 | | |
| 1669 | — | — | 2060674 | NM_000067.1 | NM_000067 | carbonic anhydrase II | CA2 | Car2; CA-II; | AGTACCTTGA | N |
| | | | | | | (CA2), mRNA. | | CAII; CA II | CTTTGTTCAC | |
| | | | | | | | | | AGCATGTAG | |
| | | | | | | | | | GGTGATGAG | |
| | | | | | | | | | CACTCACAAT | |
| | | | | | | | | | TG | |
| 1670 | — | — | 6350671 | NM_023080.1 | NM_023080 | chromosome 8 open | C8ORF33 | FLJ20989 | GGCTTGGTCT | P |
| | | | | | | reading frame 33 | | | AGCAGTAACA | |
| | | | | | | (C8orf33), mRNA. | | | CCAGTGTCTG | |
| | | | | | | | | | GGAAGATGC | |
| | | | | | | | | | CTGTTGCAAAG | |
| 1671 | — | — | 770619 | NM_003473.2 | NM_003473 | signal transducing | STAM | DKFZp686J2352; | TCTGTAGCCT | N |
| | | | | | | adaptor molecule (SH3 | | STAM1 | CTGCATACTA | |
| | | | | | | domain and ITAM | | | CTGGCTGTCA | |
| | | | | | | motif) 1 (STAM), | | | TCACACCAGC | |
| | | | | | | mRNA. | | | GTACAGTAGC | |
| 1672 | — | — | 540452 | NM_022743.1 | NM_022743 | SET and MYND | SMYD3 | bA74P14.1; | GAAGAATGC | P |
| | | | | | | domain containing 3 | | ZMYND1; | GACGCCAAC | |
| | | | | | | (SMYD3), mRNA. | | ZNFN3A1; | ATCAGAGCAT | |
| | | | | | | | | FLJ21080; | CCTAAGGGA | |
| | | | | | | | | MGC104324 | ACGCAGTCA | |
| | | | | | | | | | GAGG | |
| 1673 | — | — | 4200441 | NM_003003.2 | NM_003003 | SEC14-like 1 (S. cerevisiae) | SEC14L1 | SEC14L; | CGCCCACCC | N |
| | | | | | | (SEC14L1), | | DKFZp686C06176; | AGCGGCGAC | |
| | | | | | | transcript variant 1, | | PRELID4A | ATTGTACAGA | |
| | | | | | | mRNA. | | | CTCCTCTCAC | |
| | | | | | | | | | CTCTAGATAG | |
| | | | | | | | | | CA | |
| 1674 | — | — | 6550279 | NM_000848.2 | NM_000848 | glutathione S- | GSTM2 | GST4; | ATGTCCTTGA | P |
| | | | | | | transferase M2 | | GSTM; | GAGAAACCAA | |
| | | | | | | (muscle) (GSTM2), | | GSTM2-2; | GTATTTGAGC | |
| | | | | | | mRNA. | | GTHMUS; | CCAGCTGCC | |
| | | | | | | | | MGC117303 | TGGATGCCTTC | |
| 1675 | — | — | 4860392 | NM_178128.3 | NM_178128 | fatty acid desaturase | FADS6 | FP18279 | GTGTGTTTTG | N |
| | | | | | | domain family, | | | TCGGGAGGG | |
| | | | | | | member 6 (FADS6), | | | AACTCCAGG | |
| | | | | | | mRNA. | | | GGAAGTGAG | |
| | | | | | | | | | GGGAGAAGG | |
| | | | | | | | | | TTCC | |
| 1676 | — | — | 3940735 | NM_003093.1 | NM_003093 | small nuclear | SNRPC | FLJ20302 | CGGCTGCATT | P |
| | | | | | | ribonucleoprotein | | | TCAACAAGGA | |
| | | | | | | polypeptide C | | | AAGATACCTC | |
| | | | | | | (SNRPC), mRNA. | | | CTACTCCATT | |
| | | | | | | | | | CTCTGCTCCT | |
| 1677 | — | — | 1850347 | NM_021067.3 | NM_021067 | GINS complex subunit | GINS1 | PSF1; | CCAGTATCAC | N |
| | | | | | | 1 (Psf1 homolog) | | KIAA0186; | CACTTTGGAA | |
| | | | | | | (GINS1), mRNA. | | RP4- | GGGGACAGT | |
| | | | | | | | | 691N24.2 | GAAATTGGG | |
| | | | | | | | | | GCTAGAGAA | |
| | | | | | | | | | GGA | |
| 1678 | 39 | 736 | 2750184 | NM_005184.2 | NM_005184 | calmodulin 3 | CALM3 | PHKD; | CAGCCAAGA | P |
| | | | | | | (phosphorylase kinase, | | PHKD3 | GCTGAGGGT | |
| | | | | | | delta) (CALM3), | | | AAGGGCAGG | |
| | | | | | | mRNA. | | | TAGGCGTGA | |
| | | | | | | | | | GGCTGTGGA | |
| | | | | | | | | | CATTT | |
| 1679 | — | — | 7000703 | NM_016310.2 | NM_016310 | polymerase (RNA) III | POLR3K | C11; | CCTTTTGAGG | N |
| | | | | | | (DNA directed) | | RPC10; | TGAAGAGCC | |
| | | | | | | polypeptide K, 12.3 kDa | | C11-RNP3; | AGGGGGTCA | |
| | | | | | | (POLR3K), | | My010; | GGAAATATGG | |
| | | | | | | mRNA. | | RPC11; | CCTATCTGCC | |
| | | | | | | | | hRPC11 | AG | |
| 1680 | — | — | 2690315 | NM_014901.4 | NM_014901 | ring finger protein 44 | RNF44 | KIAA1100 | CCCAGCCCT | P |
| | | | | | | (RNF44), mRNA. | | | GGCTGGGCC | |
| | | | | | | | | | CAGCGCCTG | |
| | | | | | | | | | TGTTCTGTGT | |
| | | | | | | | | | TAGAAAGGTT | |
| | | | | | | | | | TTA | |
| 1681 | — | — | 4900670 | NM_004255.2 | NM_004255 | cytochrome c oxidase | COX5A | COX-VA; | AACTGGGCC | N |
| | | | | | | subunit Va (COX5A), | | COX | TTGACAAAGT | |
| | | | | | | nuclear gene encoding | | VA; | GTAAACCGCA | |
| | | | | | | mitochondrial protein, | | | TGGATGGGC | |
| | | | | | | mRNA. | | | TTCCCCAAGG | |
| | | | | | | | | | AT | |
| 1682 | — | — | 6900014 | NM_032177.2 | NM_032177 | RNA U, small nuclear | RNUXA | FLJ13193; | GGCAATTTTA | P |
| | | | | | | RNA export adaptor | | PHAX | AGGATAAAAA | |
| | | | | | | (phosphorylation | | | CTAACATTGG | |
| | | | | | | regulated) (RNUXA), | | | CCAGGCACG | |
| | | | | | | mRNA. | | | GTGGCTCAC | |
| | | | | | | | | | GC | |
| 1683 | 40 | 1078 | 5570601 | NM_020216.3 | NM_020216 | arginylaminopeptidase | RNPEP | DKFZP547H084 | CACTGCAGG | N |
| | | | | | | (aminopeptidase B) | | | GCAGCGGGT | |
| | | | | | | (RNPEP), mRNA. | | | ATTCTCCTCC | |
| | | | | | | | | | CCACCTAAGT | |
| | | | | | | | | | CTCTGGGAA | |
| | | | | | | | | | GAA | |
| 1684 | — | — | 5570338 | NM_182922.2 | NM_182922 | HEAT repeat | HEATR3 | FLJ20718 | TCTGTACATT | P |
| | | | | | | containing 3 | | | CTGTAAAAAC | |
| | | | | | | (HEATR3), mRNA. | | | TTCAAAACCT | |
| | | | | | | | | | GGCCAGGCA | |
| | | | | | | | | | TGGTGGCTC | |
| | | | | | | | | | AC | |
| 1685 | — | — | 4540241 | NM_032412.3 | NM_032412 | chromosome 5 open | C5ORF32 | ORF1-FL49 | GCCACCTCT | N |
| | | | | | | reading frame 32 | | | GACAGGTGT | |
| | | | | | | (C5orf32), mRNA. | | | GCCTGCCCC | |
| | | | | | | | | | CATCTCTTCT | |
| | | | | | | | | | GATTGCTGTT | |
| | | | | | | | | | AAC | |
| 1686 | — | — | 2850360 | NM_001707.2 | NM_001707 | B-cell CLL/lymphoma | BCL7B | | TCTGGACGG | P |
| | | | | | | 7B (BCL7B), mRNA. | | | AGCTGCTGG | |
| | | | | | | | | | CAGCTTCTGC | |
| | | | | | | | | | GAGAAGAGA | |
| | | | | | | | | | GAGATGTGG | |
| | | | | | | | | | AAGG | |
| 1687 | — | — | 6860653 | NM_006402.2 | NM_006402 | hepatitis B virus x | HBXIP | MGC71071; | ATGATCCAGA | N |
| | | | | | | interacting protein | | XIP | AACACGATG | |
| | | | | | | (HBXIP), mRNA. | | | GCATCACGG | |
| | | | | | | | | | TGGCAGTGC | |
| | | | | | | | | | ACAAAATGGC | |
| | | | | | | | | | CTC | |
| 1688 | — | — | 2350209 | NM_139118.1 | NM_139118 | YY1 associated protein | YY1AP1 | YAP; | TGCAACTGG | P |
| | | | | | | 1 (YY1AP1), transcript | | YY1AP; | GGCTCTTGA | |
| | | | | | | variant 2, mRNA. | | HCCA2; | GCAGCTTGCT | |
| | | | | | | | | FLJ10875; | TTAGCCTGCT | |
| | | | | | | | | FLJ13914; | CCCACTCTGT | |
| | | | | | | | | HCCA1 | GG | |
| 1689 | — | — | 3940754 | NM_006566.1 | NM_006566 | CD226 molecule | CD226 | TLiSA1; | CTTGCCGCC | N |
| | | | | | | (CD226), mRNA. | | PTA1; | ATCCCAGGTC | |
| | | | | | | | | DNAM1; | TAGCCTTAGG | |
| | | | | | | | | DNAM-1 | AGCAAATGTA | |
| | | | | | | | | | GTAGATAGTCG | |
| 1690 | — | — | 6650747 | NM_152320.1 | NM_152320 | zinc finger protein 641 | ZNF641 | FLJ31295; | AGCCAGGGG | P |
| | | | | | | (ZNF641), mRNA. | | DKFZp667D1012 | GGCCAGACC | |
| | | | | | | | | | TTGTTCATGT | |
| | | | | | | | | | GTGGGTCTG | |
| | | | | | | | | | TCTTCCTTAT | |
| | | | | | | | | | GCC | |
| 1691 | — | — | 3780400 | NM_014212.3 | NM_014212 | homeobox C11 | HOXC11 | HOX3H; | TTGAAGATTG | N |
| | | | | | | (HOXC11), mRNA. | | MGC4906 | GGGTGGTGG | |
| | | | | | | | | | AGGCAGTAG | |
| | | | | | | | | | GGAGATGGG | |
| | | | | | | | | | ATTGGGCAC | |
| | | | | | | | | | CTCC | |
| 1692 | — | — | 6770017 | NM_007249.4 | NM_007249 | Kruppel-like factor 12 | KLF12 | AP-2rep; | CCATGGCAAA | P |
| | | | | | | (KLF12), mRNA. | | AP2REP; | GCACAAATG | |
| | | | | | | | | HSPC122 | GACCCCCGA | |
| | | | | | | | | | GGCCTATCTC | |
| | | | | | | | | | CCAGACAAA | |
| | | | | | | | | | GTA | |
| 1693 | — | — | 2340059 | NM_024516.2 | NM_024516 | chromosome 16 open | C16ORF53 | PA1; | ACCTCAAGCT | N |
| | | | | | | reading frame 53 | | MGC4606 | CCCAAACAG | |
| | | | | | | (C16orf53), mRNA. | | | CACGTTGCG | |
| | | | | | | | | | GGAAAGAGG | |
| | | | | | | | | | AAGAGAGAG | |
| | | | | | | | | | TGTG | |
| 1694 | — | — | 4150593 | NM_015077.2 | NM_015077 | sterile alpha and TIR | SARM1 | SAMD2; | AGCTGTGTGA | P |
| | | | | | | motif containing 1 | | KIAA0524; | CCGGGAGTA | |
| | | | | | | (SARM1), mRNA. | | SARM; | GTCACTTAAC | |
| | | | | | | | | FLJ36296 | CTATGTCTCC | |
| | | | | | | | | | CCTTCCTCACC | |
| 1695 | — | — | 2650408 | NM_018177.2 | NM_018177 | Nedd4 binding protein | N4BP2 | B3BP; | GAGGTATTTA | N |
| | | | | | | 2 (N4BP2), mRNA. | | KIAA1413; | AAGTGCTTTG | |
| | | | | | | | | FLJ10680 | AGACCTGATT | |
| | | | | | | | | | CATGCCCCC | |
| | | | | | | | | | CAAAGGGTG | |
| | | | | | | | | | GT | |
| 1696 | — | — | 10435 | NM_001001660.2 | NM_001001660 | LYR motif containing 5 | LYRM5 | | ATGTATGGAG | P |
| | | | | | | (LYRM5), mRNA. | | | TCATTACTTC | |
| | | | | | | | | | TGACCTTGAA | |
| | | | | | | | | | ATAGCCTGCT | |
| | | | | | | | | | GGTGACTGGC | |
| 1697 | — | — | 2690528 | NM_004169.3 | NM_004169 | serinehydroxymethyltransferase | SHMT1 | MGC15229; | CCAGGCTTTC | N |
| | | | | | | 1 (soluble) | | MGC24556; | CTGCTCCACC | |
| | | | | | | (SHMT1), transcript | | SHMT; | TGAGATAACC | |
| | | | | | | variant 1, mRNA. | | CSHMT | AACTCCCTCC | |
| | | | | | | | | | CGTAATCAGG | |
| 1698 | — | — | 130093 | NM_005951.2 | NM_005951 | metallothionein 1H | MT1H | MGC70702; | CTTCTCGCTT | P |
| | | | | | | (MT1H), mRNA. | | MT1 | GGGAACTCC | |
| | | | | | | | | | AGTCTCACCT | |
| | | | | | | | | | CGGCTTGCA | |
| | | | | | | | | | ATGGACCCC | |
| | | | | | | | | | AAC | |
| 1699 | — | — | 1010692 | NM_005234.3 | NM_005234 | nuclear receptor | NR2F6 | EAR-2; | CCCCTAGCAT | N |
| | | | | | | subfamily 2, group F, | | EAR2; | GAACTTGTGG | |
| | | | | | | member 6 (NR2F6), | | ERBAL2 | GATGGTGGG | |
| | | | | | | mRNA. | | | GTTGGCTTCC | |
| | | | | | | | | | CTGGCATGATG | |
| 1700 | 41 | 374 | 360280 | NM_017761.2 | NM_017761 | proline-rich nuclear | PNRC2 | MGC99541; | GTTTGGTCAA | P |
| | | | | | | receptor coactivator 2 | | FLJ20312 | GGGGTAGGT | |
| | | | | | | (PNRC2), mRNA. | | | GCAACCCAAT | |
| | | | | | | | | | GGACCACTTA | |
| | | | | | | | | | TGCAAAAGATG | |
| 1701 | 42 | 1281 | 6760347 | NM_178009.2 | NM_178009 | diacylglycerol kinase, | DGKH | DKFZp761I1510; | ATGGGGCAC | N |
| | | | | | | eta (DGKH), transcript | | DGKeta | AGAGGAAGTT | |
| | | | | | | variant 2, mRNA. | | | GCTGCTTGG | |
| | | | | | | | | | CTGGATCTGC | |
| | | | | | | | | | TCAATTTGGG | |
| | | | | | | | | | AG | |
| 1702 | — | — | 520431 | NM_014819.3 | NM_014819 | praja 2, RING-H2 motif | PJA2 | KIAA0438, | AGCCCAGGT | P |
| | | | | | | containing (PJA2), | | RNF131; | CTAAATGTAA | |
| | | | | | | mRNA. | | Neurodap1 | TGGTTGGTTT | |
| | | | | | | | | | ATTGTTCTAT | |
| | | | | | | | | | AACCCCAGC | |
| | | | | | | | | | CC | |
| 1703 | — | — | 5560079 | NM_001077191.1 | NM_001077191 | G protein-coupled bile | GPBAR1 | GPR131; | CTGGATCAGA | N |
| | | | | | | acid receptor 1 | | M-BAR; | GACCCTGCC | |
| | | | | | | (GPBAR1), transcript | | GPCR; | TCTGTTTGAC | |
| | | | | | | variant 1, mRNA. | | GPCR19; | CCCGCACTG | |
| | | | | | | | | BG37; | ACTGAATAAA | |
| | | | | | | | | TGR5; | GC | |
| | | | | | | | | MGC40597 | | |
| 1704 | — | — | 670026 | NM_015986.2 | NM_015986 | cytokine receptor-like | CRLF3 | CREME9; | GCACGTGTG | P |
| | | | | | | factor 3 (CRLF3), | | FRWS; | TATCCAATCT | |
| | | | | | | mRNA. | | CYTOR4; | GCCTGTGAC | |
| | | | | | | | | MGC20661 | ATGCATTTTA | |
| | | | | | | | | | CTCTTTGCAG | |
| | | | | | | | | | AG | |
| 1705 | 43 | 160 | 4230619 | NM_012198.2 | NM_012198 | grancalcin, EF-hand | GCA | GCL | GTTGGTGGT | N |
| | | | | | | calcium binding protein | | | GTTTGAGGGT | |
| | | | | | | (GCA), mRNA. | | | TGGCTAGAAA | |
| | | | | | | | | | TGAAAGCCTG | |
| | | | | | | | | | GATTTTGTGCC | |
| 1706 | 44 | 459 | 830463 | NM_002735.1 | NM_002735 | protein kinase, cAMP- | PRKAR1B | PRKAR1 | GGCCAAGGC | P |
| | | | | | | dependent, regulatory, | | | CATCTCCAAG | |
| | | | | | | type I, beta | | | AACGTGCTCT | |
| | | | | | | (PRKAR1B), mRNA. | | | TCGCTCACCT | |
| | | | | | | | | | GGATGACAA | |
| | | | | | | | | | CG | |
| 1707 | 45 | 353 | 130364 | NM_032947.3 | NM_032947 | MSTP150 (MST150), | MST150 | NID67; | CTGTAATTAG | N |
| | | | | | | mRNA. | | MGC126887; | CTCCACGTGT | |
| | | | | | | | | MGC126889; | ACCCCCTTCA | |
| | | | | | | | | MGC117221 | CTCCCTCCCA | |
| | | | | | | | | | CCAGCTCTGC | |
| 1708 | 46 | 52 | 1050408 | NM_005678.3 | NM_005678 | SNRPN upstream | SNURF | | AGTGGAGCG | P |
| | | | | | | reading frame | | | GCCGCCGGA | |
| | | | | | | (SNURF), transcript | | | GATGCCTGA | |
| | | | | | | variant 1, mRNA. | | | CGCATCTGTC | |
| | | | | | | | | | TGAGGAGCG | |
| | | | | | | | | | GTCA | |
| 1709 | — | — | 1770593 | NM_003956.3 | NM_003956 | cholesterol 25- | CH25H | C25H | CGGTGGGTG | N |
| | | | | | | hydroxylase (CH25H), | | | CCCCTAAGAC | |
| | | | | | | mRNA. | | | TCGGGACTG | |
| | | | | | | | | | CTGTGCCTTT | |
| | | | | | | | | | CACACTTGAA | |
| | | | | | | | | | TG | |
| 1710 | 47 | 58 | 1170300 | NM_005950.1 | NM_005950 | metallothionein 1G | MT1G | MT1; | CGCCTGATGT | P |
| | | | | | | (MT1G), mRNA. | | MT1K; | CGGGACAGC | |
| | | | | | | | | MGC12386 | CCTGCTCCCA | |
| | | | | | | | | | AGTACAAATA | |
| | | | | | | | | | GAGTGACCC | |
| | | | | | | | | | GT | |
| 1711 | 48 | 23 | 20056 | NM_003295.1 | NM_003295 | tumor protein, | TPT1 | TCTP; p02; | CCAGATGGC | N |
| | | | | | | translationally- | | HRF; | ATGGTTGCTC | |
| | | | | | | controlled 1 (TPT1), | | FLJ27337 | TATTGGACTA | |
| | | | | | | mRNA. | | | CCGTGAGGA | |
| | | | | | | | | | TGGTGTGAC | |
| | | | | | | | | | CCC | |
| 1712 | — | — | 1260438 | NM_001556.1 | NM_001556 | inhibitor of kappa light | IKBKB | IKK-beta; | GTGCTGGGC | P |
| | | | | | | polypeptide gene | | NFKBIKB; | CGGGGAGTC | |
| | | | | | | enhancer in B-cells, | | IKK2; | CCTGTCTCTC | |
| | | | | | | kinase beta (IKBKB), | | FLJ40509; | ACAGCATCTA | |
| | | | | | | mRNA. | | IKKB; | GCAGTATTAT | |
| | | | | | | | | MGC131801 | TA | |
| 1713 | — | — | 4050768 | NM_152889.1 | NM_152889 | carbohydrate | CHST13 | MGC119279; | CAGAGCCCC | N |
| | | | | | | (chondroitin 4) | | MGC119281; | TGGTGCAATG | |
| | | | | | | sulfotransferase 13 | | MGC119278; | CGGTCACAG | |
| | | | | | | (CHST13), mRNA. | | C4ST3 | GTTTTATGGG | |
| | | | | | | | | | ACTTTGGTGA | |
| | | | | | | | | | GC | |
| 1714 | — | — | 1340349 | NM_001042588.1 | NM_001042588 | snurportin 1 (SNUPN), | SNUPN | RNUT1; | CCCAAGTTGA | P |
| | | | | | | transcript variant 3, | | Snurportin1; | AGGGTTCTTC | |
| | | | | | | mRNA. | | KPNBL | CCATAGCCCA | |
| | | | | | | | | | GACCACCCT | |
| | | | | | | | | | GGATGCCTC | |
| | | | | | | | | | AT | |
| 1715 | — | — | 6940431 | NM_015253.1 | NM_015253 | WSC domain | WSCD1 | KIAA0523 | CCTGGACTAA | N |
| | | | | | | containing 1 (WSCD1), | | | GCCAATGACA | |
| | | | | | | mRNA. | | | CCTTCCATCT | |
| | | | | | | | | | TTCCAGCTAT | |
| | | | | | | | | | GGTGACTGGG | |
| 1716 | — | — | 3610241 | NM_000981.3 | NM_000981 | ribosomal protein L19 | RPL19 | MGC71997; | ATGGGCATA | HSK |
| | | | | | | (RPL19), mRNA. | | DKFZp779D216; | GGTAAGCGG | |
| | | | | | | | | FLJ27452 | AAGGGTACA | |
| | | | | | | | | | GCCAATGCC | |
| | | | | | | | | | CGAATGCCA | |
| | | | | | | | | | GAGAA | |
| 1717 | — | — | 6580577 | NM_031369.2 | NM_031369 | heterogeneous nuclear | HNRNPD | P37; AUF1; | CCCCCAGTAT | HSK |
| | | | | | | ribonucleoprotein D | | hnRNPD0; | TGTAGAGCAA | |
| | | | | | | (AU-rich element RNA | | AUF1A | GTCTTGTGTT | |
| | | | | | | binding protein 1, | | | AAAAGCCCA | |
| | | | | | | 37 kDa) (HNRNPD), | | | GTGTGACAGTG | |
| | | | | | | transcript variant 2, | | | | |
| | | | | | | mRNA. | | | | |
| 1718 | — | — | 3360228 | NM_001023.2 | NM_001023 | ribosomal protein S20 | RPS20 | MGC102930; | CGCGCGCAA | HSK |
| | | | | | | (RPS20), mRNA. | | FLJ27451 | CAGCCATGG | |
| | | | | | | | | | CTTTTAAGGA | |
| | | | | | | | | | TACCGGAAAA | |
| | | | | | | | | | ACACCCGTG | |
| | | | | | | | | | GAG | |
| 1719 | — | — | 6130390 | NM_016093.2 | NM_016093 | ribosomal protein L26- | RPL26L1 | RPL26P1; | TCATCTACAT | HSK |
| | | | | | | like 1 (RPL26L1), | | FLJ46904 | CGAGCGGGT | |
| | | | | | | mRNA. | | | GCAGCGTGA | |
| | | | | | | | | | GAAGGCCAA | |
| | | | | | | | | | CGGCACAAC | |
| | | | | | | | | | TGTC | |
| 1720 | 49 | 850 | 3800309 | NM_022170.1 | NM_022170 | eukaryotic translation | EIF4H | KIAA0038; | GCACCCAGC | HSK |
| | | | | | | initiation factor 4H | | WSCR1; | GGAATGTGCT | |
| | | | | | | (EIF4H), transcript | | WBSCR1 | TAGTATTTGG | |
| | | | | | | variant 1, mRNA. | | | TCACCAGCC | |
| | | | | | | | | | GTCATCCTGG | |
| | | | | | | | | | GC | |
| 1721 | — | — | 1110017 | NM_032195.1 | NM_032195 | SON DNA binding | SON | FLJ21099; | GTGTTTAACC | HSK |
| | | | | | | protein (SON), | | SON3; | TAATGCTCAG | |
| | | | | | | transcript variant b, | | KIAA1019; | CCTTGGTACT | |
| | | | | | | mRNA. | | BASS1; | CCATTCCCTT | |
| | | | | | | | | NREBP; | CTCCTTCCCC | |
| | | | | | | | | C21orf50; | | |
| | | | | | | | | DBP-5; | | |
| | | | | | | | | FLJ33914 | | |
| 1722 | — | — | 2680097 | NM_016061.1 | NM_016061 | yippee-like 5 | YPEL5 | CGI-127 | GTGACTTCTG | HSK |
| | | | | | | (Drosophila) (YPEL5), | | | AGTACAGTTA | |
| | | | | | | mRNA. | | | AGTTCCTCCT | |
| | | | | | | | | | ATTTGCCACT | |
| | | | | | | | | | GGGCTGTTGG | |
| 1723 | — | — | 2480364 | NM_013379.2 | NM_013379 | dipeptidyl-peptidase 7 | DPP7 | DPP2; | TCACTCAAGC | HSK |
| | | | | | | (DPP7), mRNA. | | DPPII; QPP | AGCTGGCGG | |
| | | | | | | | | | CAGAGGGAA | |
| | | | | | | | | | GGGGCTGAA | |
| | | | | | | | | | TAAACGCCTG | |
| | | | | | | | | | GAG | |
| 1724 | — | — | 6330044 | NM_004034.1 | NM_004034 | annexin A7 (ANXA7), | ANXA7 | ANX7; SNX | ACTGAAAGCT | HSK |
| | | | | | | transcript variant 2, | | | CTGCCTTCCG | |
| | | | | | | mRNA. | | | GAATCCCTCT | |
| | | | | | | | | | AAGTCTGCTT | |
| | | | | | | | | | GATAGAGTGG | |
| 1725 | — | — | 240725 | NM_001033112.1 | NM_001033112 | poly(A) binding protein | PAIP2 | PAIP2A; | CTGAGGCTA | HSK |
| | | | | | | interacting protein 2 | | MGC72018 | CAAGTTAGTC | |
| | | | | | | (PAIP2), transcript | | | AGCAGATGA | |
| | | | | | | variant 1, mRNA. | | | GTGCCAGTC | |
| | | | | | | | | | CAGCCTTTTC | |
| | | | | | | | | | TGG | |
| 1726 | — | — | 3390192 | NM_006861.4 | NM_006861 | RAB35, member RAS | RAB35 | RAB1C; H- | GTGGGGACT | HSK |
| | | | | | | oncogene family | | ray; RAY | CAGGGCTGG | |
| | | | | | | (RAB35), mRNA. | | | ACCGACGTC | |
| | | | | | | | | | CTAGTGGAC | |
| | | | | | | | | | CTGATGTGAA | |
| | | | | | | | | | ATTC | |
| 1727 | — | — | 4150670 | NM_007065.3 | NM_007065 | cell division cycle 37 | CDC37 | P50CDC37 | CCGGCTCTC | HSK |
| | | | | | | homolog (S. cerevisiae) | | | GTCACTGGG | |
| | | | | | | (CDC37), | | | CTCTGTTTTC | |
| | | | | | | mRNA. | | | ACTGTTCGTC | |
| | | | | | | | | | TGCTGTCTGT | |
| | | | | | | | | | GT | |
| 1728 | — | — | 7200037 | NM_005626.3 | NM_005626 | splicing factor, | SFRS4 | SRP75 | TGGCCTTTCC | HSK |
| | | | | | | arginine/serine-rich 4 | | | TACAGGGAG | |
| | | | | | | (SFRS4), mRNA. | | | CTCAGTAACC | |
| | | | | | | | | | TGGACGGCT | |
| | | | | | | | | | CTAAGGCTG | |
| | | | | | | | | | GAA | |
| 1729 | — | — | 5690202 | NM_018064.2 | NM_018064 | chromosome 6 open | C6ORF166 | FLJ10342; | CAAGCTTTCG | HSK |
| | | | | | | reading frame 166 | | dJ486L4.2 | TCAGTGGCAA | |
| | | | | | | (C6orf166), mRNA. | | | CCACTCTTAG | |
| | | | | | | | | | GCAGCAGCA | |
| | | | | | | | | | ACTGGTTTTGG | |
| 1730 | — | — | 3830538 | NM_030818.2 | NM_030818 | coiled-coil domain | CCDC130 | MGC10471 | GGTCCTGGT | HSK |
| | | | | | | containing 130 | | | GAGGGTGTTT | |
| | | | | | | (CCDC130), mRNA. | | | GTGCCTTGTG | |
| | | | | | | | | | AGACTCCGTA | |
| | | | | | | | | | CATTAAAGACC | |
| 1731 | — | — | 2490066 | NM_006110.1 | NM_006110 | CD2 (cytoplasmic tail) | CD2BP2 | FWP010; | GCCCAGTTTG | HSK |
| | | | | | | binding protein 2 | | LIN1; | GTGGGCCCT | |
| | | | | | | (CD2BP2), mRNA. | | Snu40 | TCTTTCCTGG | |
| | | | | | | | | | ACTTTGTGGA | |
| | | | | | | | | | GGAGGCACC | |
| | | | | | | | | | AA | |
| 1732 | — | — | 4230050 | NM_006327.2 | NM_006327 | translocase of inner | TIMM23 | PRO1197; | TCCTCCCCCA | HSK |
| | | | | | | mitochondrial | | TIMM23B; | TGAACTAGAA | |
| | | | | | | membrane 23 homolog | | MGC22767; | AACCACTTAC | |
| | | | | | | (yeast) (TIMM23), | | TIM23 | TCCCAGAATT | |
| | | | | | | nuclear gene encoding | | | CAGGTCGTGC | |
| | | | | | | mitochondrial protein, | | | | |
| | | | | | | mRNA. | | | | |
| 1733 | — | — | 7200598 | NM_005466.2 | NM_005466 | mediator complex | MED6 | NY-REN-28 | CTTCTGTAAC | HSK |
| | | | | | | subunit 6 (MED6), | | | CTTTCCTCTC | |
| | | | | | | mRNA. | | | CCGGACTTG | |
| | | | | | | | | | AGCAACCTAC | |
| | | | | | | | | | ACACTCACATG | |
| 1734 | — | — | 6110477 | NM_006600.2 | NM_006600 | nuclear distribution | NUDC | NPD011; | CATCAGGAG | HSK |
| | | | | | | gene C homolog (A. nidulans) | | HNUDC; | AAAGGCTGG | |
| | | | | | | (NUDC), | | MNUDC | GTCTTGGGA | |
| | | | | | | mRNA. | | | CCTTGTCCTC | |
| | | | | | | | | | CCCAGTTGG | |
| | | | | | | | | | CCTA | |
| 1735 | — | — | 3130241 | NM_020141.3 | NM_020141 | chromosome 1 open | C1ORF119 | AD-020; | ACCAGTTTTT | HSK |
| | | | | | | reading frame 119 | | FLJ90710 | ACAGCCTCCT | |
| | | | | | | (C1orf119), mRNA. | | | GGGTGGGTC | |
| | | | | | | | | | GTCTTGACCC | |
| | | | | | | | | | AAACTCTTGTG | |
| 1736 | — | — | 60390 | NM_030914.1 | NM_030914 | ubiquitin related | URM1 | C9orf74; | CTGGGGAGA | HSK |
| | | | | | | modifier 1 homolog (S. cerevisiae) | | RP11- | TACTTGATGG | |
| | | | | | | (URM1), | | 339B21.4; | CGCGAATGT | |
| | | | | | | mRNA. | | MGC2668 | CCGTTTTCTC | |
| | | | | | | | | | TCCCTTCCCA | |
| | | | | | | | | | CC | |
| 1737 | — | — | 1450537 | NM_014607.3 | NM_014607 | UBX domain | UBXD2 | erasin; | GGCTGTAAAA | HSK |
| | | | | | | containing 2 (UBXD2), | | UBXDC1; | TGAGAATTCT | |
| | | | | | | mRNA. | | FLJ23318; | GCCCCCTCA | |
| | | | | | | | | KIAA0242 | CCTCTTACCC | |
| | | | | | | | | | CAGTACTATTC | |
| 1738 | — | — | 610112 | NM_173607.3 | NM_173607 | chromosome 14 open | C14ORF24 | DKFZp686J1254; | CTCCAGCCT | HSK |
| | | | | | | reading frame 24 | | FLJ38854 | GGGCGACAG | |
| | | | | | | (C14orf24), transcript | | | AGTGAGACTC | |
| | | | | | | variant 1, mRNA. | | | CATCTTGGG | |
| | | | | | | | | | GGGAAAAAA | |
| | | | | | | | | | GTAT | |

| RNA192 | | | | | |
|---|---|---|---|---|---|
| Index | | | | | |
| (SEQ | | | | | |
| ID NO: | | | | | |
| 1547- | Performance | | ABI Gene | | |
| 1738) | Rank | ABI Assay ID | Symbol | ABI Alias | ABI Gene Name |
| 1547 | 001N | Hs00229548_m1 | TMEM49 | DKFZp566I133, | transmembrane |
| | | | | HSPC292, VMP1 | protein 49 |
| 1548 | 001P | Hs00360269_m1 | VAMP2 | FLJ11460, | vesicle- |
| | | | | SYB2, VAMP-2 | associated |
| | | | | | membrane |
| | | | | | protein 2 |
| | | | | | (synaptobrevin 2) |
| 1549 | 002N | Hs00240532_s1 | ADRB2 | ADRB2R, | adrenergic, |
| | | | | ADRBR, B2AR, | beta-2-, |
| | | | | BAR, | receptor, |
| | | | | BETA2AR | surface |
| 1550 | 002P | Hs00270173_s1 | NAP1L3 | MB20, MGC26312, NPL3, | nucleosome |
| | | | | RP1- | assembly |
| | | | | 32F7.3 | protein 1-like 3 |
| 1551 | 003N | Hs00967385_g1 | SERBP1 | CGI- | SERPINE1 |
| | | | | 55, CHD3IP, | mRNA |
| | | | | DKFZp564M2423, | binding |
| | | | | FLJ90489, | protein |
| | | | | HABP4L, | |
| | | | | PAI- | |
| | | | | RBP1, PAIRBP1 | |
| 1552 | 003P | Hs00211126_m1 | CSAD | CSD, FLJ44987, | cysteine |
| | | | | FLJ45500, MGC119354, | sulfinic acid |
| | | | | MGC119355, | decarboxylase |
| | | | | MGC119357, | |
| | | | | PCAP | |
| 1553 | 004N | Hs00247361_m1 | NPTN | DKFZp686L2477, GP55, | neuroplastin |
| | | | | GP65, | |
| | | | | MGC102805, | |
| | | | | SDFR1, | |
| | | | | SDR1, | |
| | | | | np55, np65 | |
| 1554 | 004P | Hs00937468_m1 | AEBP1 | ACLP, FLJ33612 | AE binding |
| | | | | | protein 1 |
| 1555 | 005N | Hs00233566_m1 | CD79A | IGA, MB-1 | CD79a |
| | | | | | molecule, |
| | | | | | immunoglobulin- |
| | | | | | associated |
| | | | | | alpha |
| 1556 | 005P | Hs02340038_g1 | RPL37 | DKFZp686G1699, | ribosomal |
| | | | | MGC99572 | protein L37 |
| 1557 | 006N | Hs00175132_m1 | ANXA11 | ANX11, CAP50, | annexin A11 |
| | | | | RP11- | |
| | | | | 369J21.10- | |
| | | | | 010 | |
| 1558 | 006P | Hs00959834_m1 | XRCC1 | RCC | X-ray repair |
| | | | | | complementing |
| | | | | | defective |
| | | | | | repair in |
| | | | | | Chinese |
| | | | | | hamster cells 1 |
| 1559 | 007N | Hs00227769_m1 | POF1B | FLJ22792, | premature |
| | | | | POF, POF2B, | ovarian |
| | | | | RP1- | failure, 1B |
| | | | | 75N13.2 | |
| 1560 | 007P | Hs00255244_m1 | RABL2B | FLJ93981, | RAB, member |
| | | | | FLJ98216, | of RAS |
| | | | | FLJ78724, | oncogene |
| | | | | MGC117180, | family-like |
| | | | | RP11- | 2B, RAB, |
| | | | | 395L14.2 | member of |
| | | | | | RAS |
| | | | | | oncogene |
| | | | | | family-like 2A |
| 1561 | 008N | Hs00229472_m1 | SNX27 | KIAA0488, | sorting nexin |
| | | | | MGC126871, | family |
| | | | | MGC126873, MGC20471, | member 27 |
| | | | | MRT1, MY014, | |
| | | | | RP11- | |
| | | | | 98D18.12- | |
| | | | | 005 | |
| 1562 | 008P | Hs00369741_m1 | SELM | MGC40146; | selenoprotein M |
| | | | | SEPM | |
| 1563 | 009N | Hs01033772_g1 | NCOA4 | ARA70, DKFZp762E1112, | nuclear |
| | | | | ELE1, | receptor |
| | | | | PTC3, | coactivator 4 |
| | | | | RFG, RP11- | |
| | | | | 481A12.4 | |
| 1564 | 009P | Hs01127828_g1 | HMGB2 | HMG2 | high-mobility |
| | | | | | group box 2 |
| 1565 | 010N | Hs00418081_m1 | C22orf33 | EAN57, LL22NC01- | chromosome |
| | | | | 81G9.2, MGC35206, | 22 open |
| | | | | cE81G9.2 | reading frame |
| | | | | | 33 |
| 1566 | 010P | Hs00380060_m1 | TMC8 | EV2, EVER2, | transmembrane |
| | | | | EVIN2, | channel- |
| | | | | FLJ40668, | like 8 |
| | | | | FLJ43684, | |
| | | | | MGC102701, MGC40121 | |
| 1567 | 011N | Hs00292978_m1 | KIAA1949 | DAAP- | KIAA1949 |
| | | | | 285E11.2, | |
| | | | | HKMT1098 | |
| 1568 | 011P | Hs00270322_m1 | TAF1 | BA2R, CCG1, | TAF1 RNA |
| | | | | CCGS, | polymerase II, |
| | | | | DYT3, DYT3/ | TATA box |
| | | | | TAF1, | binding |
| | | | | KAT4, N- | protein (TBP)- |
| | | | | TAF1, NSCL2, | associated |
| | | | | OF, P250, | factor, |
| | | | | TAF2A, | 250 kDa |
| | | | | TAFII250, | |
| | | | | XDP | |
| 1569 | 012N | Hs00218034_m1 | ACER3 | APHC, FLJ11238, PHCA | alkaline |
| | | | | | ceramidase 3 |
| 1570 | 012P | Hs00176278_m1 | DGKA | DAGK, DAGK1, | diacylglycerol |
| | | | | DGK- | kinase, alpha |
| | | | | alpha, MGC12821, MGC42356 | 80 kDa |
| 1571 | 013N | Hs00377534_m1 | TTC21A | DKFZp686P18239, | tetratricopeptide |
| | | | | MGC156293, | repeat |
| | | | | MGC70523, | domain 21A |
| | | | | STI2 | |
| 1572 | 013P | Hs00251360_s1 | STRADB | ALS2CR2, | STE20- |
| | | | | CALS- | related kinase |
| | | | | 21, ILPIP, ILPIPA, MGC102916, | adaptor beta |
| | | | | PAPK, PRO1038 | |
| 1573 | 014N | Hs02825719_s1 | GPR119 | GPCR2, MGC119957, | G protein- |
| | | | | RP1- | coupled |
| | | | | 20I3.4 | receptor 119 |
| 1574 | 014P | Hs00427396_m1 | PSMD7 | MOV34, P40, | proteasome |
| | | | | Rpn8, | (prosome, |
| | | | | S12 | macropain) |
| | | | | | 26S subunit, |
| | | | | | non-ATPase, 7 |
| 1575 | 015N | Hs00221046_m1 | SENP7 | KIAA1707, | SUMO1/sentrin |
| | | | | MGC157730 | specific |
| | | | | | peptidase 7 |
| 1576 | 015P | Hs00357776_g1 | GRK6 | FLJ32135, | G protein- |
| | | | | GPRK6 | coupled |
| | | | | | receptor |
| | | | | | kinase 6 |
| 1577 | 016N | Hs01018047_m1 | ABHD12 | ABHD12A, | abhydrolase |
| | | | | BEM46L2, | domain |
| | | | | C20ORF22, | containing 12 |
| | | | | DKFZp434P106, | |
| | | | | RP5- | |
| | | | | 965G21.2, | |
| | | | | dJ965G21.2 | |
| 1578 | 016P | Hs00757030_m1 | PRPF3 | HPRP3, HPRP3P, PRP3, | PRP3 pre- |
| | | | | Prp3p, | mRNA |
| | | | | RP18 | processing |
| | | | | | factor 3 |
| | | | | | homolog (S. cerevisiae) |
| 1579 | 017N | Hs01850784_s1 | FOXG1 | BF1, BF2, | forkhead box |
| | | | | FHKL3, FKH2, | G1 |
| | | | | FKHL1, | |
| | | | | FKHL2, | |
| | | | | FKHL3, FKHL4, | |
| | | | | FOXG1A, | |
| | | | | FOXG1B, | |
| | | | | FOXG1C, | |
| | | | | HBF- | |
| | | | | 1, HBF- | |
| | | | | 2, HBF- | |
| | | | | 3, HBF- | |
| | | | | G2, HBF2, | |
| | | | | HFK1, HFK2, | |
| | | | | HFK3, | |
| | | | | KHL2, QIN | |
| 1580 | 017P | Hs00538167_m1 | IL12RB1 | CD212, IL- | interleukin 12 |
| | | | | 12R- | receptor, beta 1 |
| | | | | BETA1, IL12RB, | |
| | | | | MGC34454 | |
| 1581 | 018N | Hs02339636_g1 | TIMM8B | DDP2, FLJ21744, MGC102866, | translocase of |
| | | | | MGC117373, | inner |
| | | | | TIM8B | mitochondrial |
| | | | | | membrane 8 |
| | | | | | homolog B |
| | | | | | (yeast) |
| 1582 | 018P | Hs00262564_m1 | ZFYVE19 | FLJ14840, | zinc finger, |
| | | | | MPFYVE | FYVE domain |
| | | | | | containing 19 |
| 1583 | 019N | Hs01035151_m1 | CRTAP | CASP, LEPREL3 | cartilage |
| | | | | | associated |
| | | | | | protein |
| 1584 | 019P | Hs00364437_m1 | SCAND2 | 0 | SCAN domain |
| | | | | | containing 2 |
| | | | | | pseudogene |
| 1585 | 020N | Hs00198882_m1 | LAPTM5 | CLAST6, | lysosomal |
| | | | | FLJ61683, | protein |
| | | | | FLJ97251, | transmembrane 5 |
| | | | | MGC125860, | |
| | | | | MGC125861, | |
| | | | | RP5- | |
| | | | | 1166H10.3 | |
| 1586 | 020P | Hs00930964_g1 | PLAC8 | BM- | placenta- |
| | | | | 004, C15, onzin | specific 8 |
| 1587 | 021N | Hs00243566_m1 | B4GALT2 | B4Gal- | UDP- |
| | | | | T2, B4Gal- | Gal:betaGlcNAc |
| | | | | T3, beta4 | beta 1,4- |
| | | | | Gal-T2 | galactosyltransferase, |
| | | | | | polypeptide 2 |
| 1588 | 021P | Hs00195582_m1 | S100A2 | CAN19, MGC111539, | S100 calcium |
| | | | | RP11- | binding |
| | | | | 49N14.8, | protein A2 |
| | | | | S100L | |
| 1589 | 022N | Hs00227643_m1 | ERMP1 | FXNA, KIAA1815, | endoplasmic |
| | | | | RP11- | reticulum |
| | | | | 207C16.6, | metallopeptidase 1 |
| | | | | bA207C16.3 | |
| 1590 | 022P | Hs00159587_m1 | NDUFC1 | KFYI, MGC117464, | NADH |
| | | | | MGC126847, | dehydrogenase |
| | | | | MGC138266 | (ubiquinone) |
| | | | | | 1, |
| | | | | | subcomplex |
| | | | | | unknown, 1, |
| | | | | | 6 kDa |
| 1591 | 023N | Hs00609198_m1 | GCH1 | DYT14, DYT5, | GTP |
| | | | | DYT5a, | cyclohydrolase 1 |
| | | | | GCH, | |
| | | | | GTP-CH- | |
| | | | | 1, GTPCH1, | |
| | | | | HPABH4B | |
| 1592 | 023P | Hs00197131_m1 | PIBF1 | C13ORF24, | progesterone |
| | | | | KIAA1008, | immunomodulatory |
| | | | | PIBF, RP11- | binding |
| | | | | 505F3.1 | factor 1 |
| 1593 | 024N | Hs00377132_m1 | ZNF296 | ZFP296, ZNF342 | zinc finger |
| | | | | | protein 296 |
| 1594 | 024P | Hs00255552_m1 | TMEM8B | C9ORF127, | transmembrane |
| | | | | MGC120460, | protein 8B |
| | | | | NAG- | |
| | | | | 5, NGX6, RP11- | |
| | | | | 112J3.10, | |
| | | | | RP11- | |
| | | | | 112J3.10- | |
| | | | | 001 | |
| 1595 | 025N | Hs00300724_m1 | EPHA5 | CEK7, EHK1, | EPH receptor |
| | | | | HEK7, | A5 |
| | | | | TYRO4 | |
| 1596 | 025P | Hs01127577_m1 | CBX5 | HP1, HP1A | chromobox |
| | | | | | homolog 5 |
| 1597 | 026N | Hs00367123_m1 | AP2A1 | ADTAA, AP2- | adaptor- |
| | | | | ALPHA, CLAPA1 | related protein |
| | | | | | complex 2, |
| | | | | | alpha 1 |
| | | | | | subunit |
| 1598 | 026P | Hs00179978_m1 | EPS15 | AF- | epidermal |
| | | | | 1P, AF1P, | growth factor |
| | | | | MLLT5 | receptor |
| | | | | | pathway |
| | | | | | substrate 15 |
| 1599 | 027N | Hs00195343_m1 | SMNDC1 | SMNR, SPF30 | survival motor |
| | | | | | neuron |
| | | | | | domain |
| | | | | | containing 1 |
| 1600 | 027P | Hs00223885_m1 | MPP5 | FLJ12615, | membrane |
| | | | | PALS1 | protein, |
| | | | | | palmitoylated |
| | | | | | 5 (MAGUK |
| | | | | | p55 subfamily |
| | | | | | member 5) |
| 1601 | 028N | Hs00377608_m1 | NFAM1 | CNAIP, CTA- | NFAT |
| | | | | 126B4.4, FLJ40652, | activating |
| | | | | bK126B4.4 | protein with |
| | | | | | ITAM motif 1 |
| 1602 | 028P | Hs00275076_m1 | HEMK1 | FLJ22320, | HemKmethyltransferase |
| | | | | HEMK, MTQ1 | family |
| | | | | | member 1 |
| 1603 | 029N | Hs00893626_m1 | IL1RN | DIRA, ICIL- | interleukin 1 |
| | | | | 1RA, IL- | receptor |
| | | | | 1RN, IL- | antagonist |
| | | | | 1ra, IL- | |
| | | | | 1ra3, IL1F3, | |
| | | | | IL1RA, IRAP, | |
| | | | | MGC10430, MVCD4 | |
| 1604 | 029P | Hs00902008_m1 | CTCF | 0 | CCCTC- |
| | | | | | binding factor |
| | | | | | (zinc finger |
| | | | | | protein) |
| 1605 | 030N | Hs00164932_m1 | ICAM1 | BB2, CD54, | intercellular |
| | | | | P3.58 | adhesion |
| | | | | | molecule 1 |
| 1606 | 030P | Hs00293954_m1 | C10orf35 | RP11- | chromosome |
| | | | | 343J3.9 | 10 open |
| | | | | | reading frame |
| | | | | | 35 |
| 1607 | 031N | Hs00193519_m1 | MAF | MGC71685, | v- |
| | | | | c-MAF | mafmusculoaponeuroticfibrosarcoma |
| | | | | | oncogene |
| | | | | | homolog |
| | | | | | (avian) |
| 1608 | 031P | Hs00181740_m1 | FLT3LG | FL | fms-related |
| | | | | | tyrosine |
| | | | | | kinase 3 |
| | | | | | ligand |
| 1609 | 032N | Hs00248380_m1 | MAST2 | FLJ39200, | microtubule |
| | | | | KIAA0807, | associated |
| | | | | MAST205, | serine/threonine |
| | | | | MTSSK, | kinase 2 |
| | | | | RP4- | |
| | | | | 533D7.1 | |
| 1610 | 032P | Hs00209335_m1 | MYCBP2 | AC001226.5, | MYC binding |
| | | | | DKFZp686M08244, | protein 2 |
| | | | | FLJ10106, | |
| | | | | FLJ13826, | |
| | | | | FLJ21597, FLJ21646, | |
| | | | | KIAA0916, | |
| | | | | PAM | |
| 1611 | 033N | Hs00376245_m1 | GSG1L | MGC18079, | GSG1-like |
| | | | | PRO19651, | |
| | | | | UNQ5831 | |
| 1612 | 033P | Hs00212889_m1 | PPHLN1 | HSPC206, | periphilin 1 |
| | | | | HSPC232, | |
| | | | | MGC48786 | |
| 1613 | 034N | Hs00186575_m1 | PPAP2C | LPP2, PAP- | phosphatidic |
| | | | | 2c, PAP2-g | acid |
| | | | | | phosphatase |
| | | | | | type 2C |
| 1614 | 034P | Hs01122781_m1 | KIF3B | HH0048, KIAA0359 | kinesin family |
| | | | | | member 3B |
| 1615 | 035N | Hs00364814_m1 | IL22RA2 | CRF2- | interleukin 22 |
| | | | | 10, CRF2- | receptor, |
| | | | | S1, CRF2X, | alpha 2 |
| | | | | IL- | |
| | | | | 22BP, IL- | |
| | | | | 22RA2, MGC150509, | |
| | | | | MGC150510, | |
| | | | | UNQ5793/PRO19598/ | |
| | | | | PRO19822 | |
| 1616 | 035P | Hs00912503_m1 | PIGO | DKFZp434M222, | phosphatidylinositol |
| | | | | FLJ00135, MGC20536, | glycan |
| | | | | MGC3079, | anchor |
| | | | | RP11- | biosynthesis, |
| | | | | 182N22.4, | class O |
| | | | | UNQ632/ | |
| | | | | PRO1249 | |
| 1617 | 036N | Hs00244603_m1 | SERPINB9 | CAP- | serpin |
| | | | | 3, CAP3, PI9 | peptidase |
| | | | | | inhibitor, clade |
| | | | | | B (ovalbumin), |
| | | | | | member 9 |
| 1618 | 036P | Hs01053640_m1 | TXK | BTKL, MGC22473, PSCTK5, PTK4, | TXK tyrosine |
| | | | | RLK, | kinase |
| | | | | TKL | |
| 1619 | 037N | Hs00368207_m1 | PREX1 | KIAA1415, | phosphatidylinositol- |
| | | | | P-REX1 | 3,4,5- |
| | | | | | trisphosphate- |
| | | | | | dependent |
| | | | | | Rac exchange |
| | | | | | factor 1 |
| 1620 | 037P | Hs00268260_m1 | SMARCB1 | BAF47, INI1, | SWI/SNF |
| | | | | RDT, RTPS1, | related, matrix |
| | | | | SNF5, | associated, |
| | | | | SNF5L1, | actin |
| | | | | Sfh1p, Snr1, | dependent |
| | | | | hSNFS | regulator of |
| | | | | | chromatin, |
| | | | | | subfamily b, |
| | | | | | member 1 |
| 1621 | 038N | Hs00216128_m1 | NSUN5 | FLJ10267, | NOP2/Sun |
| | | | | MGC986, | domain family, |
| | | | | NOL1, NOL1R, | member 5 |
| | | | | NSUN5A, | |
| | | | | WBSCR20, | |
| | | | | WBSCR20A, | |
| | | | | p120 | |
| 1622 | 038P | Hs00204112_m1 | MRPL42 | HSPC204, | mitochondrial |
| | | | | MRP- | ribosomal |
| | | | | L31, MRPL31, | protein L42 |
| | | | | MRPS32, | |
| | | | | PTD007, | |
| | | | | RPML31 | |
| 1623 | 039N | Hs00384853_m1 | SIPA1L2 | FLJ23126, | signal-induced |
| | | | | FLJ23632, | proliferation- |
| | | | | KIAA1389, | associated 1 |
| | | | | SPAL2 | like 2 |
| 1624 | 039P | Hs00234934_m1 | CACNA1H | CACNA1HB, | calcium |
| | | | | Cav3.2, | channel, |
| | | | | ECA6, EIG6, | voltage- |
| | | | | FLJ90484 | dependent, T |
| | | | | | type, alpha 1H |
| | | | | | subunit |
| 1625 | 040N | Hs00829622_s1 | ZFAND5 | RP11- | zinc finger, |
| | | | | 63P12.8, ZA20D2, | AN1-type |
| | | | | ZFAND5A, ZNF216 | domain 5 |
| 1626 | 040P | Hs00183813_m1 | PDCD6IP | AIP1, Alix, | programmed |
| | | | | DRIP4, HP95, | cell death 6 |
| | | | | MGC17003 | interacting |
| | | | | | protein |
| 1627 | 041N | Hs00379444_m1 | NCDN | KIAA0607 | neurochondrin |
| 1628 | 041P | Hs00762282_s1 | VTI1B | VTI1, VTI1- | vesicle |
| | | | | LIKE, VTI1L, | transport |
| | | | | VTI2 | through |
| | | | | | interaction |
| | | | | | with t- |
| | | | | | SNAREs |
| | | | | | homolog 1B |
| | | | | | (yeast) |
| 1629 | 042N | Hs00923916_m1 | SALL3 | ZNF796 | sal-like 3 |
| | | | | | (Drosophila) |
| 1630 | 042P | Hs00757279_mH | TATDN1 | CDA11, FLJ43280 | TatDDNase |
| | | | | | domain |
| | | | | | containing 1 |
| 1631 | 043N | Hs00193731_m1 | CCDC6 | D10S170, | coiled-coil |
| | | | | FLJ32286, | domain |
| | | | | H4, PTC, | containing 6 |
| | | | | TPC, TST1 | |
| 1632 | 043P | Hs00260456_m1 | COQ5 | MGC104303, | coenzyme Q5 |
| | | | | MGC4767 | homolog, |
| | | | | | methyltransferase |
| | | | | | (S. cerevisiae) |
| 1633 | 044N | Hs00939664_m1 | FOXN2 | HTLF | forkhead box |
| | | | | | N2 |
| 1634 | 044P | Hs01126016_m1 | UTRN | DMDL, DRP, | utrophin |
| | | | | DRP1, FLJ23678, | |
| | | | | RP11- | |
| | | | | 352E13.1 | |
| 1635 | 045N | Hs01115513_m1 | PPARG | CIMT1, GLM1, | peroxisome |
| | | | | NR1C3, | proliferator- |
| | | | | PPARG1, | activated |
| | | | | PPARG2, | receptor |
| | | | | PPARgamma | gamma |
| 1636 | 045P | Hs00219487_m1 | CCDC76 | FLJ10287, | coiled-coil |
| | | | | FLJ11219, | domain |
| | | | | RP11- | containing 76 |
| | | | | 305E17.1 | |
| 1637 | 046N | Hs00212858_m1 | ANAPC11 | APC11, Apc11p, | anaphase |
| | | | | HSPC214, MGC882 | promoting |
| | | | | | complex |
| | | | | | subunit 11 |
| 1638 | 046P | Hs00903035_g1 | EI24 | PIG8, TP53I8 | etoposide |
| | | | | | induced 2.4 |
| | | | | | mRNA |
| 1639 | 047N | Hs00427977_m1 | ERH | DROER, FLJ27340 | enhancer of |
| | | | | | rudimentary |
| | | | | | homolog |
| | | | | | (Drosophila) |
| 1640 | 047P | Hs00383486_m1 | CC2D1B | KIAA1836, | coiled-coil and |
| | | | | RP11- | C2 domain |
| | | | | 155O18.2 | containing 1B |
| 1641 | 048N | Hs00295839_m1 | RCHY1 | ARNIP, CHIMP, | ring finger and |
| | | | | DKFZp586C1620, | CHY zinc |
| | | | | PIRH2, | finger domain |
| | | | | PRO1996, | containing 1 |
| | | | | RNF199, | |
| | | | | ZNF363, | |
| | | | | hARNIP | |
| 1642 | 048P | Hs00197392_m1 | TM9SF1 | HMP70, MP70 | transmembrane 9 |
| | | | | | superfamily |
| | | | | | member 1 |
| 1643 | 049N | Hs01651150_m1 | ENTPD8 | GLSR2492, | ectonucleoside |
| | | | | NTPDase- | triphosphate |
| | | | | 8, UNQ2492, | diphosphohydrolase 8 |
| | | | | UNQ2492/ | |
| | | | | PRO5779 | |
| 1644 | 049P | Hs00398565_m1 | C3orf15 | AAT1, AAT1alpha, DKFZp781A2221 | chromosome |
| | | | | | 3 open |
| | | | | | reading frame |
| | | | | | 15 |
| 1645 | 050N | Hs00381867_m1 | FGFR1OP2 | DKFZp564O1863, DKFZp586C1423, | FGFR1 |
| | | | | FLJ37569, HSPC123, | oncogene |
| | | | | HSPC123- | partner 2 |
| | | | | like, WIT3.0 | |
| 1646 | 050P | Hs00274505_m1 | NCAPD2 | CAP- | non-SMC |
| | | | | D2, CNAP1, | condensin I |
| | | | | KIAA0159, | complex, |
| | | | | hCAP- | subunit D2 |
| | | | | D2 | |
| 1647 | 051N | Hs00152825_m1 | TLR5 | FLJ10052, | toll-like |
| | | | | MGC126430, | receptor 5 |
| | | | | MGC126431, RP11- | |
| | | | | 239E10.1, | |
| | | | | SLEB1, TIL3 | |
| 1648 | 051P | Hs00212852_m1 | C20orf111 | BM- | chromosome |
| | | | | 038, HSPC207, | 20 open |
| | | | | Perit1, | reading frame |
| | | | | dJ1183I21.1 | 111 |
| 1649 | 052N | Hs00542678_m1 | NFATC1 | MGC138448, | nuclear factor |
| | | | | NF- | of activated T- |
| | | | | ATC, NFAT2, | cells, |
| | | | | NFATc | cytoplasmic, |
| | | | | | calcineurin- |
| | | | | | dependent 1 |
| 1650 | 052P | Hs00226305_m1 | ARHGAP10 | FLJ20896, | Rho GTPase |
| | | | | FLJ41791, | activating |
| | | | | GRAF2, | protein 10 |
| | | | | PS- | |
| | | | | GAP, PSGAP | |
| 1651 | 053N | Hs00369703_m1 | RPUSD1 | C16ORF40, | RNA |
| | | | | MGC19600, | pseudouridylate |
| | | | | RLUCL | synthase |
| | | | | | domain |
| | | | | | containing 1 |
| 1652 | 053P | Hs00418963_m1 | XPO1 | CRM1, DKFZp686B1823, | exportin 1 |
| | | | | emb | (CRM1 |
| | | | | | homolog, |
| | | | | | yeast) |
| 1653 | 054N | Hs00226971_m1 | MMRN2 | EMILIN3, | multimerin 2 |
| | | | | EndoGlyx- | |
| | | | | 1, FLJ13465 | |
| 1654 | 054P | Hs00212785_m1 | MPP6 | PALS2, VAM- | membrane |
| | | | | 1, VAM1, p55T | protein, |
| | | | | | palmitoylated |
| | | | | | 6 (MAGUK |
| | | | | | p55 subfamily |
| | | | | | member 6) |
| 1655 | 055N | Hs00185020_m1 | AQP3 | GIL | aquaporin 3 |
| | | | | | (Gill blood |
| | | | | | group) |
| 1656 | 055P | Hs00197140_m1 | COG5 | CDG2I, FLJ41732, FLJ44289, | component of |
| | | | | GOLTC1, | oligomericgolgi |
| | | | | GTC90 | complex 5 |
| 1657 | 056N | Hs00368084_m1 | RARS2 | ArgRS, DALRD2, | arginyl- |
| | | | | MGC14993, MGC23778, | tRNAsynthetase |
| | | | | PCH6, PRO1992, RARSL, | 2, |
| | | | | RP3- | mitochondrial |
| | | | | 382l10.6, | |
| | | | | dJ382l10.6 | |
| 1658 | 056P | Hs01582977_gH | MT1E | MT1, MTD | metallothionein |
| | | | | | 1E |
| 1659 | 057N | Hs00217534_m1 | WDR41 | FLJ10904, | WD repeat |
| | | | | MSTP048 | domain 41 |
| 1660 | 057P | Hs01597912_g1 | RANBP1 | HTF9A, MGC88701 | RAN binding |
| | | | | | protein 1 |
| 1661 | 058N | Hs00872692_m1 | NRK | DKFZp686A17109, | Nik related |
| | | | | FLJ16788, | kinase |
| | | | | MGC131849, | |
| | | | | NESK, | |
| | | | | RP1- | |
| | | | | 82J11.1 | |
| 1662 | 058P | Hs00275795_m1 | SPG7 | CAR, CMAR, | spastic |
| | | | | FLJ37308, | paraplegia 7 |
| | | | | MGC126331, MGC126332, | (pure and |
| | | | | PGN, SPG5C | complicated |
| | | | | | autosomal |
| | | | | | recessive) |
| 1663 | 059N | Hs00198472_m1 | SRCAP | DOMO1, | Snf2-related |
| | | | | EAF1, FLJ44499, | CREBBP |
| | | | | KIAA0309, SWR1 | activator |
| | | | | | protein |
| 1664 | 059P | Hs00204546_m1 | TMEM5 | HP10481 | transmembrane |
| | | | | | protein 5 |
| 1665 | 060N | Hs00165902_m1 | TCN2 | D22S676, | transcobalamin |
| | | | | D22S750, | II |
| | | | | II, TC, TCII, | |
| | | | | TC- | |
| | | | | 2, TC2, TCII | |
| 1666 | 060P | Hs00248408_m1 | SEPT6 | KIAA0128, | septin 6 |
| | | | | MGC16619, | |
| | | | | MGC20339, | |
| | | | | RP5- | |
| | | | | 876A24.2, | |
| | | | | SEP2, SEPT2 | |
| 1667 | 061N | Hs00203383_m1 | C7orf68 | FLJ21076, | chromosome |
| | | | | HIG- | 7 open |
| | | | | 2, HIG2, MGC138388 | reading frame |
| | | | | | 68 |
| 1668 | 061P | Hs00208618_m1 | AAK1 | DKFZp686F03202, | AP2 |
| | | | | DKFZp686K16132, | associated |
| | | | | FLJ23712, | kinase 1 |
| | | | | FLJ25931, | |
| | | | | FLJ31060, | |
| | | | | FLJ42882, | |
| | | | | FLJ45252, | |
| | | | | KIAA1048, | |
| | | | | MGC138170, | |
| | | | | MGC164568, | |
| | | | | MGC164570 | |
| 1669 | 062N | Hs00163869_m1 | CA2 | CA- | carbonic |
| | | | | II, CAII, Car2 | anhydrase II |
| 1670 | 062P | Hs00535769_m1 | C8orf33 | FLJ20989 | chromosome |
| | | | | | 8 open |
| | | | | | reading frame |
| | | | | | 33 |
| 1671 | 063N | Hs00610137_m1 | STAM | DKFZp686J2352, STAM1 | signal |
| | | | | | transducing |
| | | | | | adaptor |
| | | | | | molecule |
| | | | | | (SH3 domain |
| | | | | | and ITAM |
| | | | | | motif) 1 |
| 1672 | 063P | Hs00224208_m1 | SMYD3 | FLJ21080, | SET and |
| | | | | KMT3E, | MYND |
| | | | | MGC104324, | domain |
| | | | | ZMYND1, | containing 3 |
| | | | | ZNFN3A1, | |
| | | | | bA74P14.1 | |
| 1673 | 064N | Hs00608163_m1 | SEC14L1 | DKFZp686C06176, | SEC14-like 1 |
| | | | | PRELID4A, | (S. cerevisiae) |
| | | | | SEC14L | |
| 1674 | 064P | Hs00265266_g1 | GSTM2 | GST4, GSTM, | glutathione S- |
| | | | | GSTM2- | transferase |
| | | | | 2, GTHMUS, | mu 2 (muscle) |
| | | | | MGC117303 | |
| 1675 | 065N | Hs00698292_m1 | FADS6 | FP18279 | fatty acid |
| | | | | | desaturase |
| | | | | | domain family, |
| | | | | | member 6 |
| 1676 | 065P | Hs00853882_g1 | SNRPC | FLJ20302, | small nuclear |
| | | | | RP3- | ribonucleoprotein |
| | | | | 375P9.1, | polypeptide C |
| | | | | U1C, Yhc1 | |
| 1677 | 066N | Hs01040835_m1 | GINS1 | KIAA0186, | GINS |
| | | | | PSF1, RP4- | complex |
| | | | | 4- | subunit 1 |
| | | | | 691N24.2 | (Psf1 |
| | | | | | homolog) |
| 1678 | 066P | Hs00270914_m1 | CALM3 | CALM1, CALM2, | calmodulin 3 |
| | | | | PHKD, | (phosphorylase |
| | | | | PHKD3 | kinase, |
| | | | | | delta) |
| 1679 | 067N | Hs00363121_m1 | POLR3K | C11, C11- | polymerase |
| | | | | RNP3, My010, | (RNA) III |
| | | | | RPC10, | (DNA |
| | | | | RPC11, | directed) |
| | | | | RPC12.5, | polypeptide K, |
| | | | | hRPC11 | 12.3 kDa |
| 1680 | 067P | Hs00208576_m1 | RNF44 | KIAA1100 | ring finger |
| | | | | | protein 44 |
| 1681 | 068N | Hs00362067_m1 | COX5A | COX, COX-VA, | cytochrome c |
| | | | | VA | oxidase |
| | | | | | subunit Va |
| 1682 | 068P | Hs00536084_m1 | PHAX | FLJ13193, | phosphorylated |
| | | | | RNUXA | adaptor for |
| | | | | | RNA export |
| 1683 | 069N | Hs00220260_m1 | RNPEP | DKFZp547H084 | arginylaminopeptidase |
| | | | | | (aminopeptidase |
| | | | | | B) |
| 1684 | 069P | Hs00608563_m1 | HEATR3 | FLJ20718 | HEAT repeat |
| | | | | | containing 3 |
| 1685 | 070N | Hs00260900_m1 | C5orf32 | ORF1- | chromosome |
| | | | | FL49 | 5 open |
| | | | | | reading frame |
| | | | | | 32 |
| 1686 | 070P | Hs00156055_m1 | BCL7B | 0 | B-cell |
| | | | | | CLL/lymphoma |
| | | | | | 7B |
| 1687 | 071N | Hs00246261_m1 | HBXIP | MGC71071, | hepatitis B |
| | | | | XIP | virus x |
| | | | | | interacting |
| | | | | | protein |
| 1688 | 071P | Hs00217433_m1 | YY1AP1 | FLJ10875, | YY1 |
| | | | | FLJ13914, | associated |
| | | | | HCCA1, | protein 1 |
| | | | | HCCA2, RP11- | |
| | | | | 243J18.1, | |
| | | | | YAP, YY1AP | |
| 1689 | 072N | Hs00170832_m1 | CD226 | DNAM- | CD226 |
| | | | | 1, DNAM1, | molecule |
| | | | | PTA1, TLiSA1 | |
| 1690 | 072P | Hs01075391_m1 | ZNF641 | DKFZp667D1012, FLJ31295 | zinc finger |
| | | | | | protein 641 |
| 1691 | 073N | Hs00204415_m1 | HOXC11 | HOX3H, MGC4906 | homeobox |
| | | | | | C11 |
| 1692 | 073P | Hs00971557_m1 | KLF12 | AP- | Kruppel-like |
| | | | | 2rep, AP2REP, | factor 12 |
| | | | | HSPC122 | |
| 1693 | 074N | Hs00225908_m1 | C16orf53 | FLJ22459, | chromosome |
| | | | | GAS, MGC4606, | 16 open |
| | | | | PA1 | reading frame |
| | | | | | 53 |
| 1694 | 074P | Hs00248344_m1 | SARM1 | FLJ36296, | sterile alpha |
| | | | | KIAA0524, | and TIR motif |
| | | | | SAMD2, | containing 1 |
| | | | | SARM | |
| 1695 | 075N | Hs00905983_m1 | N4BP2 | B3BP, FLJ10680, | NEDD4 |
| | | | | KIAA1413 | binding |
| | | | | | protein 2 |
| 1696 | 075P | Hs01390827_g1 | LYRM5 | 0 | LYR motif |
| | | | | | containing 5 |
| 1697 | 076N | Hs00541038_m1 | SHMT1 | CSHMT, | serine |
| | | | | MGC15229, | hydroxymethyltransferase 1 |
| | | | | MGC24556, | (soluble) |
| | | | | SHMT | |
| 1698 | 076P | Hs00823168_g1 | MT1H | MGC70702, | metallothionein |
| | | | | MT1 | 1H |
| 1699 | 077N | Hs00172870_m1 | NR2F6 | EAR- | nuclear |
| | | | | 2, EAR2, ERBAL2 | receptor |
| | | | | | subfamily 2, |
| | | | | | group F, |
| | | | | | member 6 |
| 1700 | 077P | Hs02518187_g1 | PNRC2 | FLJ20312, | proline-rich |
| | | | | MGC99541, | nuclear |
| | | | | RP11- | receptor |
| | | | | 4M23.5 | coactivator 2 |
| 1701 | 078N | Hs00410739_m1 | DGKH | DGKeta, DKFZp761I1510, | diacylglycerol |
| | | | | RP11- | kinase, eta |
| | | | | 215B13.1 | |
| 1702 | 078P | Hs01122981_m1 | PJA2 | KIAA0438, | praja ring |
| | | | | Neurodap1, | finger 2 |
| | | | | RNF131 | |
| 1703 | 079N | Hs01937849_s1 | GPBAR1 | BG37, GPCR19, | G protein- |
| | | | | GPR131, | coupled bile |
| | | | | M- | acid receptor 1 |
| | | | | BAR, MGC40597, TGR5 | |
| 1704 | 079P | Hs00367579_m1 | CRLF3 | CREME9, | cytokine |
| | | | | CYTOR4, | receptor-like |
| | | | | FRWS, MGC20661, | factor 3 |
| | | | | p48.2 | |
| 1705 | 080N | Hs00201854_m1 | GCA | GCL | grancalcin, |
| | | | | | EF-hand |
| | | | | | calcium |
| | | | | | binding |
| | | | | | protein |
| 1706 | 080P | Hs00406762_m1 | PRKAR1B | PRKAR1 | protein |
| | | | | | kinase, |
| | | | | | cAMP- |
| | | | | | dependent, |
| | | | | | regulatory, |
| | | | | | type I, beta |
| 1707 | 081N | Hs00383944_m1 | C5orf62 | MGC117221, | chromosome |
| | | | | MGC126887, MGC126889, | 5 open |
| | | | | MST150, | reading frame |
| | | | | NID67 | 62 |
| 1708 | 081P | Hs00243205_m1 | SNURF | DKFZp686C0927, DKFZp686M12165, DKFZp761I1912, | SNRPN |
| | | | | DKFZp762N022, | upstream |
| | | | | FLJ33569, | reading |
| | | | | FLJ36996, | frame, small |
| | | | | FLJ39265, | nuclear |
| | | | | HCERN3, | ribonucleoprotein |
| | | | | MGC29886, PWCR, | polypeptide N |
| | | | | RT- | |
| | | | | LI, SM- | |
| | | | | D, SMN, SNRNP- | |
| | | | | N, SNURF- | |
| | | | | SNRPN | |
| 1709 | 082N | Hs02379634_s1 | CH25H | C25H | cholesterol |
| | | | | | 25- |
| | | | | | hydroxylase |
| 1710 | 082P | Hs02578922_gH | MT1G | MGC12386, | metallothionein |
| | | | | MT1, MT1K | 1G |
| 1711 | 083N | Hs02621289_g1 | TPT1 | FLJ27337, | tumor protein, |
| | | | | HRF, RP11- | translationally- |
| | | | | 290D2.1, | controlled 1 |
| | | | | TCTP, p02 | |
| 1712 | 083P | Hs00233287_m1 | IKBKB | FLJ33771, | inhibitor of |
| | | | | FLJ36218, | kappa light |
| | | | | FLJ38368, | polypeptide |
| | | | | FLJ40509, | gene |
| | | | | IKK- | enhancer in |
| | | | | beta, IKK2, | B-cells, kinase |
| | | | | IKKB, MGC131801, | beta |
| | | | | NFKBIKB | |
| 1713 | 084N | Hs00541730_m1 | CHST13 | C4ST3, MGC119278, | carbohydrate |
| | | | | MGC119279, | (chondroitin 4) |
| | | | | MGC119281 | sulfotransferase |
| | | | | | 13 |
| 1714 | 084P | Hs00371639_m1 | SNUPN | KPNBL, RNUT1, | snurportin 1 |
| | | | | Snurportin1 | |
| 1715 | 085N | Hs00384007_m1 | WSCD1 | KIAA0523 | WSC domain |
| | | | | | containing 1 |
| 1716 | 01HSK | Hs02338565_gH | RPL19 | DKFZp779D216, | ribosomal |
| | | | | FLJ27452, MGC71997 | protein L19 |
| 1717 | 02HSK | Hs01086912_m1 | HNRNPD | AUF1, AUF1A, | heterogeneous |
| | | | | HNRPD, | nuclear |
| | | | | P37, hnRNPD0 | ribonucleoprotein |
| | | | | | D (AU-rich |
| | | | | | element RNA |
| | | | | | binding |
| | | | | | protein 1, |
| | | | | | 37 kDa) |
| 1718 | 03HSK | Hs00828752_gH | RPS20 | FLJ27451, | ribosomal |
| | | | | MGC102930 | protein S20 |
| 1719 | 04HSK | Hs01631495_s1 | RPL26L1 | FLJ46904, | ribosomal |
| | | | | RPL26P1 | protein L26- |
| | | | | | like 1 |
| 1720 | 05HSK | Hs00254535_m1 | EIF4H | KIAA0038, | eukaryotic |
| | | | | WBSCR1, | translation |
| | | | | WSCR1 | initiation factor |
| | | | | | 4H |
| 1721 | 06HSK | Hs00371372_m1 | SON | BASS1, C21ORF50, | SON DNA |
| | | | | DBP- | binding |
| | | | | 5, FLJ21099, | protein |
| | | | | FLJ33914, | |
| | | | | HSPC310, | |
| | | | | KIAA1019, | |
| | | | | NREBP, | |
| | | | | SON3 | |
| 1722 | 07HSK | Hs00763191_s1 | YPEL5 | CGI-127 | yippee-like 5 |
| | | | | | (Drosophila) |
| 1723 | 08HSK | Hs01115161_m1 | DPP7 | DPP2, DPPII, | dipeptidyl- |
| | | | | QPP | peptidase 7 |
| 1724 | 10NSK | Hs00559413_m1 | ANXA7 | ANX7, RP11- | annexin A7 |
| | | | | 537A6.8, | |
| | | | | SNX, SYNEXIN | |
| 1725 | 11HSK | Hs00212868_m1 | PAIP2 | HSPC218, | poly(A) |
| | | | | MGC72018, | binding |
| | | | | PAIP2A | protein |
| | | | | | interacting |
| | | | | | protein 2 |
| 1726 | 12HSK | Hs00199284_m1 | RAB35 | H- | RAB35, |
| | | | | ray, RAB1C, | member RAS |
| | | | | RAY | oncogene |
| | | | | | family |
| 1727 | 13HSK | Hs00606477_m1 | CDC37 | P50CDC37 | cell division |
| | | | | | cycle 37 |
| | | | | | homolog (S. cerevisiae) |
| 1728 | 14HSK | Hs00194538_m1 | SRSF4 | SFRS4, SRP75 | serine/arginine- |
| | | | | | rich splicing |
| | | | | | factor 4 |
| 1729 | 15HSK | Hs00363236_m1 | AKIRIN2 | C6ORF166, | akirin 2 |
| | | | | FBI1, FLJ10342, | |
| | | | | dJ486L4.2 | |
| 1730 | 16HSK | Hs00229388_m1 | CCDC130 | MGC10471, | coiled-coil |
| | | | | SB115 | domain |
| | | | | | containing |
| | | | | | 130 |
| 1731 | 17HSK | Hs00272036_m1 | CD2BP2 | FWP010, | CD2 |
| | | | | LIN1, Snu40, | (cytoplasmic |
| | | | | U5- | tail) binding |
| | | | | 52K | protein 2 |
| 1732 | 18HSK | Hs00197056_m1 | TIMM23 | FLJ40725, | translocase of |
| | | | | FLJ56773, | inner |
| | | | | FLJ57459, | mitochondrial |
| | | | | FLJ79448, | membrane 23 |
| | | | | MGC71995, MGC87383, | homolog |
| | | | | RP11- | (yeast), translocase |
| | | | | 481A12.7, | of inner |
| | | | | TIM23, RP11- | mitochondrial |
| | | | | 592B15.7, | membrane 23 |
| | | | | bA592B15.7 | homolog B |
| | | | | | (yeast) |
| 1733 | 20HSK | Hs00193824_m1 | MED6 | NY-REN- | mediator |
| | | | | 28 | complex |
| | | | | | subunit 6 |
| 1734 | 21HSK | Hs00702452_s1 | NUDC | HNUDC, | nuclear |
| | | | | MNUDC, | distribution |
| | | | | NPD011 | gene C |
| | | | | | homolog (A. nidulans) |
| 1735 | 22HSK | Hs00220038_m1 | TMEM167B | AD- | transmembrane |
| | | | | 020, C1ORF119, | protein |
| | | | | FLJ90710 | 167B |
| 1736 | 23HSK | Hs00229455_m1 | URM1 | C9ORF74, | ubiquitin |
| | | | | MGC2668, | related |
| | | | | RP11- | modifier 1 |
| | | | | 339B21.4 | |
| 1737 | 24HSK | Hs00412682_m1 | UBXN4 | FLJ23318, | UBX domain |
| | | | | KIAA0242, | protein 4 |
| | | | | KIAA2042, | |
| | | | | UBXD2, | |
| | | | | UBXDC1, | |
| | | | | erasin | |
| 1738 | 25HSK | Hs00380814_m1 | FAM177A1 | C14ORF24, | family with |
| | | | | DKFZp686J1254, | sequence |
| | | | | FLJ38854 | similarity 177, |
| | | | | | member A1 |

TABLE 3
20 Positive and Negative Predictor Genes of GVHD Outcome and Exemplary Probes

| | | | | | | | | Minimal | Minimal |
|---|---|---|---|---|---|---|---|---|---|
| | | | | | | | | p-value | p-value |
| | | | | | | | P or N | precision- | standard |
| | | | | | | | predictor | weighted | heteroscedastic |
| Index | ProbeID | Accession no. | Gene name | Symbol | Synonyms | Probe sequence | gene | T-test | T-test |
| 1 | 380575 | NM_000978.3 | ribosomal protein L23 | RPL23 | MGC117346; rpL17; | TCCAGCAGTGGTCATTCG | N | 0.009966 | 0.001089 |
| | | | (RPL23), mRNA. | | MGC111167; MGC72008 | ACAACGAAAGTCATACCGT | | | |
| | | | | | | AGAAAAGATGGCG | | | |
| 2 | 940398 | NM_006360.3 | eukaryotic translation | EIF3M | FLJ29030; GA17; hfl-B5; | CAGACCCAGAGAAAAGTA | N | 0.013671 | 0.00275 |
| | | | initiation factor 3, subunit M | | eIF3m; PCID1; B5 | GTTGTCAGTCATAGCACAC | | | |
| | | | (EIF3M), mRNA. | | | ATCGGACATTTGG | | | |
| 3 | 990315 | NM_030752.2 | t-complex 1 (TCP1), | TCP1 | TCP-1-alpha; CCT-alpha; | GCAATGGTAAACCTCGAG | N | 0.001814 | 9.08E−05 |
| | | | transcript variant 1, mRNA. | | CCT1; D6S230E; CCTa | ACAACAAACAAGCAGGGG | | | |
| | | | | | | TGTTTGAACCAACC | | | |
| 4 | 1240136 | NM_199345.3 | phosphatidylinositol 4- | PI4KAP2 | FLJ44912; MGC31920 | GTGAGCCTGGGCCCTACA | P | 0.009399 | 0.000919 |
| | | | kinase, catalytic, alpha | | | TGGATGTGGTCGTCTCCC | | | |
| | | | polypeptide pseudogene 2 | | | TGGTCACTATCATG | | | |
| | | | (PI4KAP2), mRNA. | | | | | | |
| 5 | 1820482 | NM_004548.1 | NADH dehydrogenase | NDUFB10 | PDSW | CAGAGGCAGAGGATGCTG | N | 0.001628 | 0.000849 |
| | | | (ubiquinone) 1 beta | | | CAAGAGAGAAAAGCTGCA | | | |
| | | | subcomplex, 10, 22 kDa | | | AAAGAGGCCGCCGC | | | |
| | | | (NDUFB10), mRNA. | | | | | | |
| 6 | 1850288 | NM_014153.2 | zinc finger CCCH-type | ZC3H7A | HSPC055; ZC3HDC7; | GTTGGGGAAGAGGATAAG | N | 0.009361 | 5.94E−05 |
| | | | containing 7A (ZC3H7A), | | ZC3H7; FLJ20318; | GTTATATCTAGGACAACTC | | | |
| | | | mRNA. | | FLJ10027 | TTTGAGTTGGTCC | | | |
| 7 | 2940022 | NM_000712.3 | biliverdin reductase A | BLVRA | BVRA; BLVR | CTGAGAAGGAACTGGCTG | N | 0.001468 | 0.000119 |
| | | | (BLVRA), mRNA. | | | CTGAAAAGAAACGCATCCT | | | |
| | | | | | | GCACTGCCTGGGG | | | |
| 8 | 3370164 | NM_000701.6 | ATPase, Na+/K+ | ATP1A1 | MGC3285; MGC51750 | CGAAGTCAGAAAACTCATC | P | 0.006818 | 0.000591 |
| | | | transporting, alpha 1 | | | ATCAGGCGACGCCCTGGC | | | |
| | | | polypeptide (ATP1A1), | | | GGCTGGGTGGAGA | | | |
| | | | transcript variant 1, mRNA. | | | | | | |
| 9 | 3440400 | NM_020698.1 | transmembrane and coiled- | TMCC3 | KIAA1145 | GGGCAAACCCAAAGATGG | N | 0.019615 | 1.54E−06 |
| | | | coil domain family 3 | | | AAAGTGCTTGTTGGGTGG | | | |
| | | | (TMCC3), mRNA. | | | GTAAGCACCACCTG | | | |
| 10 | 3450148 | NM_170734.2 | brain-derived neurotrophic | BDNF | MGC34632 | ATGTACGTGGGGGATTCTT | N | 0.012771 | 1.75E−05 |
| | | | factor (BDNF), transcript | | | GACTCGGGTTAGTCTCTG | | | |
| | | | variant 6, mRNA. | | | GGGATGCAGAGCC | | | |
| 11 | 3780450 | NM_079837.2 | BTG3 associated nuclear | BANP | DKFZp761H172; | TTTCGTTTGAGTCCTGCTG | P | 0.012871 | 0.007059 |
| | | | protein (BANP), transcript | | FLJ10177; SMAR1; | TTGGTGTCGGAGCACGAG | | | |
| | | | variant 2, mRNA. | | SMARBP1; FLJ20538 | GGGAGGCACGGTG | | | |
| 12 | 4200575 | NM_014232.1 | vesicle-associated | VAMP2 | SYB2; VAMP-2; FLJ11460 | GCCCAGAGAGAGCTGTCC | P | 0.001982 | 0.000689 |
| | | | membrane protein 2 | | | TCTCATTGGGTGAACTGAT | | | |
| | | | (synaptobrevin 2) (VAMP2), | | | TGAGGAAGGGTCT | | | |
| | | | mRNA. | | | | | | |
| 13 | 4640689 | NM_001967.3 | eukaryotic translation | EIF4A2 | DDX2B; BM-010; EIF4A; | GGACCCTGTTGCTAAGCC | P | 0.004037 | 0.000412 |
| | | | initiation factor 4A, isoform | | EIF4F | CCAGCAAGCAATCCTAGG | | | |
| | | | 2 (EIF4A2), mRNA. | | | TAGGGTTTAATCCC | | | |
| 14 | 5220196 | NM_006565.2 | CCCTC-binding factor (zinc | CTCF | — | ATGTAGCAGAATGGCACC | P | 0.007622 | 0.000468 |
| | | | finger protein) (CTCF), | | | CAGACCACTGCCCACCAG | | | |
| | | | mRNA. | | | TGACGGACATGCAC | | | |
| 15 | 5870632 | NM_004800.1 | transmembrane 9 | TM9SF2 | P76; MGC117391; | CAGTGTGGTGAAGGTTGA | N | 0.004099 | 0.001709 |
| | | | superfamily member 2 | | FLJ26287 | CTGAAGAAGTCCAGTGTG | | | |
| | | | (TM9SF2), mRNA. | | | TCCAGTTAAAACAG | | | |
| 16 | 6290392 | NM_005839.3 | serine/arginine repetitive | SRRM1 | SRM160; 160-KD; | CAACTTTCAGAGCCTCTTG | P | 0.007348 | 0.000539 |
| | | | matrix 1 (SRRM1), mRNA. | | POP101; MGC39488 | TATTTGGAAGGCTGGAAG | | | |
| | | | | | | GGCCCAGACTTTG | | | |
| 17 | 6380008 | NM_025209.2 | enhancer of polycomb | EPC1 | Epl1; DKFZp781P2312 | ACACAGTAGCGATGGAGG | P | 0.008241 | 0.00013 |
| | | | homolog 1 (Drosophila) | | | TGACGTAGCTTCCTCCGA | | | |
| | | | (EPC1), mRNA. | | | GTGGAACTGCAGCC | | | |
| 18 | 6380427 | NM_202468.1 | GIPC PDZ domain | GIPC1 | IIP-1; TIP-2; GLUT1CBP; | CCCTCCCTGTGGAGCCTG | P | 0.0106 | 0.003695 |
| | | | containing family, member 1 | | C19orf3; RGS19IP1; | TTACCTCCGCATTTGACAC | | | |
| | | | (GIPC1), transcript variant | | Hs.6454; SYNECTIIN; | GAGTCTGCTGTGA | | | |
| | | | 3, mRNA. | | MGC15889; NIP; | | | | |
| | | | | | MGC3774; SEMCAP; GIPC | | | | |
| 19 | 6580553 | NM_005688.2 | ATP-binding cassette, sub- | ABCC5 | MOAT-C; pABC11; ABC33; | GTTTGGTGTGTTCCCGCAA | P | 0.030046 | 0.000792 |
| | | | family C (CFTR/MRP), | | MRP5; SMRP; EST277145; | ACCCCCTTTGTGCTGTGG | | | |
| | | | member 5 (ABCC5), | | DKFZp686C1782; MOATC | GGCTGGTAGCTCA | | | |
| | | | transcript variant 1, mRNA. | | | | | | |
| 20 | 7210128 | NM_024408.2 | Notch homolog 2 | NOTCH2 | hN2; AGS2 | AGCCATAGCTGGTGACAA | N | 0.015967 | 0.008984 |
| | | | (Drosophila) (NOTCH2), | | | ACAGATGGTTGCTCAGGG | | | |
| | | | mRNA. | | | ACAAGGTGCCTTCC | | | |

[0159] Unless otherwise defined, all technical and scientific terms used herein have the same meaning as commonly understood by one of ordinary skill in the art to which this invention belongs. Although methods and materials similar or equivalent to those described herein can be used in the practice or testing of the present invention, suitable methods and materials are described herein.

[0160] All applications, publications, patents and other references, GenBank citations and ATCC citations cited herein are incorporated by reference in their entirety. In case of conflict, the specification, including definitions, will control.

[0161] All of the features disclosed herein may be combined in any combination. Each feature disclosed in the specification may be replaced by an alternative feature serving a same, equivalent, or similar purpose. Thus, unless expressly stated otherwise, disclosed features (e.g., compound structures) are an example of a genus of equivalent or similar features.

[0162] As used herein, the singular forms “a”, “and,” and “the” include plural referents unless the context clearly indicates otherwise. Thus, for example, reference to “a first, second, third, fourth, fifth, etc. predictor gene” or a “positive or negative predictor gene” includes a plurality of such first, second, third, fourth, fifth, etc., genes, or a plurality of positive and/or negative predictor genes.

[0163] All applications, publications, patents and other references, GenBank citations and ATCC citations cited herein are incorporated by reference in their entirety. In case of conflict, the specification, including definitions, will control.

[0164] As used herein, all numerical values or numerical ranges include integers within such ranges and fractions of the values or the integers within ranges unless the context clearly indicates otherwise. Thus, to illustrate, reference to a range of 90-100%, includes 91%, 92%, 93%, 94%, 95%, 95%, 97%, etc., as well as 91.1%, 91.2%, 91.3%, 91.4%, 91.5%, etc., 92.1%, 92.2%, 92.3%, 92.4%, 92.5%, etc., and so forth.

[0165] Reference to a number with more (greater) or less than includes any number greater or less than the reference number, respectively. Thus, for example, a reference to less than 30,000, includes 29,999, 29,998, 29,997, etc. all the way down to the number one (1); and less than 20,000, includes 19,999, 19,998, 19,997, etc. all the way down to the number one (1).

[0166] Reference to a range or series of ranges includes integers within the ranges, subranges, and combinations of the series of ranges. For example, a range of 5 to 10 therefore includes 1, 2, 3, 4, 5, 6, 7, 8, 9, 10, and a range of 5 to 10 therefore includes 5 to 7, 5 to 8, 6 to 8, 5 to 9, 7 to 9, 5 to 10, etc. Reference to a series of ranges includes combinations of the upper and lower end of the ranges. For example, reference to a series of ranges from 1 to 10, to 20, 20 to 30, 30 to 40, 40 to 50, 60 to 70, 70 to 80, 80 to 90, 90 to 100, includes ranges from 5-20, 5-50, 5-100, 20-50, 20-100, 30-50, 30-100, 40 to 60, 40 to 70, 40 to 80, etc. and, so forth.

[0167] The invention is generally disclosed herein using affirmative language to describe the numerous embodiments. The invention also includes embodiments in which subject matter is excluded, in full or in part, such as substances or materials, method steps and conditions, protocols, or procedures. Thus, even though the invention is generally not expressed herein in terms of what the invention does not include aspects that are not expressly excluded in the invention are nevertheless disclosed herein.

[0168] A number of embodiments of the invention have been described. Nevertheless, one skilled in the art, without departing from the spirit and scope of the invention, can make various changes and modifications of the invention to adapt it to various usages and conditions. Accordingly, the following examples are intended to illustrate but not limit the scope of the invention claimed.

### EXAMPLES

### Example 1

[0169] This example includes a description of materials and methods.

[0170] Sample Sources:

[0171] All 122 pre-transplant, frozen (liquid nitrogen) donor PBMC (peripheral blood mononuclear cells) samples and corresponding recipient GVHD histories were obtained under contract from the repository of frozen transplant donor blood samples and informational database of the NMDP (National Marrow Donor Program). All of the 122 HCTs examined correspond to HLA 10/10 matched unrelated donor transplantations, and originated from a total of 47 different transplant centers throughout the U.S. (Table 4). The HCTs examined were used for the treatment of NMDP-selected patients with ALL, AML, CML, or MDS. These 122 samples were analyzed and from these samples, exemplary positive and negative GVHD predictor genes are listed in Table 1 (RNA 1538).

[0172] The 6 different GVHD outcome Groups (capital “G”) are relatively evenly distributed for each center. This provides a highly diverse HCT sample source population, which will eliminate most potential biases, if any, of transplant clinical center-source sample processing and clinical outcome attribution.

TABLE 4
Centers

| | | Transplant Center (TC) | | | | | | | | | | | | | | | | | | | | | | | |
|---|---|---|---|---|---|---|---|---|---|---|---|---|---|---|---|---|---|---|---|---|---|---|---|---|---|
| | | 12 | 43 | 38 | 53 | 4 | 21 | 17 | 1 | 23 | 48 | 0 | 14 | 8 | 10 | 18 | 19 | 20 | 28 | 33 | 36 | 42 | 46 | 52 | 2 |
| No. donors | | 19 | 8 | 7 | 7 | 6 | 6 | 5 | 4 | 4 | 4 | 3 | 3 | 2 | 2 | 2 | 2 | 2 | 2 | 2 | 2 | 2 | 2 | 2 | 1 |
| per TC | | | | | | | | | | | | | | | | | | | | | | | | | |
| No. donors | G1 | — | 1 | 2 | 1 | 2 | 2 | — | 2 | 2 | — | — | 1 | 2 | 1 | 1 | — | 1 | — | — | 2 | — | — | — | 1 |
| per | G2 | 1 | 3 | 3 | — | 2 | 2 | 1 | — | — | — | 1 | — | — | — | 1 | — | — | — | — | — | — | 1 | 2 | — |
| GVHD | G3 | 3 | — | 1 | — | — | — | — | 1 | 1 | 3 | 1 | — | — | — | — | — | 1 | 1 | 1 | — | 1 | 1 | — | — |
| group | G4 | 6 | 3 | — | 1 | — | — | 3 | — | — | — | — | 1 | — | — | — | — | — | 1 | — | — | — | — | — | — |
| | G5 | 2 | — | — | 2 | 1 | — | — | 1 | 1 | — | 1 | — | — | — | — | 1 | — | — | — | — | 1 | — | — | — |
| | G6 | 7 | 1 | 1 | 3 | 1 | 2 | 1 | — | — | 1 | — | 1 | — | 1 | — | 1 | — | — | 1 | — | — | — | — | — |

| | | Transplant Center (TC) | | | | | | | | | | | | | | | | | | | | | | |
|---|---|---|---|---|---|---|---|---|---|---|---|---|---|---|---|---|---|---|---|---|---|---|---|---|
| | | 3 | 5 | 6 | 7 | 11 | 15 | 16 | 22 | 25 | 26 | 27 | 29 | 32 | 34 | 35 | 37 | 39 | 40 | 41 | 44 | 45 | 49 | 51 |
| No. donors | | 1 | 1 | 1 | 1 | 1 | 1 | 1 | 1 | 1 | 1 | 1 | 1 | 1 | 1 | 1 | 1 | 1 | 1 | 1 | 1 | 1 | 1 | 1 |
| per TC | | | | | | | | | | | | | | | | | | | | | | | | |
| No. donors | G1 | — | — | 1 | — | — | — | 1 | — | — | — | 1 | 1 | 1 | — | — | — | — | — | — | — | — | — | — |
| per | G2 | — | — | — | — | — | — | — | — | — | — | — | — | — | — | — | — | 1 | — | 1 | — | — | — | 1 |
| GVHD | G3 | — | — | — | 1 | 1 | — | — | — | 1 | 1 | — | — | — | — | — | — | — | — | — | — | 1 | — | — |
| group | G4 | — | — | — | — | — | — | — | 1 | — | — | — | — | — | — | 1 | — | — | — | — | — | — | — | — |
| | G5 | — | — | — | — | — | 1 | — | — | — | — | — | — | — | 1 | — | — | — | 1 | — | 1 | — | 1 | — |
| | G6 | 1 | 1 | — | — | — | — | — | — | — | — | — | — | — | — | — | 1 | — | — | — | — | — | — | — |

[0173] Patient GVHD-Related Disease Outcome Defined Groups:

[0174] GVHD outcomes for each transplantation are divided into six clinically relevant groups, named Group 1 through Group 6. These outcome groups cover several combinations of acute grades 3 or 4 (most intense and life-threatening) and acute grades 1 or 2 (less severe and occasionally considered mild) GVHD, and/or with extensive chronic GVHD (Table 5).

TABLE 5
GROUPS

| GVHD | | | | | | |
|---|---|---|---|---|---|---|
| group | G1 | G2 | G3 | G4 | G5 | G6 |
| Observed | no | no | grade 1&2 | grade 1&2 | grade 3&4 | grade 3&4 |
| GVHD | acute GVHD & | acute GVHD & | acute GVHD & | acute GVHD & | acute GVHD & | acute GVHD & |
| | no | extensive | no | extensive | no | extensive |
| | chronic GVHD | chronic GVHD | chronic GVHD | chronic GVHD | chronic GVHD | chronic GVHD |
| Total | n = 26 | n = 20 | n = 20 | n = 17 | n = 15 | n = 24 |
| donors | | | | | | |

[0175] In-Laboratory Selection of Blood-Derived Specific T-Lymphocytes for RNA Expressionanalysis:

[0176] CD4+ T-cells were separated from donor PBMC frozen blood samples using commercially available magnetic microbeads technology (Miltenyi Corp.), conducted under contract with a commercial laboratory (Southern Research Institute (SRI), Birmingham, Ala.). At another contract laboratory, RNA was subsequently extracted from purified CD4+ cells using the commercially available RNeasy kit (Qiagen).

[0177] For each of the resulting 122 donor RNA samples, gene expression (i.e., intra-cellular RNA abundance) was assayed for ˜20,000 genes (as represented by 48,803 human genome probes, each replicated through ˜20 independent technical measurements for robust signal averaging) using a commercially available Illumina HT-12 BeadArrays v3.0 microarrays (Illumina Corp.) (Illumina mRNA Expression Analysis, Customer Solutions, IIlumina, Inc., San Diego, Calif., esp. section IIlumina Whole-Genome Gene Expression BeadChips, pp. 5-7). The RNA-extractions and quantitative gene expression measurements on IIlumina microarrays and numerical digitization of the in-lab measurements were conducted under contract (Expression Analysis Inc. (EA), Durham, N.C.).

### Example 2

[0178] This example includes a description of data transformation for mathematical and numerical stabilization and background reduction.

[0179] In general, variance stabilization is intended to mathematically and statistically properly mitigate common phenomenon for many different kinds of real data: The variance, or standard deviation, of measurements inherently increases with measurement level rather than being essentially independent of level. It is desirable statistically to mitigate, or even remove, such “level-dependent” variance or standard deviation by appropriate theoretically or empirically justified mathematical transformations having certain acceptable properties statistically (Durbin, et al., Bioinformatics, 18, Suppl. 1, 5105-5110 (2002)).

[0180] Variance stabilization is called for primarily because most standard parametric tests (e.g., T-tests) and indeed some non-parametric tests (e.g., rank-based statistical tests), theoretically and practically assume that the variance, or standard deviation, of a set of measurements does not depend on the mean of such measurements. Analogously, this also applies for the variance or standard deviation or measurement error of a single measurement and the level of that single measurement. To the extent that variance or standard deviation of measurements depend on the level of the measurements, is the extent to which, practically speaking, statistical tests based on level-independent variance or standard deviation is less trustworthy. Hence, if there is substantial (relative, say, to differences between means of certain germane subsets of data) level-dependence of variance or standard deviation, then it is recommended to apply a variance stabilization mathematical \numerical transformation of the data before doing the statistical tests (Sheskin, David J. Handbook of Parametric and Nonparametric Statistical Procedures, 3^{rd} Edition, Chapman & Hall/CRC Press, Boca Raton, Fla., 2004, esp. pp. 404-409).

[0181] Mathematical\Numerical Stabilization of Quantitative Measurements Using Specific VST (“Variance Stabilization Transformation”):

[0182] Before application of a customized computational pre- or post-processing of quantitative gene expression data that identified positive and negative genes predictive of HCT that induces GVHD or not, Illumina microarray gene expression data was background-subtracted using the conventional manufacturer-supplied Illumina Bead Studio software, as performed by Expression Analysis Inc. All microarray-derived gene expression data, sample by sample, was then subjected computationally to a customized implementation of Illumina measurements Variance Stabilizing Transformation (VST), then linearly resealed robustly to a maximum of ˜4.5, and then quantile normalized. (Lin, et al., Nucleic Acids Research 36(2):ell, 1-9 (2008)) for the background mathematical statistics of VST as applied to Illumina BeadArray microarray data).

[0183] Certain mathematical details in (Lin, et al., Nucleic Acids Research 36(2):ell, 1-9 (2008) were updated as described in detail below, and subsequently validated technically. The VST refined mathematics and implementation in customized Matlab programming language (The MathWorks, Inc., 3 Apple Hill Dr., Natick, Mass. 01760) was developed and implemented.

[0184] In particular, an IIlumina BeadArray-specific mathematical\statistical\numerical VST (Lin, et al., Nucleic Acids Research 36(2):ell, 1-9 (2008), with refinements) was applied sample-by-sample (i.e., for each donor HCT separately) to the Illumina platform-derived gene expression numerical measurements. This “pre-processing” mathematical \statistical \numerical data treatment step operating on the gene expression measurements was applied before outcome predictive data analysis.

[0185] VST specifically designed for Illumina platform-derived gene expression data is not common and not widely used, though it is established in the scientific literature (Durbin, et al., Bioinformatics, 18, Suppl. 1, S105-S110 (2002); Dunning, et al., BMC (Biomed Central) Bioinformatics 9, #85, doi:10.1186/1471-2105-9-85, 1-15 (2008)). From the IIlumina-oriented published literature (Illumina mRNA Expression Analysis, Customer Solutions, IIlumina, Inc., San Diego, Calif., esp. section Illumina Whole-Genome Gene Expression BeadChips, pp. 5-7; Dunning, et al., BMC (Biomed Central) Bioinformatics 9, #85, doi:10.1186/1471-2105-9-85, 1-15 (2008)) and from a detailed scrutiny of the Illumina data from this study, there is a profound tendency of each gene expression measurement's inherent technical standard deviation or technical “error”, i.e., Illumina platform's provided so-called Bead Standard Error (Illumina mRNA Expression Analysis, Customer Solutions, Illumina, Inc., San Diego, Calif., esp. section IIlumina Whole-Genome Gene Expression BeadChips, pp. 5-7; Dunning, et al., BMC (Biomed Central) Bioinformatics 9, #85, doi:10.1186/1471-2105-9-85, 1-15 (2008)), to increase substantially with magnitude of the expression measurement. Accordingly, VST was applied to the Illumina data from this study, and because of this study's use of LDA (linear discriminant analysis) and T-tests.

[0186] A modification of the state-of-the-art versio of VST for IIlumina, as published by Lin, et al. (Lin, et al., Nucleic Acids Research 36(2):ell, 1-9 (2008)), was developed and applied to the gene expression data.

[0187] Numerical Data Tabular Arrangement:

[0188] In the following description the in-laboratory Illumina-platform generated data is arranged as a 2-dimensional table or matrix: Samples, i.e., donor HCTs or control, refer to columns, and on-platform (i.e., IIlumina BeadArray) specifically defined molecular probes refer to rows. A given row therefore represents data associated with the same probe, and across all columns, i.e., across all HCT samples and controls. A given column represents a given sample, i.e., a given donor HCT or control, and each row represents a measurement value associated with a specific probe, row-by-row respectively, and in the same row-wise ordering for every sample. E.g., for the Illumina HT-12 BeadArray version 3.0 employed in studies, there are 48803 probes; hence 48803 rows (before any row-wise sub-selections might be made). The number of columns involved depends on the number of HCT samples.

[0189] Illumina Array Provides 3 Numerical Quantities with Gene Expression Measurement Signal:

[0190] Four separate (though interrelated) kinds of measurement values are provided by the Illumina platform: gene expression signal, bead standard error, average number of beads involved in the signal measurement, and Illumina-defined and computed signal “detection p-value.” The bead standard error, average number of beads, and signal detection p-value are associated with each and every gene expression signal measurement (BeadStudio Gene Expression Module v3.2 User Guide, Part #11279596 Rev. A, IIlumina, Inc., San Diego, Calif., esp., Detection P-value section, Normalization and Differential Analysis, Ch. 4.). In the following description, gene expression measurement is referred to as signal; bead standard error is abbreviated as bead_stderr (or similar such names, lower- or upper-case); average number of beads is abbreviated as avg_nbeads (or similar such names, lower- or upper-case); and detection p-value is abbreviated as detection p-value (or similar such names, lower- or upper-case).

[0191] Background Subtraction—Instrumental and Subsequent Contexts:

[0192] In the expression studies, signal refers to raw signal numerical values provided by the Illumina platform, minus the so-called numerically estimated instrumental “local background fluorescence” as assessed and computed by the Illumina platform for each probe of any given sample. I.e., in the studies, signal starts as raw signal minus Illumina platform-provided “background” subtraction. Also in the studies, the signals provided by the Illumina platform are not “normalized” by the Illumina platform.

[0193] In the course of the mathematical, statistical, and numerical computational processing for VST, negative or near-zero signal values are themselves considered as gene expression measurement “background” to be accounted for, and adjusted for, within the VST procedure. This will be made explicit and clear later in the description.

[0194] Tabular Arrangement of Illumina-Provided Quantities:

[0195] As stated above, there is a numerical data matrix (probes in rows, samples in columns) for signal. Also, there is such an analogous, row-wise and column-wise in register, numerical data matrix for each of the 3 non-signal Illumina-provided numerical measurements: bead standard error of the signal measurement, average number of beads involved in the signal measurement, and the Illumina-defined and provided “detection p-value”. Thus at the fundamental level, there are always these 3 kinds of laboratory instrument-level quantities associated with a given signal value for a given probe for a given sample. This triple of information is harnessed and exploited in the VST for Illumina data (Lin, et al., Nucleic Acids Research 36(2):ell, 1-9 (2008)), and in the customized modification and implementation of VST for the Illumina data.

[0196] The data is transformed before outcome prediction data analysis is carried out. VST is applied separately to each individual sample separately across all probes. Example real results for sample-by-sample compute VST parameters c1, c2, and c3 for each of 48 samples across 48803 probes are shown below in Table 6. Even so, in the following description, explanations of mathematical and statistical methods and computational procedures do not focus narrowly on individual samples per se one-by-one as examples. Thus, in the below, often the data and plots will be referred to in terms of all probes (48803 probes) and all HCT samples (e.g., 48 samples for one particular stage of the studies). Such will then comprise, e.g., 48803 by 48=2,342,544 numerical values of signal, of corresponding bead_stderr, of corresponding avg_nbeads, and of corresponding detection p-values.

[0197] Signal Histogram:

[0198] A representative unsmoothed histogram of 48803 probes by 48 samples Illumina signal values is shown in FIG. 1 (Plot 5,1). Due to the range of possible raw Illumina “background”-subtracted values being from about several hundred negative to about 40,000 positive, the empirical distribution is visualized more clearly when the logarithm base ten (“log 10”) of the signal values are histogrammed. Of course, due to logarithm, only positive raw signal values can be represented in such a histogram. FIG. 1 (Plot 5,1) is a fundamental empirical distributional view of the all the positive signal values. Note that this log 10(positive signal) histogram is not strictly single Gaussian-like (i.e., has a discernible broad shoulder to the right of the main peak).

[0199] Bead Standard Error, Average Number of Beads, Signal, and Histograms:

[0200] An advantage of the IIlumina BeadArray technology for measuring many thousands of gene expressions per sample is the provision of bead standard error (Dunning, et al., BMC (Biomed Central) Bioinformatics 9, #85, doi:10.1186/1471-2105-9-85, 1-15 (2008); BeadStudio Gene Expression Module v3.2 User Guide, Part #11279596 Rev. A, Illumina, Inc., San Diego, Calif., esp., Detection P-value section, Normalization and Differential Analysis, Ch. 4.). Due to the physical nature of the Illumina platform, bead standard error can be considered physically and statistically as the standard error (at the instrument level) of a given signal measurement. That is, bead standard error of a given probe of a given sample can be considered as a conventional error bar half-width as standard error (i.e., as measurement standard deviation divided by the square root of the number of replicates of the measurement, and which for the Illumina platform is bead_stderr=measurement standard deviation divided by sqrt(avg_nbeads) involved in the measurement) around the corresponding signal value (Durbin, et al., Bioinformatics, 18, Suppl. 1, S105-S110 (2002); Dunning, et al., BMC (Biomed Central) Bioinformatics 9, #85, doi:10.1186/1471-2105-9-85, 1-15 (2008)). The Illumina platform conducts separate measurements of individual Illumina “beads” to constitute ultimately a reported signal value and a bead standard error along with average number of beads involved in obtaining the reported signal and bead standard error (BeadStudio Gene Expression Module v3.2 User Guide, Part #11279596 Rev. A, Illumina, Inc., San Diego, Calif., esp., Detection P-value section, Normalization and Differential Analysis, Ch. 4.; Lin, et al., Nucleic Acids Research 36(2):ell, 1-9 (2008)). Typically as observed in these studies, there are about 20 separate beads on average being involved in a given gene probe's signal measurement. Because of these fundamentals, a given signal is really an individual bead-wise average signal; hence, “signal” is actually inherently an “average signal.” In the following description, the words signal and average signal are interchangeable for the same quantity, i.e., the signal, i.e., the average signal, reported by the Illumina platform for a given probe for a given sample. More specifically, the standard deviation of an Illumina-provided signal measurement (i.e., of “average signal”) is the square root of the average number of beads involved in the measurement (i.e., sqrt(avg_nbeads) times the corresponding reported bead standard error (Durbin, et al., Bioinformatics, 18, Suppl. 1, S105-S110 (2002); Lin, et al., Nucleic Acids Research 36(2):ell, 1-9 (2008)). Though vaguely Gaussian-like distributionally, bead standard error increases markedly, substantially, with increasing signal. This is the fundamental reason that a well-behaved and implementable variance stabilization transformation be applied to the Illumina data. This phenomenon calls for application of VST to the data BEFORE subsequent GVHD outcome-predictive analysis and discovery to mitigate such marked level-dependence of bead standard error, or standard deviation, or variance on signal level.

[0201] In further support of the above findings, the observed signal level-dependence of bead standard error (and hence of essentially variance too) is shown clearly and dramatically in FIG. 2 (Plot 6,5). FIG. 2 is a scatterplot of log 10(bead_stderr) vs. log 10(positive signal). Clearly, bead_stderr whether as is, or in log 10 units as in FIG. 2, is not constant vs. signal. Comments on Illumina detection p-values germane to VST, and why reported Illumina detection p-values are employed in a highly limited way: Implementation of VST employs an “approximate signal detection high-quality” threshold by requiring signals employed in computing the VST parameters per se from data to be based on Illumina platform high-quality signal detection (details below). This is an additional step added to the published version of VST (Lin, et al., Nucleic Acids Research 36(2):ell, 1-9 (2008)) to assure that the data-derived computed VST parameters are based on technically reliable signal measurements not near instrumental background noise even though subsequently the data-derived parametrically so-defined VST is applied to all the data. That is, the reliability of the computed VST is assured in principle by very conservatively basing the data-dependent computed VST parameters c₁, c₂, c₃ per se (see below) on sets of signal values for which the lesser technical quality signals (technically according to IIlumina platform provided detection p-value) are omitted from the VST parameter calculations per se. The algorithm employed by the Illumina platform in generating the reported detection p-values is complex. (See Illumina mRNA Expression Analysis, Customer Solutions, IIlumina, Inc., San Diego, Calif., esp. section Illumina Whole-Genome Gene Expression BeadChips, pp. 5-7, especially BeadStudio Gene Expression Module v3.2 User Guide, Part #11279596 Rev. A, Illumina, Inc., San Diego, Calif., esp., Detection P-value section, Normalization and Differential Analysis, Ch. 4.) In practice, empirical distributional properties of detection p-values can be computed from ensembles of actual Illumina data to guide practical judgment concerning the use of reported detection p-values for specific purposes, particularly in choosing to omit the technically less reliable signals from certain calculations.

[0202] Therefore, when setting a detection p-value limit of <0.5 for data employed in VST parameters per se calculations, those calculations are based on the technically most reliable 60% of the data, i.e., the technically most reliable majority of the signal data, regardless of experimental or biological interpretations that might be associated with such data. Hence, the data-dependent computationally derived VST parameters' values per se are reliable values in being derived from technically very reliable data. Detection p-values>about 0.5 are associated predominantly with signals near zero and indeed especially with negative signals, i.e., with signals whose level is essentially equivalent to low-level background noise. (Note: Biologically, such genes can be interpreted as being either at, or below, reasonable instrumental detection limits; hence more or less reliably “off” in gene expression. A measured gene expression signal that is near instrumental detection limit (and hence its numerical value is small but not reliable as a quantitative number differing from “noise”) can very well be reliably “off” in gene expression when interpreted biologically. This is not an artifact, but a fact of physically reality: Measured quantities whose values are near instrumental detection limit, hence not reliable numerical values per se, are still very reliably “absent” in physical, chemical, or biological interpretation.)

[0203] Hence, reported Illumina detection p-values are employed only in highly conservative approaches to calculating data-dependent VST parameters per se, i.e., by basing such calculations only on the majority of data unlikely to be near instrumental background “noise” in signal value.

[0204] Illumina measurement data needed specifically to compute VST:

[0205] Considerations of Background Signal:

[0206] VST as published by Lin, et al., Nucleic Acids Research 36(2):ell, 1-9 (2008) is based on a widely accepted, long-existing error-model or “noise” model from analytic chemistry for laboratory quantitative instrumentation (Durbin, et al., Bioinformatics, 18, Suppl. 1, S105-S110 (2002)), as instrumentally measured signals generally are corrupted inevitably, to very small, or sometimes to large, degrees by a combination of so-called additive and multiplicative noise.

[0207] Accordingly, low-level signals that can be considered reliably as being dominated by “background noise” are called “background signal”, and can be defined practically and operationally as Illumina reported signals for which reported detection p-values are>about 0.5. Hence, signals for which Illumina reported detection p-values are>0.5 as empirically defined “background signal.”

[0208] Considerations of “Background Signal” Variance Specifically for VST:

[0209] As mentioned above, very reliably signal standard deviation in general is stddev=sqrt(avg_nbeads)*bead_stderr. Hence, very reliably signal variance in general is stddev̂2=avg_nbeads*bead_stderr̂2. “Background signal” variance is thus computed as the square of stddev, and where “background signal” stddev is computed from avg_nbeads and bead_stderr.

[0210] VST Parameter c3 is Computed from “Background Signal” Variance:

[0211] By definition of the VST error model in Lin, et al., Nucleic Acids Research 36(2):ell, 1-9 (2008), data-derived VST parameter c3 is computed as the arithmetic mean of the “background signal” variance, i.e., signals for which detection p-value is >0.50.

[0212] Because the observed distribution of “background signal” variance is skewed rightward towards larger variance, the mean somewhat over-estimates the central tendency of “background signal” variance, i.e., mean is about 10% greater than median. In practical terms, it is safer and more conservative to slightly over-estimate “background signal” variance than to under-estimate it. Thus, it is good in practice to employ the mean rather than median in the numerical estimation of “background signal” variance for VST parameter c3. The c₃ calculations are implemented this way.

[0213] Algorithmically implementing another modification of the published VST procedure (Lin, et al., Nucleic Acids Research 36(2):ell, 1-9 (2008)) is to omit from the c1 and c2 calculations the largest 2% of the signals. In practice, the 98 percentile of observed signal values is less than about 1500 in raw signal value, e.g., the 98 percentile signal is about 1200 for the 48803 genes by 48 samples ensemble, i.e., only about 2% of the signals from the Illumina platform have observed values>about 1500. FIG. 3 (Plot 5,1) is important: (1) It shows empirically that the vast majority of Illumina raw signal data occurs at levels less than about 1500 even though there are many signals at the multiple tens of thousands level; (2) for the vast majority of signals, i.e., 98% of signals (because the largest 2% were omitted from the VST c1 and c2 parameters calculations), there is still clear and marked dependence of standard deviation or variance with signal level; and (3) it is precisely the data such as that represented in FIG. 3 (Plot 5,1) that is employed in the calculation of the VST data-dependent parameters c1 and c2 for each sample separately.

[0214] Calculation of VST Data-Dependent Parameters c1 and c2:

[0215] The procedure follows Lin, et al., Nucleic Acids Research 36(2):ell, 1-9 (2008), apart from introducing restriction to the smallest 98% of signal data going into the calculations. For a given set of data on which VST is computed, omitted from the c1 and c2 calculation are the largest 2% of signals. The implemented procedure is then: After c3 is computed as the “background signal” average variance as described above, consider (x,y)-pairs of data for which y is the sqrt(signal variance-c3) and for which signal variance exceeds c3, and x is the corresponding signal value. I.e., consider only those (x,y) for which y is positive and whose variance exceeds c3, and for which also x is less than the 98 percentile signal value. Then compute a linear fit of form y=c1*x+c2 to the set of (x,y) data points. I.e., c1 is defined as the slope of the linear fit, and c2 is defined as the y-intercept of the linear fit. Hence, numerical values for the data-dependent VST parameters c1 and c2 are so obtained from the (x,y) data points. The computed fitted line in FIG. 3 (Plot 5,1) has, e.g., slope c1=about 0.2 and y-axis intercept c2=about 9.0.

[0216] Variance Stabilizing Transformation (VST) Equation as a Formula:

[0217] VST is a specific, three-parameter, nonlinear function f operating upon Illumina platform-provided signal data. Function f transforms any signal value (not log signal value) to a new signal value t. I.e., VST in practice and in implementation is simply t=f(s; c1, c2, c3), where c1, c2, and c3 are numerical constants derived from a given set of Illumina data upon which VST is to be applied. This exposition and plots employ an example 48803 genes by 48 samples ensemble of real data. However, in actual practice, VST is applied to each sample separately, one sample at a time across all 48803 gene probes. In actual practice, 48 samples would require 48 separate applications of VST, each sample-wise instance of which would require its own calculation of the three required data-dependent constants c1, c2, and c3. (See Table 6 for example actual c1, c2, c3 numerical results for each of 48 samples, and for each sample compute across 48803 probes.) Relative to the data matrices describe above, VST is applied separately to each column: In deriving sample-specific values for constants c1, c2, and c3, and subsequently in transforming all the signal values s of the given column, i.e., given sample, by application of the VST function t=f(s; c₁, c₂, c₃) to the given column of data.

[0218] The fundamental VST equation for transforming raw gene expression signal s to corresponding variance stabilized transformed signal t=f(s; c₁, c₂, c₃), involving data-derived numerical values of parameters c₁, c₂, c₃ Lin, et al., Nucleic Acids Research 36(2):ell, 1-9 (2008):

$$t = f ( s ; {c}_{1} , {c}_{2} , {c}_{3} ) = \frac{1}{{c}_{1}} arcsinh ( \frac{{c}_{1} s + {c}_{2}}{\sqrt{{c}_{3}}} )$$

and where output t is the so-called variance stabilized transformed (i.e., “VST'ed”) signal; and where inputs arcsin h(z) is the conventional mathematical inverse hyperbolic sine function of real (not complex) negative, zero, or positive argument z; is raw platform-determined signal (not log-transformed, and with or without platform-determined instrumental background subtracted) and which can be negative, zero, or positive; and c₁, c₂, c₃ are the mathematically well-defined but data-derived across a sample or an ensemble of samples S numerical constants of the VST, all of which are positive. (Note: Mathematically c₃ can be zero and in which case the algebraic form of argument z changes; however, in practice c₃, is always positive because physically from the instrument, a signal's variance, whether from bead_stderr or from any other quantitation of physical variance, is never zero.)

[0219] For any Given Gene Probe for any Given Sample or Ensemble of Samples S:

[0220] c₃ is the arithmetic mean of the data-derived variances of signals s for which signals s are considered “background signals”, computed across most or all gene probes for a given sample or ensemble of samples; c₁ and c₂ are respectively the slope and y-intercept of a linear fit of (x,y) data y vs. x across most or all gene probes for a given sample (i.e., down a column, or along an ensemble of many columns, in the matrix of data described above), and where x is positive signal s for which the variance of s (denoted vans)) exceeds the already computed c₃ for the given sample or ensemble of samples, and where hence y=\sqrt{var(s)−c₃} (note: therefore y is always positive), and var(s) is the bead_stderr-derived, or other physically-derived variance, of signal s. Typically, Illumina platform bead-level technical variance of signal, denoted as var(s), is bead_stderr-derived, i.e., var(s)=stddev²(s)=((squareroot(avg_nbeads)) (bead_stderr))² (Durbin, et al., Bioinformatics, 18, Suppl. 1, S105-S110 (2002); BeadStudio Gene Expression Module v3.2 User Guide, Part #11279596 Rev. A, Illumina, Inc., San Diego, Calif., esp., Detection P-value section, Normalization and Differential Analysis, Ch. 4.) which of course also =(avg_nbeads) (bead_stderr)². The former formula is intended to be implemented to compute var(s) numerically since it is a little better-behaved with respect to numerical precision than the latter. Either formula implementation is acceptable, however.

Arcsin h(z)=ln(2z)+(1/(2*2*z²)−1*3/(2*4*4*z⁴)+1*3*5/(2*4*6*6*z⁶)- . . . , for |z|>1, and where ln(z) is the conventional notation for natural logarithm, i.e., logarithm base e.

[0221] A real advantage and benefit to gene expression numerical analysis generally is to adopt the arcsin h function to replace the logarithm function in the needed application of numerical transformations of gene expression signal data. Also, note that arcsin h(z) differs from log(2z) by less than 4/10 of 1 percent, and increasingly less so, for arguments z whose magnitude exceeds 5. The advantageous numerical properties of arcsin h over logarithm are mathematical and inherent, and are not due to arcsin h's variance stabilization properties per se, e.g., of VST per se. The mathematical advantages are gained once VST is applied to gene expression signal data, and primarily employed for the benefits to subsequent statistical analysis accruing from stabilization of technical signal measurement variance.

[0222] Mathematical Refinement of the Basis for the Fundamental VST Equation t=f(s; c₁, c₂, c₃):

[0223] In Lin, et al., Nucleic Acids Research 36(2):ell, 1-9 (2008), the left-hand side of the legitimate generalized variance stabilizing integral applied to the accepted additive and multiplicative instrumental error model is written formally as an indefinite integral transform (i.e., with no explicit, nor implied in the paper, specific lower bound of integration). Formally so-written is not entirely correct. Rather, exactly the same integrand should appear in their eq. 6 but within a definite integral, i.e., an integral with an explicit lower-bound of integration appearing. The mathematical, and computer programmed implementation of VST employs the appropriate and correct definite integral version.

[0224] Visualization Globally of the Signal Distributional Effects of VST on Gene Expression Signal Data:

[0225] FIG. 4 (Plot 7,4) shows a histogram of all the signal values of the 48803 by 48 sample ensemble AF′T′ER the ensemble is “VST' ed”. There is no discernible humped feature suggesting a 2^{nd} Gaussian-like distribution being involved in the histogram of the transformed data (as is seen in the “pre-VST'ed” data in FIG. 1 (Plot 5,1). I.e., empirically the “VST'ed” signal data is much better behaved distributionally globally than before transformation by VST. FIG. 4 (Plot 7,4) shows also the right-wardly skewed tail capturing the relative minority of highly expressed, or “over-expressed”, i.e., very large, gene expression signals. The right-ward tail is also well behaved distributionally with respect to the entire empirical distribution. 7,3). For better viewing of the histogram along the horizontal axis, the signal data plotted in FIG. 4 has the largest 2% of VST largest signals omitted.

[0226] Table of Numerical Values, Sample by Sample, for VST Parameters c1, c2, c3:

[0227] Table 6 shows the typical study results for VST parameters c1, c2, and c2 when VST is applied not wholesale to the entire 48803 genes by 48 samples ensemble, as used in the exposition above. Rather, Table 6 shows the numerical results for the VST parameters, and other related quantities, and including descriptive statistics of the parameter (across 48 samples), when computed for each sample one by one from the study ensemble of 48 samples. When the signal values for a given sample (across all 48803 gene probes) from the study ensemble of 48 samples are transformed by the fundamental VST function (but multiplied by 1/ln(10) to put in log 10 units rather than in log base-e units), the triple of (c1, c2, c3) values are used in the fundamental VST equation for the given sample. The resulting “VST'ed” signal values (which are considered then to be in log 10 units) then are taken into the subsequent statistical analysis and outcome prediction analysis procedures.

TABLE 6
Data-derived VST c1, c2, c3 numerical values for 48 samples, each sample assessed
across 48803 gene probes.
Data-derived parameters c1, c2, c3 are obtained for each Sample by using
the function ldg_fast1_col_Illumina_VST1. For any given Sample (data column) . . .
VST model data-derived parameter values c1, c2, c3 are from linear fit
of sqrt(variance(positive signal) − c3) vs. c1 * signal + c2, for given Sample column, and
data-derived c3 is “average background noise” (averaged across genes). I.e.,
“average background noise” is mean variance of “not significant signal”
(i.e., averaged across all “not significant signal” genes among all 48803 genes).
For the VST model, “not significant signal” is signal for which Illumina Detection p-value
is greater than the SPECIFIED “not significant signal detection” threshold of 0.5.
“rms error” is the root mean squared difference between the VST model linear fit value
and the observed signal stddev, for which signal variance exceeds c3, for each of the 48
samples treated one by one by the VST procedure.

| | | ordinate | (avg. noise | data - | | | |
|---|---|---|---|---|---|---|---|
| | intercept | background) | linear fit | abscissa | (signal) | | |
| slope i | c1 | c2 | c3 | rms error | intercept | c1/sqrt(c3) | c2/sqrt(c3) |
| 1) | 0.1931 | 7.6704 | 73.5857 | 9.1133 | −39.7307 | 2.251e−02 | 8.942e−01 |
| 2) | 0.1909 | 7.6393 | 74.0352 | 9.0450 | −40.0199 | 2.218e−02 | 8.878e−01 |
| 3) | 0.1979 | 9.1056 | 122.3927 | 11.6411 | −46.0079 | 1.789e−02 | 8.231e−01 |
| 4) | 0.2009 | 9.5195 | 131.7722 | 11.6787 | −47.3758 | 1.750e−02 | 8.293e−01 |
| 5) | 0.2331 | 7.6188 | 119.7042 | 6.8953 | −32.6803 | 2.131e−02 | 6.964e−01 |
| 6) | 0.2362 | 9.8098 | 146.0437 | 17.6191 | −41.5246 | 1.955e−02 | 8.117e−01 |
| 7) | 0.2290 | 9.0556 | 90.0853 | 13.5222 | −39.5475 | 2.413e−02 | 9.541e−01 |
| 8) | 0.1945 | 8.4312 | 122.9463 | 5.3164 | −43.3471 | 1.754e−02 | 7.604e−01 |
| 9) | 0.2087 | 7.8182 | 82.8694 | 8.5509 | −37.4606 | 2.293e−02 | 8.588e−01 |
| 10) | 0.1978 | 11.0393 | 157.6520 | 11.3531 | −55.8165 | 1.575e−02 | 8.792e−01 |
| 11) | 0.1953 | 9.7066 | 135.9825 | 13.3452 | −49.6941 | 1.675e−02 | 8.324e−01 |
| 12) | 0.2040 | 6.5398 | 65.4384 | 5.7675 | −32.0535 | 2.522e−02 | 8.084e−01 |
| 13) | 0.1837 | 8.1626 | 78.9135 | 10.7090 | −44.4287 | 2.068e−02 | 9.189e−01 |
| 14) | 0.2310 | 9.2147 | 138.1069 | 11.5314 | −39.8952 | 1.965e−02 | 7.841e−01 |
| 15) | 0.2255 | 10.2855 | 151.4679 | 14.8532 | −45.6183 | 1.832e−02 | 8.357e−01 |
| 16) | 0.1987 | 10.6989 | 152.6931 | 13.5622 | −53.8530 | 1.608e−02 | 8.658e−01 |
| 17) | 0.2103 | 8.4860 | 82.9680 | 12.0448 | −40.3511 | 2.309e−02 | 9.316e−01 |
| 18) | 0.2280 | 8.2641 | 87.8796 | 10.6302 | −36.2386 | 2.433e−02 | 8.816e−01 |
| 19) | 0.1940 | 10.8655 | 149.2040 | 15.9561 | −56.0137 | 1.588e−02 | 8.895e−01 |
| 20) | 0.1803 | 8.8685 | 89.4246 | 11.6997 | −49.1945 | 1.906e−02 | 9.378e−01 |
| 21) | 0.2014 | 7.5389 | 75.6339 | 8.7054 | −37.4373 | 2.316e−02 | 8.669e−01 |
| 22) | 0.2113 | 8.0475 | 88.4602 | 7.6482 | −38.0828 | 2.247e−02 | 8.556e−01 |
| 23) | 0.2188 | 10.1163 | 142.0871 | 13.1008 | −46.2404 | 1.835e−02 | 8.487e−01 |
| 24) | 0.1924 | 8.4828 | 86.7673 | 10.9134 | −44.0834 | 2.066e−02 | 9.107e−01 |
| 25) | 0.2026 | 10.6932 | 158.1119 | 15.2558 | −52.7780 | 1.611e−02 | 8.504e−01 |
| 26) | 0.2236 | 8.9440 | 130.0491 | 10.9693 | −40.0067 | 1.960e−02 | 7.843e−01 |
| 27) | 0.2505 | 9.5965 | 143.2067 | 19.0065 | −38.3066 | 2.093e−02 | 8.019e−01 |
| 28) | 0.2411 | 8.8903 | 129.1467 | 19.0587 | −36.8714 | 2.122e−02 | 7.823e−01 |
| 29) | 0.1979 | 8.3725 | 86.1638 | 10.2309 | −42.3059 | 2.132e−02 | 9.020e−01 |
| 30) | 0.2176 | 10.1751 | 146.1900 | 16.2367 | −46.7593 | 1.800e−02 | 8.415e−01 |
| 31) | 0.2023 | 9.0555 | 90.7925 | 13.1548 | −44.7643 | 2.123e−02 | 9.504e−01 |
| 32) | 0.2119 | 6.5460 | 66.0484 | 7.1058 | −30.8866 | 2.608e−02 | 8.055e−01 |
| 33) | 0.2103 | 6.5344 | 67.5574 | 8.7749 | −31.0730 | 2.559e−02 | 7.950e−01 |
| 34) | 0.1882 | 10.3724 | 139.0566 | 15.0647 | −55.1031 | 1.596e−02 | 8.796e−01 |
| 35) | 0.2257 | 7.2784 | 78.3815 | 9.6685 | −32.2487 | 2.549e−02 | 8.221e−01 |
| 36) | 0.2071 | 8.2408 | 88.9377 | 10.2574 | −39.7922 | 2.196e−02 | 8.738e−01 |
| 37) | 0.2109 | 8.0180 | 79.2804 | 11.4981 | −38.0201 | 2.368e−02 | 9.005e−01 |
| 38) | 0.1918 | 8.4245 | 83.1117 | 11.0860 | −43.9300 | 2.104e−02 | 9.241e−01 |
| 39) | 0.2157 | 7.5638 | 90.2344 | 5.3902 | −35.0657 | 2.271e−02 | 7.963e−01 |
| 40) | 0.1922 | 10.4373 | 147.4283 | 14.9077 | −54.2927 | 1.583e−02 | 8.596e−01 |
| 41) | 0.2167 | 9.5285 | 139.8563 | 13.0149 | −43.9758 | 1.832e−02 | 8.057e−01 |
| 42) | 0.2221 | 8.0544 | 88.0398 | 10.7173 | −36.2644 | 2.367e−02 | 8.584e−01 |
| 43) | 0.1840 | 7.4687 | 74.5185 | 9.4471 | −40.5902 | 2.132e−02 | 8.652e−01 |
| 44) | 0.2284 | 6.4066 | 71.9591 | 6.3741 | −28.0441 | 2.693e−02 | 7.552e−01 |
| 45) | 0.2045 | 8.9891 | 126.7488 | 11.5178 | −43.9506 | 1.817e−02 | 7.984e−01 |
| 46) | 0.2041 | 9.7227 | 139.7254 | 12.1089 | −47.6280 | 1.727e−02 | 8.225e−01 |
| 47) | 0.2439 | 7.8124 | 118.4329 | 6.6700 | −32.0328 | 2.241e−02 | 7.179e−01 |
| 48) | 0.2302 | 7.5929 | 113.2130 | 7.8511 | −32.9839 | 2.164e−02 | 7.136e−01 |

Descriptive statistics of all the by quantities, column by column, i.e., descriptive
statistics computed across the 48 rows (i.e., samples) in each column:
ordinate (avg. noise data - (signal)

| | intercept | background) | linear fit | abscissa | | | |
|---|---|---|---|---|---|---|---|
| slope i | c1 | c2 | c3 | rms error | intercept | c1/sqrt(c3) | c2/sqrt(c3) |
| minimum: | 0.1803 | 6.4066 | 65.4384 | 5.3164 | −56.0137 | 1.575e−02 | 6.964e−01 |
| mean: | 0.2100 | 8.7022 | 109.2147 | 11.2619 | −41.7577 | 2.066e−02 | 8.431e−01 |
| median: | 0.2079 | 8.4844 | 102.0027 | 11.2196 | −40.4706 | 2.113e−02 | 8.495e−01 |
| maximum: | 0.2505 | 11.0393 | 158.1119 | 19.0587 | −28.0441 | 2.693e−02 | 9.541e−01 |
| stddev: | 0.0172 | 1.2283 | 30.5179 | 3.3775 | 7.1395 | 3.069e−03 | 6.061e−02 |

(where for all of the above, specified detection p-value threshold = 0.5)

### Example 3

[0228] This example includes a description of GVHD Class Divisions and statistical T-tests used for determining differences in patient GVHD outcome based upon HCT donor gene expression measurements.

[0229] A “class division” refers to direct numerical, mathematical, statistical, or computational comparisons between quantitative gene expression of donors whose respective transplanted patients have displayed one or more particular GVHD outcome Groups (e.g., class 1) vs. donors whose respective transplanted patients have displayed one or more other particular GVHD outcome Groups (e.g., class 2, and which is by definition of the 2-class comparison, different than class 1).

[0230] Class divisions involve comparisons between two classes and no comparisons among more than two classes at the same time. As can be seen in Table 7, a given well-defined class can by definition comprise more than one so-called “Group” of kinds of GVDH-related outcomes of corresponding transplanted patients. Thus, class divisions always involve exactly two defined classes; yet a given defined class can comprise more than one defined GVHD outcome Group.

TABLE 7
TTEST DIVISIONS

| T-test division | anyGVHD vs. noGVHD | cGVHD vs. noGVHD | aGVHD vs. noGVHD | a&cGVHD vs. noGVHD | a34GVHD vs. noGVHD |
|---|---|---|---|---|---|
| Class 1 | any GVHD | chronic GVHD | acute GVHD | acute and chronic GVHD | acute grade 3 or 4 GVHD |
| Class 1 GVHD | 2, 3, 4, 5, 6 | 2, 4, 6 | 3, 4, 5, 6 | 4, 6 | 5, 6 |
| Groups | | | | | |
| Class 1 sample total | n = 96 | n = 61 | n = 76 | n = 41 | n = 39 |
| Class 2 | no GVHD | no GVHD | no GVHD | no GVHD | no GVHD |
| Class 2 GVHD | 1 | 1 | 1 | 1 | 1 |
| Group | | | | | |
| Class 2 sample total | n = 26 | n = 26 | n = 26 | n = 26 | n = 26 |

[0231] In order to identify donor pre-transplant CD4+ T-cell RNA expression profiles predictive of HCT recipient GVHD outcome, conventional single-gene expression analysis was performed, i.e., single-variate, statistical T-tests (i.e., a one-dimensional form of LDA, linear discriminant analysis) (Sheskin, David J. Handbook of Parametric and Nonparametric Statistical Procedures, 3^{rd} Edition, Chapman & Hall/CRC Press, Boca Raton, Fla., 2004, esp. pp. 404-409.) for five 2-class divisions (Table 7), comparing samples from Group 1 (no acute and no chronic GVHD), to various combinations of GVHD-positive Groups.

[0232] Two types of T-tests for each of the 2-class divisions were carried out. One was a standard heteroscedastic, two-tailed T-test. The second was a measured gene expression signal “precision-weighted T-test” (also heteroscedastic, two-tailed) that takes the inherent numerical estimates of Illumina BeadArray measurement errors for each measured gene expression into account as reported in the so-called “bead standard error” variable provided by the Illumina platform (under contract with EA) in the standard IIlumina microarray measurement output file. The equations, and formulas used for the two T-tests are as follows:

[0233] Standard T-Test:

[0234] The 2-class two-tailed heteroscedastic T-test was carried out using class P (positive for GVHD outcome) and N (negative for GVHD outcome) probe signal value averages, ( P̅,̅ N̅), respective unequal variances, (s_{P}², s_{N}²), and respective sample totals per class, (n_{P}, n_{N}), according to the long-established standard statistical equations for the values of t and DF (degrees of freedom), and for which the p-values were determined computationally by invoking standard computer software (Excel or Matlab) T-test functions (i.e., equivalent to looking-up in standard T distribution tables).

$$\begin{matrix}t = \frac{\overline{P} - \overline{N}}{√ \frac{{s}_{P}^{2}}{{n}_{P}} + \frac{{s}_{N}^{2}}{{n}_{N}}} & ( 1 ) \\ D F = \frac{{( \frac{{s}_{P}^{2}}{{n}_{P}} + \frac{{s}_{N}^{2}}{{n}_{N}} )}^{2}}{\frac{{( \frac{{s}_{P}^{2}}{{n}_{P}} )}^{2}}{{n}_{P} - 1} + \frac{{( \frac{{s}_{N}^{2}}{{n}_{N}} )}^{2}}{{n}_{N .} - 1}} & ( 2 )\end{matrix}$$

[0235] Precision-Weighted T-Test:

[0236] The 2-class probe signal measurement precision-weighted T-test was carried using weighted averages, ( P̅_̅{̅w̅}̅, N̅_̅{̅w̅}̅, equations 13 and 14) and unequal compound variances (s_{uP}², s_{uN}², equations 20 and 21) for determining the values of t and DF, using the same fundamental statistical equations as for the standard, two tailed heteroscedastic T-test.

$$\begin{matrix}t = \frac{\overline{{P}_{w}} - \overline{{N}_{w}}}{\sqrt{\frac{{s}_{cP}^{2}}{{n}_{P}} + \frac{{s}_{cN}^{2}}{{n}_{N}}}} & ( 3 ) \\ D F = \begin{matrix}{( \frac{{s}_{cP}^{2}}{{n}_{P}} + \frac{{s}_{cN}^{2}}{{n}_{N}} )}^{2} \\ \frac{{( \frac{{s}_{cP}^{2}}{{n}_{P}} )}^{2}}{{n}_{P} - 1} + \frac{{( \frac{{s}_{cN}^{2}}{{n}_{N}} )}^{2}}{{n}_{N .} - 1}\end{matrix} & ( 4 )\end{matrix}$$

[0237] The weights used in the precision-weighted T-test were determined as described below, based on the reciprocals of the Bead Standard Error (be) provided for each sample from VST processing of the Illumina data. Note: Computed weights as employed average to 1 and sum for each class to the total sample number per class, i.e. n_{P}, N_{N}. This assures that, if all the weights for a class are the same, the weighted expression values and their average will not change from the respective non-weighted values within each class.

[0238] Definition of pre-weight for the i-th sample in each class (pw_{Pi}, pw_{Ni}).

$$\begin{matrix}{pw}_{Pi} = \frac{1}{{be}_{Pi}} & ( 5 ) \\ {pw}_{Ni} = \frac{1}{{be}_{Ni}} & ( 6 )\end{matrix}$$

[0239] Definition of average pre-weight ( p̅w̅_̅{̅P̅}̅, p̅w̅_̅{̅N̅}̅) for each class.

$$\begin{matrix}\overline{{pw}_{P}} = \frac{{\sum }_{i}^{{n}_{P}} b {e}_{Pi}}{{n}_{P}} & ( 7 ) \\ \overline{{pw}_{N}} = \frac{{\sum }_{i}^{{n}_{N}} {be}_{Ni}}{{n}_{N}} & ( 8 )\end{matrix}$$

[0240] Definition of the weight (w_{Pi}, w_{Ni}) for the i-th sample in each class.

$$\begin{matrix}{w}_{Pi} = \frac{{pw}_{Pi}}{\overline{{pw}_{P}}} & ( 9 ) \\ {w}_{Ni} = \frac{{pw}_{Ni}}{\overline{{pw}_{N}}} & ( 10 )\end{matrix}$$

[0241] Determination of Weighted Individual (P_{wPi}, N_{wNi}), and Class Averages ( P̅_̅{̅w̅}̅, N̅_̅{̅w̅}̅) Probe Signal Values.

[0242] Note: This is based on the simple concept of multiplying each sample value (P_{Pi}, N_{Ni}), the sample weight, and then averaging the weighted values for each class.

$$\begin{matrix}{P}_{wPi} = {w}_{pi} \cdot {P}_{Pi} & ( 11 ) \\ {N}_{wNi} = {w}_{Ni} \cdot {N}_{Ni} & ( 12 ) \\ \overline{Pw} = \frac{{\sum }_{i}^{{n}_{P}} {P}_{wPi}}{{n}_{P}} & ( 13 ) \\ \overline{{N}_{w}} = \frac{{\sum }_{i}^{{n}_{N}} {N}_{wNi}}{{n}_{N}} & ( 14 )\end{matrix}$$

[0243] Determination of Weighted Class Variances (s_{wP}², s_{wN}²).

[0244] Note: The concept is that (1) a difference is formed, squared and weighted (dev_{wPi}², dev_{wNi}²) between the measured signal and weighted average (reflecting the variance contribution of each sample), and (2) this weighted, squared deviation (variance contribution) is then averaged to generate a total weighted variance (s_{wP}², s_{wN}²).

$$\begin{matrix}{dev}_{wNi}^{2} = {w}_{Ni} - {[ {( N ]}_{Ni} - \overline{{N}_{w}} )}^{2} & ( 15 ) \\ {s}_{wP}^{2} = \frac{{\sum }_{i}^{{n}_{P}} {dev}_{wPi}^{2}}{{n}_{P} - 1} & ( 16 ) \\ {s}_{wN}^{2} = \frac{{\sum }_{i}^{{n}_{N}} {dev}_{wNi}^{2}}{{n}_{N} - 1} & ( 17 )\end{matrix}$$

[0245] Determination of Bead Variance Contribution to Variance within a Class (s_{beP}², s_{beN}²).

[0246] Note: This is important to reflect overall differences in bead standard errors between the classes. Since for the weighted class variance (s_{wP}², s_{wN}²), all of the weighting so far is restricted within each class, it does not reflect any, or major, differences in bead standard errors per se between the classes, that importantly can contribute to the quantitation of confidence in the separation of the classes.

$$\begin{matrix}{s}_{beP}^{2} = \frac{{\sum }_{i}^{{n}_{P}} {be}_{Pi}^{2}}{{n}_{P} - 1} & ( 18 ) \\ {s}_{beN}^{2} - \frac{{\sum }_{i}^{{n}_{N}} {be}_{Ni}^{2}}{{n}_{N} - 1} & ( 19 )\end{matrix}$$

[0247] Determination of Compound Variance as Sum of Weighted Signal Variance and Bead Variance Contributions to Class Variance.

[0248] By adding these two class-wise variances (s_{be}² and s_{w}²), the confidence in individual sample measurements relative to their measurement error (be) is taken into account (through s_{be}²), as well as the average measurement error of each class (as within-class weighted variance s_{w}²). Therefore, more confidence, resulting in numerically lower (i.e., more statistically significant) and more trust-worthy p-values, will be placed in sample measurements and classes having smaller measurement errors (be).

s_{cP}²=s_{wP}²+s_{beP}² (20)

s_{cN}²=s_{wN}²+s_{beN}² (21)

### Example 4

[0249] This example includes a description of the gene expression analysis and GVHD outcome-prediction of donor HCT.

[0250] Overview and Details on “Class Divisions”, Different Possible Patient GVHD Outcomes, and Tallies of True and False Positive and Negative Computational\Statistical Outcome-Predictive Classification Groups:

[0251] For each class division and probe LDA was carried out (conventional linear discriminant analysis, the associated p-value being equivalent to a T-test when single-variate; Richard O. Duda, Peter E. Hart, & David G. Stork, Pattern Classification, 2^{nd} Ed., John Wiley & Sons, NY, 2001) to obtain predicted GVHD outcome classification accuracies. LDA is used to classify each sample (i.e., donor) as GVHD positive (i.e. induces GVHD in the recipient), or GVHD negative (i.e. does not induce GVHD in the recipient), depending on whether the RNA expression value is above, or below, a threshold (in this particular study, the threshold for LDA was exactly half-way between the averages of the positive and negative GVHD sample RNA expression values from the respective two classes involved). Depending on whether samples are classified computationally\statistically correctly or not, they fall into one of four different categories, or groups (“group” with lower-case “g”, not to be confused with GVHD-related “Group” with upper-case “g”):

1. TN (True Negative), actual GVHD negative sample classified as negative by computation
2. FN (False Negative), actual GVHD positive sample classified as negative by computation
3. FP (False Positive), actual GVHD negative sample classified as positive by computation
4. TP (True Positive), actual GVHD positive sample classified as positive by computation

[0252] The same nomenclature, TN, FN, FP, TP was used to define a classification situation as above, as well as representing either the numbers (i.e., counts) of so classified donors, the usages of which should be clear from the context. The term “sample” is used interchangeably for “donor” or for analyzed quantitative gene expression of a donor in describing the data. Total sample counts are then summed for each group (group with small “g”):

1. TNtot=total TN samples
2. FNtot=total FN samples
3. FPtot=total FP samples
4. TPtot=total TP samples

[0253] The total GVHD negative, Ntot, and GVHD positive, Ptot, samples contributing to the study are sums of occurrences, defined as follows:

### 1. Ntot=TNtot+FPtot

### 2. Ptot=TPtot+FNtot

[0254] Note: An established convention in statistics, classification statistics, and datamining fields is that when “binary” outcome categories are being considered, i.e., “true” or “false”, then a “False Positive” event is counted as a “negative” event because it is not “positive”; hence, the definition of Ntot seen above where FPtot is added to TNtot. Analogously, for “False Negative” events and the definition of Ptot in line 2 immediately above.

### Example 5

[0255] This example includes a description of an exemplary Gene Expression Voting Model, RNA20.

[0256] The RNA20 Voting Scheme of LDA Models:

[0257] For the exemplary RNA20 model (anyGVHD vs. noGVHD division), each of the component RNA marker LDA models provides a yes\no (1\0) prediction, i.e. vote, for the GVHD negative outcome for each sample (each of 20 RNA species' series of GVHD negative votes over the 122 HCT donors is displayed in a separate row in Table 8). All GVHD negative votes across the 20 RNA species are counted for each sample, and divided by the total number of RNA species, i.e., 20, to arrive at the “GVHD negative score”, displayed below the individual marker voting profiles (Table 8).

[0258] A sample is finally classified by this 20 marker model as GVHD negative if the GHVD negative score is above a (user selected) threshold of 0.77, i.e., at least a 77% majority of the total 20 RNA species-based votes is required for a sample to be classified as “GVHD negative” (values in white text and black or dark grey background). Correspondingly, a sample is classified as “GVHD positive” if the GHVD negative score is below a threshold of 0.77 (values in black text and white or light grey background). The GVHD negative score, the total numbers of True Negatives, False Positives and Ntot (Total row), reported for Group 1, and the total numbers of False Negatives, True Positives, and Ptot (Total row), reported for each of the Groups 2 through 6 are shown in Table 8.

TABLE 8
RNA VOTING SCHEME

[chemical structure]

[chemical structure]

[chemical structure]

[chemical structure]

[chemical structure]

[0259] Details on the 20 contributing RNA species and their individual LDA classification performance are listed in Table 9.

TABLE 9
RNA20 LIST

| | | | | | | | | bal | bal | bal |
|---|---|---|---|---|---|---|---|---|---|---|
| | | | | | | | | accuracy | specificity, | negative |
| | | | | p | | | | (TP + TN)/ | true | predictive |
| | | | | precision- | p hetero- | | | (TP + | negative | value |
| | | | Detection | weighted | scedastic | larger | max | FP + | rate TN/ | TN/(TN + |
| ProbeID | Gene Name | SYMBOL | Rank | T-test | T-test | average | average | TN + FN) | (TN + FP) | FN) |
| 3440400 | transmembrane and coiled- | TMCC3 | 21640 | 0.022308 | 0.000005 | N | 0.62 | 0.77 | 0.81 | 0.75 |
| | coil domain family 3 | | | | | | | | | |
| 3450148 | brain-derived neurotrophic | BDNF | 21640 | 0.040604 | 0.000936 | N | 0.67 | 0.72 | 0.73 | 0.71 |
| | factor, transcript variant 6 | | | | | | | | | |
| 4200575 | vesicle-associated membrane | VAMP2 | 1070 | 0.005441 | 0.002226 | P | 2.50 | 0.68 | 0.65 | 0.68 |
| | protein 2 | | | | | | | | | |
| 2940022 | biliverdin reductase A | BLVRA | 4090 | 0.010430 | 0.004310 | N | 1.67 | 0.69 | 0.69 | 0.69 |
| 1850288 | zinc finger CCCH-type | ZC3H7A | 10651 | 0.027973 | 0.000412 | N | 0.88 | 0.70 | 0.73 | 0.69 |
| | containing 7A | | | | | | | | | |
| 7210128 | Notch homolog 2 | NOTCH2 | 6480 | 0.040708 | 0.009368 | N | 1.22 | 0.68 | 0.69 | 0.68 |
| 940398 | eukaryotic translation | EIF3M | 2425 | 0.018840 | 0.004648 | N | 1.93 | 0.71 | 0.77 | 0.68 |
| | initiation factor 3, | | | | | | | | | |
| | subunit M | | | | | | | | | |
| 5220196 | CCCTC-binding factor | CTCF | 6480 | 0.030919 | 0.006569 | P | 1.22 | 0.69 | 0.73 | 0.67 |
| 990315 | t-complex 1, transcript | TCP1 | 3192 | 0.002837 | 0.000206 | N | 1.87 | 0.68 | 0.73 | 0.67 |
| | variant 1 | | | | | | | | | |
| 3370164 | ATPase, Na+/K+ | ATP1A1 | 2425 | 0.017986 | 0.001829 | P | 2.05 | 0.68 | 0.73 | 0.67 |
| | transporting, alpha | | | | | | | | | |
| | 1 polypeptide, | | | | | | | | | |
| | transcript variant 1 | | | | | | | | | |
| 4640689 | eukaryotic translation | EIF4A2 | 227 | 0.005331 | 0.001070 | P | 3.69 | 0.66 | 0.69 | 0.66 |
| | initiation factor 4A, | | | | | | | | | |
| | isoform 2 | | | | | | | | | |
| 3780450 | BTG3 associated nuclear | BANP | 6480 | 0.028352 | 0.017499 | P | 1.14 | 0.70 | 0.77 | 0.67 |
| | protein, transcript | | | | | | | | | |
| | variant 2 | | | | | | | | | |
| 6290392 | serine/arginine repetitive | SRRM1 | 815 | 0.014103 | 0.001962 | P | 2.70 | 0.66 | 0.69 | 0.65 |
| | matrix 1 | | | | | | | | | |
| 6380008 | enhancer of polycomb | EPC1 | 4090 | 0.020545 | 0.000762 | P | 1.56 | 0.69 | 0.77 | 0.67 |
| | homolog 1 | | | | | | | | | |
| 6580553 | ATP-binding cassette, | ABCC5 | 8164 | 0.033021 | 0.000792 | P | 0.87 | 0.67 | 0.73 | 0.65 |
| | sub-family C, member | | | | | | | | | |
| | 5, transcript variant 1 | | | | | | | | | |
| 1240136 | phosphatidylinositol 4- | PI4KAP2 | 2425 | 0.012117 | 0.000972 | P | 1.91 | 0.69 | 0.77 | 0.66 |
| | kinase, catalytic, | | | | | | | | | |
| | alpha polypeptide | | | | | | | | | |
| | pseudogene 2 | | | | | | | | | |
| 5870632 | transmembrane 9 | TM9SF2 | 2425 | 0.007116 | 0.003365 | N | 2.03 | 0.65 | 0.69 | 0.64 |
| | superfamily member 2 | | | | | | | | | |
| 1820482 | NADH dehydrogenase | NDUFB10 | 1849 | 0.005686 | 0.004427 | N | 2.23 | 0.70 | 0.81 | 0.67 |
| | 1 beta subcomplex, | | | | | | | | | |
| | 10, 22 kDa | | | | | | | | | |
| 6380427 | GIPC PDZ domain | GIPC1 | 4090 | 0.019668 | 0.008262 | P | 1.43 | 0.66 | 0.73 | 0.64 |
| | containing family, | | | | | | | | | |
| | member 1, transcript | | | | | | | | | |
| | variant 3 | | | | | | | | | |
| 380575 | ribosomal protein L23 | RPL23 | 489 | 0.011463 | 0.001349 | N | 3.16 | 0.68 | 0.85 | 0.64 |

[0260] Balancing effects due to inherent differences of numbers of donors involved in representing different classifications with respect to True and False Positives and Negatives: In an effort to equally balance numerically the contributions from the GVHD positive and negative sample groups, the relative contributions of all 4 outcome classification groups are determined, balancing for inherent inequalities in the total GVHD positive and negative groups' sizes, i.e., numbers of respective samples involved:

### 1. TNbal=0.5 (TNtot/Ntot)

### 2. FNbal=0.5 (FNtot/Ptot)

### 3. FPbal=0.5 (FPtot/Ntot)

### 4. TPbal=0.5 (TPtot/Ptot)

[0261] The balanced GVHD positive and negative sample contributions now each equal to 0.5, and sum to 1:

### 1. Nbal=TNbal+FPbal=0.5

### 2. Pbal=TPbal+FNbal=0.5

### 3. Pbal+Nbal=1

[0262] Using the 4 balanced outcome classification groups, 5 different balanced outcome prediction performance measurements are determined (from here on below, all usage of the terms TN, FN, FP and TP refer to TNbal, FNbal, FPbal and TPbal, respectively):

### 1. Balanced NPV (Negative Predictive Value)=TN/(TN+FN)

[0263] Fraction of samples that were classified as negative which are truly negative.
   2. Balanced TNR (True Negative Rate) or specificity=TN/(TN+FP)
[0264] Fraction of total negative samples that were correctly classified.

### 3. Balanced PPV (Positive Predictive Value)=TP/(TP+FP)

[0265] Fraction of samples that were classified as positive which are truly positive.
   4. Balanced TPR (True Positive Rate) or sensitivity=TP/(TP+FN)
[0266] Fraction of positive samples that were correctly classified.

### 5. Balanced Accuracy=(TP+TN)/(TP+FP+TN+FN)

[0267] Fraction of total samples that were correctly classified.

[0268] Note: The fundamental definitions of NPV, TNR, PPV, and TPR are standard conventional definitions in statistics, classification statistics, and datamining. The balanced versions hence rely on the standard versions; however, they employ the analogous balanced versions of TN, FN, FP, and TP. From here on below, unless otherwise stated, all usage of the terms NPV, TNR, PPV, TPR and Accuracy refer to Balanced NPV, Balanced TNR, Balanced PPV, Balanced TPR and Balanced Accuracy.

### Example 6

[0269] This example includes a description of gene expression analysis results and prediction of GVHD outcomes, based upon an exemplary RNA20 model.

[0270] All 122 HCTs in the study correspond to HLA 10/10 matched unrelated donor transplantations, reflecting the majority of annual transplantations in the U.S. As discussed, transplant GVHD outcomes were categorized into six different Groups (Table 5).

[0271] Groups are numbered in order of increasing GVHD severity, beginning with Group 1 exhibiting neither acute nor chronic GVHD, and ending with Group 6, showing severe acute grade 3 or 4 GVHD and extensive chronic GVHD. Group 5 also shows grade 3 or 4 GVHD, but no chronic GVHD. Group 4 and Group 3 show grade 1 or 2 acute GVHD, with and without chronic GVHD, respectively. Group 2 shows only chronic GVHD and no acute GVHD. Acute grade 3 or 4 GVHD characterize the most intense and life-threatening form of GVHD, while acute grade 1 or 2 GVHD is much less severe and occasionally may be considered mild. The grade classifications of acute GVHD are multi-symptom diagnostic gradations well-established in medical \oncologic practice for physicians' gradings of GVHD severity, and analogously so for extensive, or not extensive, chronic GVHD. Although the definitions of the Groups are per se, they are medically meaningful GVHD-severity groups established by the experts of the NMDP.

[0272] Gross expression level trends among HCT donors associated with different GVHD Groups:

[0273] To characterize the relationship between donor CD4+ T-cell RNA expression profile and HCT recipient GVHD outcomes, and to distinguish potential biases in the dataset from biologically rooted relationships, the overall behavioral trends of GVHD Group average RNA expression levels as rank orderings over the microarray gene expression probes was analyzed (Table 10). The GVHD Group RNA expression rank order is determined for each gene probe as the rank of the average gene expression level for each of the six Groups in ascending order (i.e., higher levels of expression results in higher rank). The dataset then is separated into two subsets, denoted “N>PSubset” and “P>NSubset”, according to whether the average RNA expression of the GVHD negative samples (Group 1) is higher, or lower, than for the GVHD positive samples (Groups 2 though 6), respectively. For each of these two subsets, the median GVHD Group RNA expression rank, i.e. the “Rank”, is determined within two differently defined sets of probes, i.e., (1) comprising all 48,803 probes, i.e. the “N>P Total Subset” and “P>N Total Subset”, and (2) comprising a select subset of 1024 probes having T-test p-values<=0.05 for both heteroscedastic T-tests and precision-weighted T-tests as previously described. Such is carried out for the anyGVHD vs. noGVHD class division (Table 6), i.e. the “N>P Select Subset” and “P>N Select Subset”.

TABLE 10
GROUP ORDER

| | | GVHD negative > | | | | | | |
|---|---|---|---|---|---|---|---|---|
| | | GVHD positive | | | | | | |
| | | average expression | | | | | | |
| | | N > P Rank | N > P Rank | N > P Rank | N > P Rank | N > P Rank | N > P Rank | Pearson R |
| | | G1: | G2: | G3: | G4: | G5: | G6: | R: |
| | | a-no&c- | a-no&ex- | a-12&no- | a-12&ex- | a-34&no- | a-34&ex- | Rank series, |
| | | noGVHD | cGVHD | cGVHD | cGVHD | cGVHD | cGVHD | G1-6 |
| | | (26) | (20) | (20) | (17) | (15) | (24) | order |
| Total 48803 probes | median | 5.0 | 3.0 | 3.0 | 3.0 | 3.0 | 3.0 | −0.65 |
| precision-weighted AND | median | 6.0 | 4.0 | 4.0 | 3.0 | 2.0 | 2.0 | −0.95 |
| heteroscedastic T-test | | | | | | | | |
| p-value cutoff <=0.05 | | | | | | | | |

| | | GVHD positive > | | | | | | | | | | |
|---|---|---|---|---|---|---|---|---|---|---|---|---|
| | | GVHD negative | | | | | | | | | | |
| | | average expression | | | | | | | | | | |
| | | P > N | P > N | P > N | P > N | P > N | P > N | | | | | |
| | | Rank | Rank | Rank | Rank | Rank | Rank | Pearson R | | | | |
| | | G1: | G2: | G3: | G4: | G5: | G6: | R: Rank | | | | |
| | | a-no&c- | a-no&ex- | a-12&no- | a-12&ex- | a-34&no- | a-34&ex- | series, | | | | |
| | | noGVHD | cGVHD | cGVHD | cGVHD | cGVHD | cGVHD | G1-6 | | | | |
| | | (26) | (20) | (20) | (17) | (15) | (24) | order | | N > P | P > N | total |
| Total 48803 probes | median | 2.0 | 4.0 | 4.0 | 4.0 | 4.0 | 4.0 | 0.65 | total | 21790 | 27013 | 48803 |
| precision-weighted | median | 1.0 | 2.0 | 4.0 | 4.0 | 5.0 | 4.0 | 0.85 | total | 197 | 118 | 315 |
| AND hetero- | | | | | | | | | | | | |
| scedastic T-test | | | | | | | | | | | | |
| p-value cutoff <= | | | | | | | | | | | | |
| 0.05 | | | | | | | | | | | | |

[0274] For the N>P Total and Select Subsets, the Rank (median RNA expression rank) for Group 1, compared to each of the Group 2 to Group 6 Ranks, is consistently greater for the N>P Subset, without exception. Likewise, for the P>N Total and Select Subsets, the Rank for Group 1, compared to each of the Group 2 to Group 6 Ranks, is consistently smaller for the P>N Subset, without exception. (Table 10). Note that the selection criteria for the N>P and P>N subsets are restricted to comparing the average of Group 1 to the average of the combined samples of Groups 2 to 6, and not the individual averages for Groups 2 to 6. Therefore, (1) the applied selection criteria for the N>P and P>N Subsets do not necessarily guarantee that the Ranks of Groups 2 to 6 need uniformly to be greater or smaller than the Group 1 Rank, and (2) the fact that they actually are, demonstrates that there is no strong bias within any one of the Group 2 to 6 members that would place its Rank on the other side of the Group 1 Rank compared to the other Group 2 to Group 6 Ranks.

[0275] Furthermore, for the N>P Total Subset and P>N Total Subset, the Ranks for Groups 2 to 6 are all the same, demonstrating a high-level of uniformity of the Groups 2 to 6 Ranks over all the surveyed 48,803 microarray probes (Table 10). In contrast, for the select 1,024 GVHD outcome associated probes, the Rank order within Groups 2 to 6 shows a clear descending trend from Rank 4 to 2 for the N>P Select Subset, and ascending trend from Rank 2 to 5 within the P>N Select Subset, in parallel to increasing GVHD Group number and associated severity of GVHD. This deviation from the Group 2 to 6 Rank uniformity (observed above for the total set of 48,803 probes) is not indicative of an arbitrary bias. Rather, it signifies an ordered, parallel trend, where magnitude of gene expression correlates with severity of GVHD, measurably evidenced in very high magnitude Pearson correlations (R) of −0.95 for the N>P Select Subset, and +0.92 for the P>N Select Subset, between Rank order and GVHD Group number.

[0276] To summarize, the key insight from the strong correlation of GVHD Group disease severity order with Rank (median RNA expression rank) order for the 1,024 probes of the N>P Select Subset and P>N Select Subset (Table 10), is that the selection of these probes according to T-test performance for the anyGVHD vs. noGVHD class division, did not per se select for any orderings or distinguishing features within the 5 GVHD positive Groups 2 to 6. This is because the samples of Groups 2 to 6 were simply pooled for the T-test analysis, thereby losing all information on specific GVHD positive Group sources. Therefore, the observed Rank order within the GVHD positive Groups is an inherent, natural biological property exhibited by this select set of RNA profiles, independent of the means by which the probes were selected in the statistical analysis. In other words, the strong Pearson correlations of the Group 2 to 6 Ranks with the GVHD Group numbers could not have been inadvertently imposed by the analysis and processing of the data as statistical artifact, but indeed reflects the workings of specific molecular profiles underlying the Ranks and their association with actual biologically manifested GVHD intensity.

[0277] GVHD Outcome Prediction Revealed No Transplant Center-Associated Biases:

[0278] Below as concrete examples, the GVHD-outcome predictive behavior and sample transplant center source distributions for two specific individual RNA expression predictors were examined. In particular, “CTCF” (CCCTC-binding factor), for which expression levels tend to increase with GVHD intensity; “BLVRA” (biliverdin reductase A), for which expression levels tend to decrease with GVHD intensity; and “RNA20” (component RNA species listed in Table 9), an exemplary 20 RNA expression set “voting” model (METHODS and Table 8).

[0279] RNA expression measurement values are plotted for all 122 samples in ascending order for each of the six GVHD outcome classes, and labeled according to the samples' transplant center sources (TCS) (FIGS. 5-7, CTCF TCS, BLVRA TCS, RNA20 TCS). Transplant centers providing at least 4 samples are labeled with separate colors (n=85), centers providing 2-3 samples are labeled by triangles (n=13), and centers providing only one sample each are labeled by squares (n=24). Each data point is also labeled with the number of the transplant center (actual names of the centers were thus far blinded), followed by the numbers of samples provided by that center after the dash. Note in all three examples (CTCF, BLVRA and the RNA20 model), samples from multi-center and single center sources appear to be evenly distributed, and show no clustering within specific expression value ranges, or association biases toward specific GVHD outcome groups. In spite of any potential variations introduced by the different transplant centers that might distort or bias the gene expression assays or GVHD outcome attribution, each of these three concrete examples shows strong GVHD outcome prediction capability in terms of T-test performance and LDA accuracy measures (Table 11).

TABLE 11
PERFORMANCE

| | RNA marker or set | | | | | | |
|---|---|---|---|---|---|---|---|
| | CTCF | BLVRA | Select 20 | Select 20 | Select 20 | Select 20 | Select 20 |
| | GVHD outcome class division | | | | | | |
| | anyGVHD | anyGVHD | anyGVHD | cGVHD vs. | aGVHD vs. | a&cGVHD | a34GVHD |
| | vs. noGVHD | vs. noGVHD | vs. noGVHD | noGVHD | noGVHD | vs. noGVHD | vs. noGVHD |
| Post-test GVHD risk percentage FN/(TN + FN) | 33% | 31% | 6% | 5% | 6% | 4% | 0% |
| Post-test GVHD risk reduction Ptot − | 17% | 19% | 44% | 45% | 44% | 46% | 50% |
| FN/(TN + FN) | | | | | | | |
| Post-test relative GVHD risk reduction | 35% | 38% | 88% | 90% | 89% | 93% | 100% |
| [Ptot − FN/(TN + FN)]/Ptot | | | | | | | |
| Negative Predictive Value TN/(TN + FN) | 0.67 | 0.69 | 0.94 | 0.95 | 0.94 | 0.96 | 1.00 |
| True Negative Rate (specificity) TN/(TN + FP) | 0.73 | 0.69 | 0.65 | 0.65 | 0.65 | 0.65 | 0.65 |
| | | | | | | 0.31 | |
| Positive Predictive Value TP/(TP + FP) | 0.71 | 0.69 | 0.73 | 0.74 | 0.74 | 0.74 | 0.74 |
| True Positive Rate (sensitivity) TP/(TP + FN) | 0.65 | 0.69 | 0.96 | 0.97 | 0.96 | 0.98 | 1.00 |
| Accuracy (TP + TN)/(TN + FN + FP + TP) | 0.69 | 0.69 | 0.81 | 0.81 | 0.81 | 0.81 | 0.83 |
| p heteroscedastic T-test | 6.57E−03 | 4.31E−03 | 1.10E−08 | 2.53E−08 | 2.93E−09 | 5.81E−09 | 1.66E−09 |

[0280] Outcome Prediction Observations with Respect to Different RNA Models CTCF, BLVRA and RNA20:

[0281] In another series of plots, samples are labeled according to the six GVHD outcome Groups, and the average RNA expression value for each Group is superimposed to specifically illustrate increasing or decreasing trends of gene expression with GVHD outcome Group number, and concomitant GVHD clinical intensity. In FIG. 8 (CTCF GROUPS) we observe a steady, monotonously increasing series of GVHD Group average with GVHD Group number. FIG. 9 (BLVRA GROUPS) illustrates a steady downward trend of GVHD Group average with GVHD Group number. Note the absence of very low, detection limit values in Group 1, and absence for very high values in Group 6, representing the most severe forms of GVHD.

[0282] In FIG. 10 (RNA20 GROUPS), plotting the relative score of GVHD negative votes from 20 well-performing individual LDA models, there is a steady downward trend of GVHD Group average score with increasing GVHD severity. Notable is the much larger gap between the average of the no GVHD group (Group 1) and the averages of the five GVHD positive groups (Group 1 through Group 6) (Nomenclature Reminder: A class can comprise one Group, typically Group 1; another Class can comprise several Groups, e.g., the class representing “anyGVHD” comprises Groups 2 to 6).

[0283] Sample-specific GVHD outcome prediction for anyGVHD vs. no GVHD (Table 6) is plotted in detail for the LDA models corresponding to the two individual RNA expression markers, and the 20 RNA marker voting model in FIGS. 11-13 (CTCF LDA, BLVRA LDA and RNA20 LDA-A). Essentially, samples are classified as being in the GVHD negative or positive class depending on whether their expression level falls on the same side (above or below) the separatrix as the average observed expression of that class, i.e. in FIG. 11 (CTCF LDA) samples are classified as GVHD negative below the separatrix, and in FIGS. 12 and 13 (BLVRA LDA and RNA 20 LDA) samples are classified as GVHD negative above the separatrix. Then depending on whether these classifications are correct, or incorrect, compared to the known, true class of the sample, each sample is then scored as either TN (True Negative), FN (False Negative), FP (False Positive), or TP (True Positive). As shown in FIGS. 11 and 12 (CTCF LDA, and BLVRA LDA), the vast majority of GVHD positive samples is classified correctly, but many of the negative samples are classified incorrectly (False Positives). Part of this asymmetry is a direct result of the overall asymmetrical representation of numbers of positive samples (n=96) and numbers negative samples (n=26) involved, i.e., even give a minor relative False Negative classification rate (False Negatives representing positive samples), this rate would be multiplied by 96/26=3.7 fold to arrive at the estimated observed number of positive samples misclassified as negative. Remarkably, in FIG. 13 (RNA20 LDA-A), even given the asymmetrical representation of positive and negative samples, there are only 4 GVHD positive samples misclassified as negative (NPV=0.94). This demonstrates that a simple voting scheme of 20 well-performing RNA expression LDA models is able to overcome most misclassifications that may be due to various sources of arbitrary signal variation and noise.

[0284] Note that the exemplary RNA20 voting scheme reflects a simple aggregation of GVHD negative predictions, i.e. votes, for each of the 20 component RNA marker RNA models, combined with a GVHD negative prediction threshold of “at least a 77% majority of the GVHD negative votes is required for a sample to be classified as GVHD negative” (see METHODS and Table 7).

[0285] Essentially, the voting scheme is designed to overcome the limitations and error sources of each of the component markers by incorporating the information of 20 of them, and also provides flexibility in defining the stringency of GVHD negative outcome predictions through setting of the voting threshold. For example, the threshold value of 0.77 used here was manually selected to minimize False Negatives and maximize the Negative Predictive Value, while maintaining a relatively high number of True Negatives and high TNR (FIG. 18, RNA20 LDA PERFORMANCE-A). Correspondingly, in Table 7 very low numbers of False Negatives classified by the exemplary RNA20 model for each of the six GVHD groups was consistently observed. Note that for both Groups 5 and 6, totaling 39 samples originating from 24 different U.S. clinical centers, not a single False Negative prediction was observed. For clinical application, it is highly desirable to have low False Negative Rates, i.e., it is highly desirable to have a very low rate of declaring a donor suitable for HCT before transplantation so as to not induce GVHD, when in fact after transplantation, the patient unfortunately does present GVHD due to the donor HCT.

[0286] In addition to predicting well any GVHD vs. no GVHD outcomes, the 20 RNA expression LDA voting model also performs as well or better for distinguishing different types and intensities of chronic and acute GVHD from no GVHD outcomes (see Tables 6 and 11). For distinguishing chronic GVHD (alone or in combination with any form of acute GVHD) from no GVHD outcomes (cGVHD vs. noGVHD), only 2 False Negative classifications were reported (FIG. 14, RNA20 LDA-B) (NPV=0.95). For distinguishing any form of acute GVHD (alone or in combination with chronic GVHD) from no GVHD outcomes (aGVHD vs. noGVHD), only 3 False Negative classifications were reported (FIG. 15, RNA20 LDA-C) (NPV=0.94). For distinguishing chronic GVHD in combination with acute GVHD (in any form) from no GVHD outcomes (a&cGVHD vs. noGVHD), only 1 False Negative classification was reported (FIG. 16, RNA20 LDA-D) (NPV=0.96). Notably, for distinguishing the most severe forms of grade 3 or 4 acute GVHD (alone or in combination with chronic GVHD) from no GVHD outcomes (a34GVHD vs. noGVHD), not a single False Negative classification was reported (FIG. 17, RNA20 LDA-E).

### Example 7

[0287] This example includes a summary of GVHD outcome prediction performance.

[0288] Summary of GVHD Outcome Prediction Results:

[0289] The numerical outcome classification results for all of the single and 20 RNA marker models described above are summarized in Table 11. LDA outcome predictive measures are based on balanced LDA models, adjusted to represent an equal number of samples-wise contribution of GVHD negative and positive outcome samples (as described in Methods). While class discriminating T-test p-values of 6.6E-03 and 4.3E-03 (notation: xEy means standard scientific notation x times 10̂y) are reported for the single variable models for the anyGVHD vs. noGVHD division, the p-value for the 20RNA marker model is several orders of magnitude smaller, i.e. 1.1E-08. For the single RNA marker models, an overall Accuracy is reported of 69%, while for the 20 marker models, accuracies are much higher, in the 81-83% range.

[0290] Of the greatest potential clinical significance is the increase in the Negative Predictive Value (NPV) from 67-69% in the single marker models to >90% for the RNA20 voting models. The NPV represents how many of the samples that were classified as GVHD negative are truly negative. For example, using the data of this study, with an NPV of 100% for the a34GVHD vs. noGVHD outcome prediction, and if only donors were used that would be classified as GVHD negative using this model, none of such transplants would experience acute grade 3 or 4 GVHD. This would correspond to a complete, 100% elimination of GVHD occurrence based on the ˜50% GVHD incidence currently observed. This is a significant improvement over selecting HCT donors on the basis of HLA matching with an HCT recipient.

[0291] Trade-offs in outcome-prediction are possible through deliberate re-setting of thresholds (i.e., re-positionings of separatrices): When examining accuracy measures in LDA models for GVHD outcome prediction, gains in one performance measure may mean losses in another performance measure, depending on where the separatrix is positioned. For the exemplary RNA20 model, as the Negative Predictive Value (NPV) increases, the True Negative Rate (TNR, Specificity) decreases (FIG. 18, RNA20 LDA PERFORMANCE-A). Note: Such “detector threshold-dependent” tradeoff phenomena are well known generally and often summarized as “ROC” curves (Receiver Operating Characteristic curves). As more of the samples classified as GVHD negative turn out to be truly negative (NPV), the fewer of the total negative samples are classified correctly (TNR). In other words, the cost or price for minimizing the number of GVHD positive transplantations that are mistakenly classified before transplantation as negative, is that in a clinical context some donors leading to GVHD negative transplantations would be omitted. However, in the exemplary RNA20 model, in which the separatrix is positioned at a relative GVHD negative voting score of 0.77, a 94% NPV is obtained in combination with a 65% TNR. In other words, to be 94% certain to avoid GVHD, one would need to accept the loss of 35% of donors that would have been misclassified as GVHD positive. However, no substantial harm would be done, except for the loss of a candidate HCT donor. The detailed behavior of all 5 LDA accuracy measures, also including Positive Predict Value (PPV) and True Positive Rate (TPR, Sensitivity), is shown in FIG. 19, RNA20 LDA PERFORMANCE-B.

### Example 8

[0292] This example includes a description of using gene expression ratios to normalize or standardize values for comparison in GVHD outcome determination and prediction.

[0293] In analytic chemistry, physics, and quantitative measurement ratiometric assays can be more accurate than analogous assays employing only one analyte or measured quantity. An inherent accuracy advantage of a ratiometric assay, when it has an advantage, it that it is substantially self-calibrated against some reliable reference standard when the measurement is reported as a ratio of a signal of interest to a germane reference signal measured for the same sample using the same instrument.

[0294] Generally speaking, a ratiometric assay can involve (i) the ratio of a measured quantity A of interest divided by a measured reference value for A, (ii) the ratio of two distinct different (whether related or independent) measured quantities A and B, or more elaborate ratios such as, but not necessarily limited to, the ratio of A to a reference value of A divided by a ratio of B to a reference value of B, (iii) ratios of the kind described in points (i) and (ii) wherein the numerator and denominators are respectively differences between a measured signal and the measured background signal, (iv) combinations of more than one ratios of the kind described in points (i) through (iii).

[0295] The reliability of prediction or discrimination of two different outcomes is better when based on a ratiometric assay using a two analytes or predictors as a ratio rather than using two separate single-analyte assays. This phenomena of increased accuracy when in ratiometric form occurs when the contrast between two different outcomes (i.e., assessments or as predicted outcomes) is inherently enhanced when considering a ratio. For example, suppose outcome 1 archetype is characterized by the expression of gene A being high and the expression of gene B being low; whereas outcome 2 archetype is characterized by the expression of gene A being low and the expression of gene B being high. In situations of that kind, then typically the ratio of expressions A to B will be more accurate, and more sensitive, in discriminating one outcome vs. another, or in predicting one outcome rather than another, when the gene expression ratio is used rather than when using one gene alone or both genes separately.

[0296] Again, ratiometric assays of gene expression (i.e., gene expression ratios) can be formulated either as (i) a ratio of an expression of particular gene of interest (i.e., a predictor gene) relative to a housekeeping gene, or relative to a summary value assessed across a set of housekeeping genes, or (ii) as the ratio two different particular gene expressions of interest, i.e., as the ratio of two different predictor gene expressions. As explained above, version (i) has properties of intrinsic self-calibration of the measurement of the predictor, and (ii) has self-calibration properties and intrinsic increase of contrast relative to two different contrasting outcomes of interest (as described above).

[0297] One clear advantage of ratios over separate measurements, when it occurs, is when measurements are scaled by undetermined multiplicative factors, or gain, that are constant for a given instrument on which the measurements are made, then ratios are more accurate—especially with respective to differences from threshold values—than individual measurements. This is because a constant (albeit unknown) multiplicative scale factor cancels equally from both numerator and denominator in a ratio of two measurements.

[0298] There also are advantageous measurement noise-cancellation (technical, systemic, or biological noise or random variation) properties of ratios that are possible in some situations for ratios that are advantages not available to single gene (single predictor) measurements used separately. In particular, if on the average the expression of two different genes are anti-correlated, (i.e., when one tends to increase, the other tends to decrease, or vice-versa), then when re-cast in logarithmic form (or logarithmic-like form, e.g., inverse hyperbolic sine transformed), then the quasi-random noise components of the two separate gene expression measurements tend to cancel when the two gene expression measurements are fundamentally composed as a ratio. This is a general mathematical, or arithmetic, or statistical phenomenon (i.e., not confined only to gene expression) sometimes known as “the method of antithetic variables” (C Eisenhart & M. Zelin, Elements of Probability, Ch. 12, in EU Condon & H Odishaw, eds., Handbook of Physics, McGraw-Hill Book Co., NY, 1958, pp. 1-143; P. Kevin MacKeown, Stochastic Simulation in Physics, Springer-Verlag, Singapore, 1997, esp. p. 21 & p. 212) where in the sum of two variables has less noise or variance than the sum of the noise or variance of each variable separately when the two variables are anti-correlated.

[0299] When logarithm, or a quasi-log functions such as inverse hyperbolic sine, of a ratio is used, then the log ratio becomes the log of the numerator minus the log of the denominator. If the numerator and denominator variables are more or less negatively correlated, then the “antithetic variables” partially cancel noise, or a reduction in variance occurs. That is, the phenomenon of partial cancellation of noise through “antithetic variables” is an additional side-advantage that can be obtained when ratiometric measurements are employed.

### Example 9

[0300] This example includes a description of prediction of GVHD risk on a continuous scale or score or index, based on measured expression levels of single or multiple predictor genes.

[0301] Gene expression measurements of predictor genes, or expression ratios involving predictor genes and a reference gene (e.g., housekeeping gene), or expression ratios of two different predictor genes in HCT donors represent in principle a continuum of numerical values. Each such measurement values, or interval or values, or range of values (from the continuum) can be associated, in an experimentally \computationally \statistically evidence-based way, with a particular predicted risk before transplantation that the donor's HCT will induce GVHD, or not induce GVHD, in the HCT recipient (patient) after transplantation.

[0302] A single example of such a risk of GVHD number or value could be a threshold reference expression measurement value, below or above which, the risk of GVHD occurring will be below or above a certain probability, or vice-versa; which in turn can be described as low or high risk of GVHD. GVHD outcome prediction essentially can be then carried out in two ways: (1) as reporting a high or low GVHD risk, or reporting a specific probability or interval or range of probability; or (2) as a value on a continuum of GVHD probabilities or GVHD risk scores. Such risk scores, which are considered to be coming from a continuum, under a GVHD outcome predictive mathematical\statistical \numerical model applied to measured gene expressions could be implemented through use of straight-forward mathematical formulas or from pre-computed numerical look-up tables that capture the same numerical input (gene expressions)-to-output (risk of GVHD) mappings or behaviors as would a mathematical formula.

[0303] Moreover, measured expression values involving multiple different genes, or multiple expression ratios, may be combined further in multiple ways—such as simple arithmetic addition or addition with re-scaling by pre-defined constants, or other straight-forward and clear mathematical operations, to arrive at a continuous-valued output variable that can be associated with a continuum of GVHD risk, or GVHD probability, or GVHD risk scores, etc., or indeed threshold reference values for specific defined GVHD risks or GVHD probabilities.

[0304] Also, expression measurement values of GVHD outcome predictive genes, or ratios involving such predictive genes and reference (e.g., housekeeping) genes, or ratios involving two different genes, each separately can cast a high-GVHD-risk vote (e.g., numerical value=1 or a little less than 1), or a low-GVHD-risk vote (e.g., numerical value=0 or little larger than 0), and these votes from a set of such measurements or ratios of measurements can be added together to form an overall voting score or index. The voting score or index can be considered to be form a continuum, or quasi-continuum, ranging between 0 and 1. Such a voting score of index then can be associated with a continuum of GVHD risks or GVHD probabilities, or fall above or below certain pre-defined threshold values for likely or unlikely GVHD, or fall into pre-defined intervals (partitioning the score range between 0 and 1) that qualitatively report degrees of GVHD risk.

### Example 10

[0305] This example includes a description of the analysis of an additional 120 donor PBMC (peripheral blood mononuclear cells) samples, combined with the 122 donor PBMC samples described above, resulting in a total of 242 donor PBMC samples, with corresponding recipient GVHD histories to identify GVHD predictor genes.

[0306] Conventional computational cross-validation was applied as an approach to assess the outcome predictive performance of single genes and voting schemes. To assist ranking genes among one another for outcome predictive capability, a form of constrained linear discriminant analysis was employed as well to assess genes' performance on discriminating different degrees of GVHD vs. no GVHD across the set of patients associated with their respective donor.

[0307] As a result of the advanced computational statistical analysis listed above having been carried out on a total of 242 donor sample gene expression profiles with GVHD outcome information (120 new donor samples added to the initial 122 donor samples analyzed as discussed in detail above), an additional set of 121 genes were identified as GVHD outcome predictors. In addition, 23 genes were identified as housekeeping (“HSK”) genes (including the eukaryotic translation initiation factor 4H (EIF4H) transcript variant 1 gene previously listed as a predictive gene based on analysis of the initial 122 samples). In total, 143 new genes (Table 2A, RNA143) were identified as diagnostic test candidate genes (121 outcome predictor genes, 22 housekeeping genes, all also fully listed in the RNA192 list, Table 2B), that were not included in the results of the initial analysis of 122 samples and therefore not included in the prior RNA1546 list. As a result of a more in-depth analysis of the complete 242 donor sample/GVHD history dataset, 192 genes (Table 2B, 169 predictive genes and 23 housekeeping genes) have now been selected as an exemplary “RNA192” list of the genes for further high fidelity RT-PCR gene expression assays.

### Example 11

[0308] This example includes a description of real-time, reverse transcription (RT) quantitative polymerase chain reaction (PCR) measurement of candidate N and P predictor gene expression, and N and P predictor gene expression data.

[0309] For applications in human medical diagnostics, RT-PCR (Reverse Transcription Polymerase Chain Reaction) for gene expression measurement, such as implemented in the TaqMan real-time RT-PCR platform (ABI, Applied Biosystems Inc.), is considered to be the “gold standard” for high-fidelity quantitative gene expression level assessment, compared to the generally deemed to be less accurate and less sensitive microarray gene expression analysis (such as used for the survey of mRNA levels described herein from GVHD donor samples using the IIlumina HT12 v3.0 microarray platform covering ˜48,000 different gene-specific probes).

[0310] Real-time RT-PCR (Reverse Transcription Polymerase Chain Reaction) gene expression data was acquired for 192 specified genes (listed in Table 2B as “RNA 192”) and 180 different donor frozen blood samples. Conventional TaqMan platform was employed, using 100 ng cDNA per reaction (cDNA being derived from the RNA samples acquired as described above). Each gene is defined by a unique primer according to an off-the-shelf TaqMan assay ID (ABI, Applied Biosystems Inc.). The technically pre-validated commercially available TaqMan assays define the nucleotide sequences of the gene-specific primers and hydrolysis probes; however, the exact nucleotide sequences are proprietary to ABI. ABI TaqMan assays have been optimized by ABI to result in a PCR amplification efficiency (E) of E=2.

[0311] The following is conventional and an industrial standard, essentially in commoditized use for many years: RT-PCR involves an initial RT (reverse transcription) step, which converts the RNA to cDNA, which is followed by PCR (polymerase chain reaction) amplification of the cDNA. Real-time RT-PCR involves the use of gene sequence specific internal hydrolysis probe, in addition to the gene sequence-specific primers. The internal hydrolysis probe contains nucleotides that are chemically modified with fluorescence probes, which deliberately quench each other's fluorescence when placed in close proximity on the hydrolysis probe strand. When the internal hydrolysis probe binds to a single strand of amplified, gene specific cDNA, the 5′-3′ exonuclease activity of the thermo-stable DNA polymerase used in PCR breaks up the hydrolysis probe into its constituent nucleotides. As these fluorescently labeled constituent nucleotides are released, they no longer quench each other, and a quantifiable fluorescence signal proportional to the gene-specific mRNA copy number (but as cDNA starting amount) emerges in the RT-PCR reaction. This signal increases proportionally in a gene-specific fashion to the amount of cDNA amplified.

[0312] The TaqMan measurement output reports for each sample and each gene a Cₜ value, defined as the RT-PCR cycle number at which a pre-defined fluorescence signal (STV, signal threshold value) of the assay is achieved. All instrument-level Cₜ value measurement output data will from now on be referred to here as RWCT, i.e. “raw Cₜ”. The RWCT value is inversely proportional to the concentration of the starting amount of the cDNA (because the smaller the initial cDNA starting amount, the more RT-PCR cycles, i.e., the greater is Cₜ, necessary to reach STV).

[0313] Determining the original amount of starting material before PCR amplification, i.e., S (signal), is carried out according to the following literature and established in-practice equation, expressed in logarithmic form (log is always defined as log₁₀, i.e. logarithm on base 10):

log S=log STV−Cₜ*log E

where:
S=Initial signal or amount of gene in sample (which is to be imputed by the assay);
STV=Signal Threshold Value of gene amplification for determining Cₜ (predefined); and
E=Efficiency of PCR amplification (thoroughly checked by PBD to be essentially equal to 2).

[0314] The term “UNDETERMINED” is assigned conventionally for RWCT values >40 in the TaqMan output, since signals above 40 cycles are not considered reliable, i.e., too many amplification cycles are needed to reach STV. Standard real-time RT-PCR practice terminates the amplification procedure at 40 cycles.

[0315] For the analysis used herein, RWCT values <20 are labeled as OUTLIERS, since they are suggestive of unrealistically high gene-specific initial amounts that therefore should not be considered as a reliable assay output.

[0316] As implemented herein, RT-PCR data pre-processing in 4 steps to arrive at RRCF values, on which GVHD outcome prediction determinations are based. Note: RRCF is defined as “RT-PCR, Relative, log signal, E=2, Clear, with Floor values replaced”.

1. Replacement of OUTLIER values:
[0317] RCTC (RT-PCR, Cₜ, Clean)
[0318] All OUTLIER values are replaced with the median RWCT value of the gene over all 180 samples in the dataset. “Clean” refers to OUTLIER values having been substituted with the median.
   2. Generation of logarithmic RT-PCR signal for PCR efficiency E=2:
[0319] RL2C (RT-PCR, Log signal, E=2, Clean)
[0320] RL2C values are calculated from RCTC values according to the following equation:

RL2C=log STV−RCTC*log(2)
[0321] Note: log STV=14, i.e. log STV is defined by PBD to equal 14 in arbitrary units (there is no existing convention in RT-PCR practice that recommends a particular unit or scaling), in an effort to generate RT-PCR output values to be in a numerical range comparable to the processed Illumina microarray data leading the GVHD predictive gene lists in the P2 filing.
   3. Replacement of UNDETERMINED “floor” values:
[0322] RL2F (RT-PCR, Log signal, E=2, clean, Floor values replaced)
[0323] UNDETERMINED “floor” values are substituted by the following value (representing the RL2C value for RCTC=40):

RL2F(for UNDETERMINED values)=[14−40*log(2)]=1.95880017344075

4. Relative (relative quantitation) RT-PCR signal through correction of background signal by subtraction of relative average signal of housekeeping (HSK) genes:
[0324] RRCF (RT-PCR, Relative, log signal, E=2, Clean, Floor values replaced)
[0325] Relative quantitation of the RT-PCR signal through correction of background signal is carried out by subtraction of the relative average signal of 6 housekeeping (RHSKAG6) genes of each sample according to the following equation:

RRCF=RL2F−RHSKAG6
[0326] Note: RHSKAG6 is defined for each sample as the Relative HSK Average signal of 6 PBD-selected HSK genes (HSK6), centered at zero over all 180 RHSKAG6 values:

RHSKAG6=HSKAG6−AVGHSKAG6
[0327] AVGHSKAG6 is defined as a constant, representing the average value of all 180 sample-specific determinations of HSKAG6.
[0328] HSKAG6 is defined for each sample as the average of the 6 housekeeping gene RL2F values.

[0329] Definition of Exemplary 6 Housekeeping Genes (HSK6) for Determination of HSKAG6 Value Used for RRCF Determination:

[0330] Table 12 details the HSK6 list, used for HSKAG6 and RHSKAG6 determination (also see above):

RHSKAG6=HSKAG6−[average HSKAG6 over all 180 samples]

TABLE 12
List of 6 housekeeping genes (“HSK6”) used for relative quantitation of RRCF RT-PCR signal

| | | | | | | P2 PBD | |
|---|---|---|---|---|---|---|---|
| Gene 175 | RNA192 | ACCESSION BASIC | | ABI Gene | | performance | P2 Dx |
| index | Index | (without decimal) | ABI Assay ID | Symbol | ABI Gene Name | rank | function |
| 158 | 175 | NM_032195 | Hs00371372_m1 | SON | SON DNA binding protein | 06HSK | HSK |
| 159 | 176 | NM_016061 | Hs00763191_s1 | YPEL5 | yippee-like 5 (Drosophila) | 07HSK | HSK |
| 160 | 177 | NM_013379 | Hs01115161_m1 | DPP7 | dipeptidyl-peptidase 7 | 08HSK | HSK |
| 162 | 179 | NM_001033112 | Hs00212868_m1 | PAIP2 | poly(A) binding protein | 11HSK | HSK |
| | | | | | interacting protein 2 | | |
| 166 | 183 | NM_018064 | Hs00363236_m1 | AKIRIN2 | akirin 2 | 15HSK | HSK |
| 173 | 190 | NM_030914 | Hs00229455_m1 | URM1 | ubiquitin related modifier 1 | 23HSK | HSK |

[0331] Selection of 175 Genes that Meet Initial QC Criteria from Total Set of 192 Genes in Table 2B:

[0332] The definition herein for the fundamental QC (quality control) criterion that a gene must have been detected (i.e. not have UNDETERMINED, RWCT>=40 values) in >=55% of the data samples. Table 13 lists the 175 genes (“SG175”) of the total set of 192 genes listed in Table 2B that may be considered for further analysis.

TABLE 13
List of exemplary 175 genes (SG175) from total set of 192 genes that meet detectability QC criterion

| | Table 2B, | ACCESSION | | ABI | | P2 PBD | | |
|---|---|---|---|---|---|---|---|---|
| Gene 175 | RNA192 | BASIC | ABI | Gene | ABI | performance | P2 Dx | P2 |
| index | Index | (without decimal) | Assay ID | Symbol | Gene Name | rank | function | Direction |
| 1 | 1 | NM_030938 | Hs00229548_m1 | TMEM49 | transmembrane protein 49 | 001N | PRD | N |
| 2 | 2 | NM_014232 | Hs00360269_m1 | VAMP2 | vesicle-associated membrane | 001P | PRD | P |
| | | | | | protein 2 (synaptobrevin 2) | | | |
| 3 | 3 | NM_000024 | Hs00240532_s1 | ADRB2 | adrenergic, beta-2-, receptor, | 002N | PRD | N |
| | | | | | surface | | | |
| 4 | 4 | NM_004538 | Hs00270173_s1 | NAP1L3 | nucleosome assembly protein 1- | 002P | PRD | P |
| | | | | | like 3 | | | |
| 5 | 5 | NM_001018069 | Hs00967385_g1 | SERBP1 | SERPINE1 mRNA binding | 003N | PRD | N |
| | | | | | protein 1 | | | |
| 6 | 6 | NM_015989 | Hs00211126_m1 | CSAD | cysteine sulfinic acid | 003P | PRD | P |
| | | | | | decarboxylase | | | |
| 7 | 7 | NM_017455 | Hs00247361_m1 | NPTN | neuroplastin | 004N | PRD | N |
| 8 | 8 | NM_001129 | Hs00937468_m1 | AEBP1 | AE binding protein 1 | 004P | PRD | P |
| 9 | 9 | NM_021601 | Hs00233566_m1 | CD79A | CD79a molecule, | 005N | PRD | N |
| | | | | | immunoglobulin-associated | | | |
| | | | | | alpha | | | |
| 10 | 10 | NM_000997 | Hs02340038_g1 | RPL37 | ribosomal protein L37 | 005P | PRD | P |
| 11 | 11 | NM_145869 | Hs00175132_m1 | ANXA11 | annexin A11 | 006N | PRD | N |
| 12 | 12 | NM_006297 | Hs00959834_m1 | XRCC1 | X-ray repair complementing | 006P | PRD | P |
| | | | | | defective repair in Chinese | | | |
| | | | | | hamster cells 1 | | | |
| 13 | 13 | NM_024921 | Hs00227769_m1 | POF1B | premature ovarian failure, 1B | 007N | PRD | N |
| 14 | 14 | NM_001003789 | Hs00255244_m1 | RABL2B | RAB, member of RAS oncogene | 007P | PRD | P |
| | | | | | family-like 2B, RAB, member of | | | |
| | | | | | RAS oncogene family-like 2A | | | |
| 15 | 15 | NM_030918 | Hs00229472_m1 | SNX27 | sorting nexin family member 27 | 008N | PRD | N |
| 16 | 16 | NM_080430 | Hs00369741_m1 | SELM | selenoprotein M | 008P | PRD | P |
| 17 | 17 | NM_005437 | Hs01033772_g1 | NCOA4 | nuclear receptor coactivator 4 | 009N | PRD | N |
| 18 | 18 | NM_002129 | Hs01127828_g1 | HMGB2 | high-mobility group box 2 | 009P | PRD | P |
| 19 | 20 | NM_152468 | Hs00380060_m1 | TMC8 | transmembrane channel-like 8 | 010P | PRD | P |
| 20 | 21 | NM_133471 | Hs00292978_m1 | KIAA1949 | KIAA1949 | 011N | PRD | N |
| 21 | 22 | NM_138923 | Hs00270322_m1 | TAF1 | TAF1 RNA polymerase II, | 011P | PRD | P |
| | | | | | TATA box binding protein | | | |
| | | | | | (TBP)-associated factor, 250 kDa | | | |
| 22 | 23 | NM_018367 | Hs00218034_m1 | ACER3 | alkaline ceramidase 3 | 012N | PRD | N |
| 23 | 24 | NM_201554 | Hs00176278_m1 | DGKA | diacylglycerol kinase, alpha | 012P | PRD | P |
| | | | | | 80 kDa | | | |
| 24 | 25 | NM_145755 | Hs00377534_m1 | TTC21A | tetratricopeptide repeat domain | 013N | PRD | N |
| | | | | | 21A | | | |
| 25 | 26 | NM_018571 | Hs00251360_s1 | STRADB | STE20-related kinase adaptor | 013P | PRD | P |
| | | | | | beta | | | |
| 26 | 28 | NM_002811 | Hs00427396_m1 | PSMD7 | proteasome (prosome, | 014P | PRD | P |
| | | | | | macropain) 26S subunit, non- | | | |
| | | | | | ATPase, 7 | | | |
| 27 | 29 | NM_020654 | Hs00221046_m1 | SENP7 | SUMO1/sentrin specific | 015N | PRD | N |
| | | | | | peptidase 7 | | | |
| 28 | 30 | NM_002082 | Hs00357776_g1 | GRK6 | G protein-coupled receptor | 015P | PRD | P |
| | | | | | kinase 6 | | | |
| 29 | 31 | NM_001042472 | Hs01018047_m1 | ABHD12 | abhydrolase domain containing | 016N | PRD | N |
| | | | | | 12 | | | |
| 30 | 32 | NM_004698 | Hs00757030_m1 | PRPF3 | PRP3 pre-mRNA processing | 016P | PRD | P |
| | | | | | factor 3 homolog (S. cerevisiae) | | | |
| 31 | 34 | NM_153701 | Hs00538167_m1 | IL12RB1 | interleukin 12 receptor, beta 1 | 017P | PRD | P |
| 32 | 35 | NM_012459 | Hs02339636_g1 | TIMM8B | translocase of inner | 018N | PRD | N |
| | | | | | mitochondrial membrane 8 | | | |
| | | | | | homolog B (yeast) | | | |
| 33 | 36 | NM_001077268 | Hs00262564_m1 | ZFYVE19 | zinc finger, FYVE domain | 018P | PRD | P |
| | | | | | containing 19 | | | |
| 34 | 37 | NM_006371 | Hs01035151_m1 | CRTAP | cartilage associated protein | 019N | PRD | N |
| 35 | 38 | NR_003654 | Hs00364437_m1 | SCAND2 | SCAN domain containing 2 | 019P | PRD | P |
| | | | | | pseudogene | | | |
| 36 | 39 | NM_006762 | Hs00198882_m1 | LAPTM5 | lysosomal protein | 020N | PRD | N |
| | | | | | transmembrane 5 | | | |
| 37 | 40 | NM_016619 | Hs00930964_g1 | PLAC8 | placenta-specific 8 | 020P | PRD | P |
| 38 | 41 | NM_003780 | Hs00243566_m1 | B4GALT2 | UDP-Gal:betaGlcNAc beta 1,4- | 021N | PRD | N |
| | | | | | galactosyltransferase, | | | |
| | | | | | polypeptide 2 | | | |
| 39 | 43 | NM_024896 | Hs00227643_m1 | ERMP1 | endoplasmic reticulum | 022N | PRD | N |
| | | | | | metallopeptidase 1 | | | |
| 40 | 44 | NM_002494 | Hs00159587_m1 | NDUFC1 | NADH dehydrogenase | 022P | PRD | P |
| | | | | | (ubiquinone) 1, subcomplex | | | |
| | | | | | unknown, 1, 6 kDa | | | |
| 41 | 45 | NM_000161 | Hs00609198_m1 | GCH1 | GTP cyclohydrolase 1 | 023N | PRD | N |
| 42 | 46 | NM_006346 | Hs00197131_m1 | PIBF1 | progesterone | 023P | PRD | P |
| | | | | | immunomodulatory binding | | | |
| | | | | | factor 1 | | | |
| 43 | 47 | NM_145288 | Hs00377132_m1 | ZNF296 | zinc finger protein 296 | 024N | PRD | N |
| 44 | 48 | NM_016446 | Hs00255552_m1 | TMEM8B | transmembrane protein 8B | 024P | PRD | P |
| 45 | 50 | NM_012117 | Hs01127577_m1 | CBX5 | chromobox homolog 5 | 025P | PRD | P |
| 46 | 51 | NM_130787 | Hs00367123_m1 | AP2A1 | adaptor-related protein complex | 026N | PRD | N |
| | | | | | 2, alpha 1 subunit | | | |
| 47 | 52 | NM_001981 | Hs00179978_m1 | EPS15 | epidermal growth factor receptor | 026P | PRD | P |
| | | | | | pathway substrate 15 | | | |
| 48 | 53 | NM_005871 | Hs00195343_m1 | SMNDC1 | survival motor neuron domain | 027N | PRD | N |
| | | | | | containing 1 | | | |
| 49 | 54 | NM_022474 | Hs00223885_m1 | MPP5 | membrane protein, palmitoylated | 027P | PRD | P |
| | | | | | 5 (MAGUK p55 subfamily | | | |
| | | | | | member 5) | | | |
| 50 | 55 | NM_145912 | Hs00377608_m1 | NFAM1 | NFAT activating protein with | 028N | PRD | N |
| | | | | | ITAM motif 1 | | | |
| 51 | 56 | NM_016173 | Hs00275076_m1 | HEMK1 | HemK methyltransferase family | 028P | PRD | P |
| | | | | | member 1 | | | |
| 52 | 57 | NM_173843 | Hs00893626_m1 | IL1RN | interleukin 1 receptor antagonist | 029N | PRD | N |
| 53 | 58 | NM_006565 | Hs00902008_m1 | CTCF | CCCTC-binding factor (zinc | 029P | PRD | P |
| | | | | | finger protein) | | | |
| 54 | 59 | NM_000201 | Hs00164932_m1 | ICAM1 | intercellular adhesion molecule 1 | 030N | PRD | N |
| 55 | 60 | NM_145306 | Hs00293954_m1 | C10orf35 | chromosome 10 open reading | 030P | PRD | P |
| | | | | | frame 35 | | | |
| 56 | 61 | NM_005360 | Hs00193519_m1 | MAF | v-maf musculoaponeurotic | 031N | PRD | N |
| | | | | | fibrosarcoma oncogene homolog | | | |
| | | | | | (avian) | | | |
| 57 | 62 | NM_001459 | Hs00181740_m1 | FLT3LG | fms-related tyrosine kinase 3 | 031P | PRD | P |
| | | | | | ligand | | | |
| 58 | 63 | NM_015112 | Hs00248380_m1 | MAST2 | microtubule associated | 032N | PRD | N |
| | | | | | serine/threonine kinase 2 | | | |
| 59 | 64 | NM_015057 | Hs00209335_m1 | MYCBP2 | MYC binding protein 2 | 032P | PRD | P |
| 60 | 66 | NM_201438 | Hs00212889_m1 | PPHLN1 | periphilin 1 | 033P | PRD | P |
| 61 | 68 | NM_004798 | Hs01122781_m1 | KIF3B | kinesin family member 3B | 034P | PRD | P |
| 62 | 70 | NM_152850 | Hs00912503_m1 | PIGO | phosphatidylinositol glycan | 035P | PRD | P |
| | | | | | anchor biosynthesis, class O | | | |
| 63 | 71 | NM_004155 | Hs00244603_m1 | SERPINB9 | serpin peptidase inhibitor, clade | 036N | PRD | N |
| | | | | | B (ovalbumin), member 9 | | | |
| 64 | 72 | NM_003328 | Hs01053640_m1 | TXK | TXK tyrosine kinase | 036P | PRD | P |
| 65 | 73 | NM_020820 | Hs00368207_m1 | PREX1 | phosphatidylinositol-3,4,5- | 037N | PRD | N |
| | | | | | trisphosphate-dependent Rac | | | |
| | | | | | exchange factor 1 | | | |
| 66 | 74 | NM_001007468 | Hs00268260_m1 | SMARCB1 | SWI/SNF related, matrix | 037P | PRD | P |
| | | | | | associated, actin dependent | | | |
| | | | | | regulator of chromatin, | | | |
| | | | | | subfamily b, member 1 | | | |
| 67 | 75 | NM_018044 | Hs00216128_m1 | NSUN5 | NOP2/Sun domain family, | 038N | PRD | N |
| | | | | | member 5 | | | |
| 68 | 76 | NM_172177 | Hs00204112_m1 | MRPL42 | mitochondrial ribosomal protein | 038P | PRD | P |
| | | | | | L42 | | | |
| 69 | 77 | NM_020808 | Hs00384853_m1 | SIPA1L2 | signal-induced proliferation- | 039N | PRD | N |
| | | | | | associated 1 like 2 | | | |
| 70 | 79 | NM_006007 | Hs00829622_s1 | ZFAND5 | zinc finger, AN1-type domain 5 | 040N | PRD | N |
| 71 | 80 | NM_013374 | Hs00183813_m1 | PDCD6IP | programmed cell death 6 | 040P | PRD | P |
| | | | | | interacting protein | | | |
| 72 | 81 | NM_001014839 | Hs00379444_m1 | NCDN | neurochondrin | 041N | PRD | N |
| 73 | 82 | NM_006370 | Hs00762282_s1 | VTI1B | vesicle transport through | 041P | PRD | P |
| | | | | | interaction with t-SNAREs | | | |
| | | | | | homolog 1B (yeast) | | | |
| 74 | 84 | NM_032026 | Hs00757279_mH | TATDN1 | TatD DNase domain containing 1 | 042P | PRD | P |
| 75 | 85 | NM_005436 | Hs00193731_m1 | CCDC6 | coiled-coil domain containing 6 | 043N | PRD | N |
| 76 | 86 | NM_032314 | Hs00260456_m1 | COQ5 | coenzyme Q5 homolog, | 043P | PRD | P |
| | | | | | methyltransferase (S. cerevisiae) | | | |
| 77 | 87 | NM_002158 | Hs00939664_m1 | FOXN2 | forkhead box N2 | 044N | PRD | N |
| 78 | 88 | NM_007124 | Hs01126016_m1 | UTRN | utrophin | 044P | PRD | P |
| 79 | 89 | NM_138711 | Hs01115513_m1 | PPARG | peroxisome proliferator- | 045N | PRD | N |
| | | | | | activated receptor gamma | | | |
| 80 | 90 | NM_019083 | Hs00219487_m1 | CCDC76 | coiled-coil domain containing 76 | 045P | PRD | P |
| 81 | 91 | NM_001002246 | Hs00212858_m1 | ANAPC11 | anaphase promoting complex | 046N | PRD | N |
| | | | | | subunit 11 | | | |
| 82 | 92 | NM_001007277 | Hs00903035_g1 | EI24 | etoposide induced 2.4 mRNA | 046P | PRD | P |
| 83 | 93 | NM_004450 | Hs00427977_m1 | ERH | enhancer of rudimentary | 047N | PRD | N |
| | | | | | homolog (Drosophila) | | | |
| 84 | 94 | NM_032449 | Hs00383486_m1 | CC2D1B | coiled-coil and C2 domain | 047P | PRD | P |
| | | | | | containing 1B | | | |
| 85 | 95 | NM_001009922 | Hs00295839_m1 | RCHY1 | ring finger and CHY zinc finger | 048N | PRD | N |
| | | | | | domain containing 1 | | | |
| 86 | 96 | NM_006405 | Hs00197392_m1 | TM9SF1 | transmembrane 9 superfamily | 048P | PRD | P |
| | | | | | member 1 | | | |
| 87 | 99 | NM_015633 | Hs00381867_m1 | FGFR1OP2 | FGFR1 oncogene partner 2 | 050N | PRD | N |
| 88 | 100 | NM_014865 | Hs00274505_m1 | NCAPD2 | non-SMC condensin I complex, | 050P | PRD | P |
| | | | | | subunit D2 | | | |
| 89 | 101 | NM_003268 | Hs00152825_m1 | TLR5 | toll-like receptor 5 | 051N | PRD | N |
| 90 | 102 | NM_016470 | Hs00212852_m1 | C20orf111 | chromosome 20 open reading | 051P | PRD | P |
| | | | | | frame 111 | | | |
| 91 | 103 | NM_172388 | Hs00542678_m1 | NFATC1 | nuclear factor of activated T- | 052N | PRD | N |
| | | | | | cells, cytoplasmic, calcineurin- | | | |
| | | | | | dependent 1 | | | |
| 92 | 104 | NM_024605 | Hs00226305_m1 | ARHGAP10 | Rho GTPase activating protein | 052P | PRD | P |
| | | | | | 10 | | | |
| 93 | 105 | NM_058192 | Hs00369703_m1 | RPUSD1 | RNA pseudouridylate synthase | 053N | PRD | N |
| | | | | | domain containing 1 | | | |
| 94 | 106 | NM_003400 | Hs00418963_m1 | XPO1 | exportin 1 (CRM1 homolog, | 053P | PRD | P |
| | | | | | yeast) | | | |
| 95 | 108 | NM_016447 | Hs00212785_m1 | MPP6 | membrane protein, palmitoylated | 054P | PRD | P |
| | | | | | 6 (MAGUK p55 subfamily | | | |
| | | | | | member 6) | | | |
| 96 | 109 | NM_004925 | Hs00185020_m1 | AQP3 | aquaporin 3 (Gill blood group) | 055N | PRD | N |
| 97 | 110 | NM_006348 | Hs00197140_m1 | COG5 | component of oligomeric golgi | 055P | PRD | P |
| | | | | | complex 5 | | | |
| 98 | 111 | NM_020320 | Hs00368084_m1 | RARS2 | arginyl-tRNA synthetase 2, | 056N | PRD | N |
| | | | | | mitochondrial | | | |
| 99 | 112 | NM_175617 | Hs01582977_gH | MT1E | metallothionein 1E | 056P | PRD | P |
| 100 | 113 | NM_018268 | Hs00217534_m1 | WDR41 | WD repeat domain 41 | 057N | PRD | N |
| 101 | 114 | NM_002882 | Hs01597912_g1 | RANBP1 | RAN binding protein 1 | 057P | PRD | P |
| 102 | 116 | NM_199367 | Hs00275795_m1 | SPG7 | spastic paraplegia 7 (pure and | 058P | PRD | P |
| | | | | | complicated autosomal | | | |
| | | | | | recessive) | | | |
| 103 | 117 | NM_006662 | Hs00198472_m1 | SRCAP | Snf2-related CREBBP activator | 059N | PRD | N |
| | | | | | protein | | | |
| 104 | 118 | NM_014254 | Hs00204546_m1 | TMEM5 | transmembrane protein 5 | 059P | PRD | P |
| 105 | 119 | NM_000355 | Hs00165902_m1 | TCN2 | transcobalamin II | 060N | PRD | N |
| 106 | 120 | NM_145799 | Hs00248408_m1 | SEPT6 | septin 6 | 060P | PRD | P |
| 107 | 121 | NM_013332 | Hs00203383_m1 | C7orf68 | chromosome 7 open reading | 061N | PRD | N |
| | | | | | frame 68 | | | |
| 108 | 122 | NM_014911 | Hs00208618_m1 | AAK1 | AP2 associated kinase 1 | 061P | PRD | P |
| 109 | 123 | NM_000067 | Hs00163869_m1 | CA2 | carbonic anhydrase II | 062N | PRD | N |
| 110 | 124 | NM_023080 | Hs00535769_m1 | C8orf33 | chromosome 8 open reading | 062P | PRD | P |
| | | | | | frame 33 | | | |
| 111 | 125 | NM_003473 | Hs00610137_m1 | STAM | signal transducing adaptor | 063N | PRD | N |
| | | | | | molecule (SH3 domain and | | | |
| | | | | | ITAM motif) 1 | | | |
| 112 | 126 | NM_022743 | Hs00224208_m1 | SMYD3 | SET and MYND domain | 063P | PRD | P |
| | | | | | containing 3 | | | |
| 113 | 127 | NM_003003 | Hs00608163_m1 | SEC14L1 | SEC14-like 1 (S. cerevisiae) | 064N | PRD | N |
| 114 | 128 | NM_000848 | Hs00265266_g1 | GSTM2 | glutathione S-transferase mu 2 | 064P | PRD | P |
| | | | | | (muscle) | | | |
| 115 | 130 | NM_003093 | Hs00853882_g1 | SNRPC | small nuclear ribonucleoprotein | 065P | PRD | P |
| | | | | | polypeptide C | | | |
| 116 | 131 | NM_021067 | Hs01040835_m1 | GINS1 | GINS complex subunit 1 (Psf1 | 066N | PRD | N |
| | | | | | homolog) | | | |
| 117 | 132 | NM_005184 | Hs00270914_m1 | CALM3 | calmodulin 3 (phosphorylase | 066P | PRD | P |
| | | | | | kinase, delta) | | | |
| 118 | 133 | NM_016310 | Hs00363121_m1 | POLR3K | polymerase (RNA) III (DNA | 067N | PRD | N |
| | | | | | directed) polypeptide K, 12.3 kDa | | | |
| 119 | 134 | NM_014901 | Hs00208576_m1 | RNF44 | ring finger protein 44 | 067P | PRD | P |
| 120 | 135 | NM_004255 | Hs00362067_m1 | COX5A | cytochrome c oxidase subunit Va | 068N | PRD | N |
| 121 | 136 | NM_032177 | Hs00536084_m1 | PHAX | phosphorylated adaptor for RNA | 068P | PRD | P |
| | | | | | export | | | |
| 122 | 137 | NM_020216 | Hs00220260_m1 | RNPEP | arginyl aminopeptidase | 069N | PRD | N |
| | | | | | (aminopeptidase B) | | | |
| 123 | 138 | NM_182922 | Hs00608563_m1 | HEATR3 | HEAT repeat containing 3 | 069P | PRD | P |
| 124 | 139 | NM_032412 | Hs00260900_m1 | C5orf32 | chromosome 5 open reading | 070N | PRD | N |
| | | | | | frame 32 | | | |
| 125 | 140 | NM_001707 | Hs00156055_m1 | BCL7B | B-cell CLL/lymphoma 7B | 070P | PRD | P |
| 126 | 141 | NM_006402 | Hs00246261_m1 | HBXIP | hepatitis B virus x interacting | 071N | PRD | N |
| | | | | | protein | | | |
| 127 | 142 | NM_139118 | Hs00217433_m1 | YY1AP1 | YY1 associated protein 1 | 071P | PRD | P |
| 128 | 143 | NM_006566 | Hs00170832_m1 | CD226 | CD226 molecule | 072N | PRD | N |
| 129 | 144 | NM_152320 | Hs01075391_m1 | ZNF641 | zinc finger protein 641 | 072P | PRD | P |
| 130 | 146 | NM_007249 | Hs00971557_m1 | KLF12 | Kruppel-like factor 12 | 073P | PRD | P |
| 131 | 147 | NM_024516 | Hs00225908_m1 | C16orf53 | chromosome 16 open reading | 074N | PRD | N |
| | | | | | frame 53 | | | |
| 132 | 148 | NM_015077 | Hs00248344_m1 | SARM1 | sterile alpha and TIR motif | 074P | PRD | P |
| | | | | | containing 1 | | | |
| 133 | 149 | NM_018177 | Hs00905983_m1 | N4BP2 | NEDD4 binding protein 2 | 075N | PRD | N |
| 134 | 150 | NM_001001660 | Hs01390827_g1 | LYRM5 | LYR motif containing 5 | 075P | PRD | P |
| 135 | 151 | NM_004169 | Hs00541038_m1 | SHMT1 | serine hydroxymethyltransferase | 076N | PRD | N |
| | | | | | 1 (soluble) | | | |
| 136 | 152 | NM_005951 | Hs00823168_g1 | MT1H | metallothionein 1H | 076P | PRD | P |
| 137 | 153 | NM_005234 | Hs00172870_m1 | NR2F6 | nuclear receptor subfamily 2, | 077N | PRD | N |
| | | | | | group F, member 6 | | | |
| 138 | 154 | NM_017761 | Hs02518187_g1 | PNRC2 | proline-rich nuclear receptor | 077P | PRD | P |
| | | | | | coactivator 2 | | | |
| 139 | 155 | NM_178009 | Hs00410739_m1 | DGKH | diacylglycerol kinase, eta | 078N | PRD | N |
| 140 | 156 | NM_014819 | Hs01122981_m1 | PJA2 | praja ring finger 2 | 078P | PRD | P |
| 141 | 157 | NM_001077191 | Hs01937849_s1 | GPBAR1 | G protein-coupled bile acid | 079N | PRD | N |
| | | | | | receptor 1 | | | |
| 142 | 158 | NM_015986 | Hs00367579_m1 | CRLF3 | cytokine receptor-like factor 3 | 079P | PRD | P |
| 143 | 159 | NM_012198 | Hs00201854_m1 | GCA | grancalcin, EF-hand calcium | 080N | PRD | N |
| | | | | | binding protein | | | |
| 144 | 160 | NM_002735 | Hs00406762_m1 | PRKAR1B | protein kinase, cAMP- | 080P | PRD | P |
| | | | | | dependent, regulatory, type I, | | | |
| | | | | | beta | | | |
| 145 | 161 | NM_032947 | Hs00383944_m1 | C5orf62 | chromosome 5 open reading | 081N | PRD | N |
| | | | | | frame 62 | | | |
| 146 | 162 | NM_005678 | Hs00243205_m1 | SNURF | SNRPN upstream reading | 081P | PRD | P |
| | | | | | frame, small nuclear | | | |
| | | | | | ribonucleoprotein polypeptide N | | | |
| 147 | 163 | NM_003956 | Hs02379634_s1 | CH25H | cholesterol 25-hydroxylase | 082N | PRD | N |
| 148 | 164 | NM_005950 | Hs02578922_gH | MT1G | metallothionein 1G | 082P | PRD | P |
| 149 | 165 | NM_003295 | Hs02621289_g1 | TPT1 | tumor protein, translationally- | 083N | PRD | N |
| | | | | | controlled 1 | | | |
| 150 | 166 | NM_001556 | Hs00233287_m1 | IKBKB | inhibitor of kappa light | 083P | PRD | P |
| | | | | | polypeptide gene enhancer in B- | | | |
| | | | | | cells, kinase beta | | | |
| 151 | 167 | NM_152889 | Hs00541730_m1 | CHST13 | carbohydrate (chondroitin 4) | 084N | PRD | N |
| | | | | | sulfotransferase 13 | | | |
| 152 | 168 | NM_001042588 | Hs00371639_m1 | SNUPN | snurportin 1 | 084P | PRD | P |
| 153 | 170 | NM_000981 | Hs02338565_gH | RPL19 | ribosomal protein L19 | 01HSK | HSK | — |
| 154 | 171 | NM_031369 | Hs01086912_m1 | HNRNPD | heterogeneous nuclear | 02HSK | HSK | — |
| | | | | | ribonucleoprotein D (AU-rich | | | |
| | | | | | element RNA binding protein 1, | | | |
| | | | | | 37 kDa) | | | |
| 155 | 172 | NM_001023 | Hs00828752_gH | RPS20 | ribosomal protein S20 | 03HSK | HSK | — |
| 156 | 173 | NM_016093 | Hs01631495_s1 | RPL26L1 | ribosomal protein L26-like 1 | 04HSK | HSK | — |
| 157 | 174 | NM_022170 | Hs00254535_m1 | EIF4H | eukaryotic translation initiation | 05HSK | HSK | — |
| | | | | | factor 4H | | | |
| 158 | 175 | NM_032195 | Hs00371372_m1 | SON | SON DNA binding protein | 06HSK | HSK | — |
| 159 | 176 | NM_016061 | Hs00763191_s1 | YPEL5 | yippee-like 5 (Drosophila) | 07HSK | HSK | — |
| 160 | 177 | NM_013379 | Hs01115161_m1 | DPP7 | dipeptidyl-peptidase 7 | 08HSK | HSK | — |
| 161 | 178 | NM_004034 | Hs00559413_m1 | ANXA7 | annexin A7 | 10HSK | HSK | — |
| 162 | 179 | NM_001033112 | Hs00212868_m1 | PAIP2 | poly(A) binding protein | 11HSK | HSK | — |
| | | | | | interacting protein 2 | | | |
| 163 | 180 | NM_006861 | Hs00199284_m1 | RAB35 | RAB35, member RAS oncogene | 12HSK | HSK | — |
| | | | | | family | | | |
| 164 | 181 | NM_007065 | Hs00606477_m1 | CDC37 | cell division cycle 37 homolog | 13HSK | HSK | — |
| | | | | | (S. cerevisiae) | | | |
| 165 | 182 | NM_005626 | Hs00194538_m1 | SRSF4 | serine/arginine-rich splicing | 14HSK | HSK | — |
| | | | | | factor 4 | | | |
| 166 | 183 | NM_018064 | Hs00363236_m1 | AKIRIN2 | akirin 2 | 15HSK | HSK | — |
| 167 | 184 | NM_030818 | Hs00229388_m1 | CCDC130 | coiled-coil domain containing | 16HSK | HSK | — |
| | | | | | 130 | | | |
| 168 | 185 | NM_006110 | Hs00272036_m1 | CD2BP2 | CD2 (cytoplasmic tail) binding | 17HSK | HSK | — |
| | | | | | protein 2 | | | |
| 169 | 186 | NM_006327 | Hs00197056_m1 | TIMM23 | translocase of inner | 18HSK | HSK | — |
| | | | | | mitochondrial membrane 23 | | | |
| | | | | | homolog (yeast), translocase of | | | |
| | | | | | inner mitochondrial membrane | | | |
| | | | | | 23 homolog B (yeast) | | | |
| 170 | 187 | NM_005466 | Hs00193824_m1 | MED6 | mediator complex subunit 6 | 20HSK | HSK | — |
| 171 | 188 | NM_006600 | Hs00702452_s1 | NUDC | nuclear distribution gene C | 21HSK | HSK | — |
| | | | | | homolog (A. nidulans) | | | |
| 172 | 189 | NM_020141 | Hs00220038_m1 | TMEM167B | transmembrane protein 167B | 22HSK | HSK | — |
| 173 | 190 | NM_030914 | Hs00229455_m1 | URM1 | ubiquitin related modifier 1 | 23HSK | HSK | — |
| 174 | 191 | NM_014607 | Hs00412682_m1 | UBXN4 | UBX domain protein 4 | 24HSK | HSK | — |
| 175 | 192 | NM_173607 | Hs00380814_m1 | FAM177A1 | family with sequence similarity | 25HSK | HSK | — |
| | | | | | 177, member A1 | | | |

### Example 12

[0333] This example includes a description of evaluation of RGP (ratiometric gene pair) candidates for GVHD prediction.

[0334] Introduction:

[0335] Ratiometric gene pairs (RGPs) provide for additional outcome predictive robustness through (1) self-calibration by dividing-out background variation, and (2) capturing potential competitive pathway interaction effects between genes at the expression level. RGPs are determined by dividing the expression level of a select single gene by the expression level of another select single gene.

[0336] Determination of RGPs:

[0337] In PBDs technical implementation, because the RRCF data is expressed in logarithmic form of mRNA concentration measurement levels (see above), i.e., RRCF X˜log(gene X) and RL2F X˜log(gene X), the ratio of gene X/gene Y expression, in logarithmic form log(gene X/gene Y), can also be expressed as the difference log(gene X)−log(gene Y), which is equivalent to RRCF X˜RRCF Y. Therefore, in all usage below, RGP values for RRCF data are defined as follows:

RGP=RRCF X−RRCF Y.

[0338] Note that RGP values can also be directly calculated from the RL2F data, before background subtraction of HSK genes, because the HSK background subtraction itself is subtracted out in the RGP calculation. Given that RRCF=RL2F−RHSKAG6 (see above), then RGP=(RL2F X−RHSKAG6)−(RL2F Y−RHSKAG6), therefore, alternatively:

RGP=RL2FX−RL2FY.

[0339] The RGP values for all 180 samples were determined for the complete set 15,225 unique RGPs from the RRCF data of all select 175 SGs (single genes) that passed QC (as described above). For 175 SGs (single genes), the total number of RGPs, i.e. unique pair-wise SG combinations, is defined as (175²−175)/2=15,225.

[0340] Determining Outcome Predictive Performance of RGPs:

[0341] GVHD outcome predictive performance was evaluated for each of the 15,225 RGPs by determining class separation:

[0342] (1) p-values using the 2-tailed, heteroscedastic T-test, and

[0343] (2) accuracies (ACC) using LDA (linear discriminant analysis).

T-test p-value and LDA accuracy calculations were carried out as described above.

[0344] The 180 sample dataset comprises the following four sample classes:
[0345] (1) Gneg: 59 samples for which no form of acute or chronic GVHD was observed in the transplant recipients
[0346] (2) Gpos: 121 samples for which any form of acute of chronic GVHD was observed in the transplant recipients
[0347] (3) Gag2: 110 samples for which acute grade II, III or IV GVHD, either with or without chronic GVHD, was observed in the transplant recipients
[0348] (4) Gag3: 77 samples for which severe acute grade III or IV GVHD, either with or without chronic GVHD, was observed in the transplant recipients

[0349] Assuming a prevalence, P, (overall occurrence in transplantations) of acute grade II, III or IV GVHD (Gag2) in the commonly accepted range of 35% to 55%, with a midpoint of 45%, the 110 Gag2 cases would be expected to be observed in a total of 110/0.45≈244 transplantations. The fraction of the 77 acute grade III or IV GVHD (Gag3) from such a total of ˜244 transplantations then corresponds to 0.315, i.e. 31.5%, which is within the commonly accepted prevalence range of acute grade III or IV GVHD. Per the definition, all of the 77 Gag3 cases are part of the 110 Gag2 cases.

[0350] In summary, the proportion of Gag3 cases within the Gag2 cases is largely consistent with Gag2 prevalences in the range of 35% to 55%, and Gag3 prevalences in the range of 15% to 35%. Therefore, projections of potential GVHD reductions for Gag2 and Gag3 outcomes, when using the GVHD outcome prediction to restrict donors to the ones predicted by the analysis to not cause GVHD, would be based on predictive models that are trained using well-balanced proportions of Gag2 and Gag3 samples, representative of commonly accepted ranges of Gag2 and Gag3 prevalences.

[0351] GVHD outcome predictive performance (T-test and LDA) was determined for the following class divisions:

[0352] (1) Gneg vs. Gpos

[0353] (2) Gneg vs. Gag2

[0354] (3) Gneg vs. Gag3

[0355] Note for all LDA calculation for each of the 3 different class divisions, the LDA separatrix from the Gneg vs. Gpos division was used, determined as the midpoint between the average RGP value of the 59 Gneg samples, and the average RGP value of the 121 Gpos samples.

[0356] Note that the accuracies were determined using “balanced” proportional representations of negatively and positively classified samples, based on imposing a balanced prevalence of P_{b}=0.5 (50%) of GVHD positive cases. Note that all 4 confusion matrix classification values (CMCVs), TN, FP, TP, FN, are represented as proportions of a total of 1, i.e. all 4 values must always add up to 1. Balanced CMCVs (noted by subscript “b”), are determined from initial CMCVs (noted by subscript “0”) based on an initial prevalence Pₒ, according to the following equations:

TN_{b}=(1−P_{b})/(1−P₀)*TN₀ (1)

FP_{b}=(1−P_{b})/(1−P₀)*FP₀ (2)

TP_{b}=P_{b}/P₀*TP₀ (3)

FN_{b}=P_{b}/P₀*FN₀ (4)

ACC, accuracy, adjusted for balanced prevalence, P_{b}, is defined as follows (also see P1 and P2):

ACC=(TN_{b}+TP_{b})/(TN_{b}+FN_{b}+TP_{b}+FP_{b})

[0357] Evaluation of Outcome Predictive Performance of RGPs:

[0358] The class discrimination analysis provides an output of 6 performance variables, i.e. p-values and accuracies for each of the 3 divisions, for all 15,225 RGPs (see table RGP348). The 6 outcome predictive performance variables were ranked from 1 to 15,225, respectively
[0359] (1) according to best performing (minimal) to worst performing (maximal) p-values for each of the 3 divisions; and
[0360] (2) according to best performing (maximal) to worst performing (minimal) outcome predictive LDA accuracies for each of the 3 divisions.

[0361] As an initial reduction of candidate RGPs for further refinement into a GVHD outcome prediction profile, a set of 348 RGPs (RGP348; see Table 14) was selected by requiring each RGP to have over all 6 predictive performance variable ranks a maximal rank (from 1 to 15,225)<=2000, and minimal rank<=200. In other words, all 6 outcome predictive performance variables had to be among the top 2000 (13.1%), and at least 1 of the 6 outcome predictive performance variables had to be among the top 200 (1.3%). Within the RGP348 list (Table 14), 128 of the 175 SGs are represented, ranging from participation of each SG in 1 to 53 different RGPs (see Table 15, SG128).

TABLE 14
List of 348 RGPs (RGP348) with high outcome predictive performance ranks

| | Gneg vs. | Gneg vs. | Gneg vs. | ACC | ACC | | Rank Gneg vs. | Rank Gneg vs. | Rank Gneg vs. | Rank | Rank | Rank | | | |
|---|---|---|---|---|---|---|---|---|---|---|---|---|---|---|---|
| RGP | Gpos | Gag2 | Gag3 | Gneg | Gneg | ACC | Gpos | Gag2 | Gag3 | ACC | ACC | ACC | Min rank | Max rank | Median rank |
| ABI Gene | T-test | T-test | T-test | vs. | vs. | Gneg vs. | T-test | T-test | T-test | Gneg vs. | Gneg vs. | Gneg vs. | p-value and | p-value and | p-value and |
| Symbol | p-value | p-value | p-value | Gpos | Gag2 | Gag3 | p-value | p-value | p-value | Gpos | Gag2 | Gag3 | ACC | ACC | ACC |
| VAMP2-SEC14L1 | 4.8E−04 | 2.1E−04 | 3.1E−05 | 0.68 | 0.69 | 0.69 | 118 | 72 | 8 | 1 | 1 | 4 | 1 | 118 | 6 |
| TMEM49-TATDN1 | 9.0E−06 | 9.3E−06 | 1.5E−06 | 0.64 | 0.64 | 0.68 | 2 | 3 | 1 | 112.5 | 90.5 | 15.5 | 1 | 112.5 | 9.25 |
| AEBP1-SEC14L1 | 5.4E−04 | 1.0E−03 | 9.1E−05 | 0.67 | 0.67 | 0.70 | 127 | 292 | 26 | 3 | 9 | 1 | 1 | 292 | 17.5 |
| VAMP2-CRTAP | 1.4E−04 | 9.1E−05 | 3.9E−05 | 0.66 | 0.66 | 0.66 | 36 | 27 | 13 | 17.5 | 18 | 60 | 13 | 60 | 22.5 |
| GINS1-MT1H | 1.2E−04 | 7.3E−05 | 2.5E−03 | 0.65 | 0.66 | 0.65 | 28 | 20 | 470 | 21 | 22 | 124.5 | 20 | 470 | 25 |
| VAMP2-LAPTM5 | 1.9E−04 | 1.7E−04 | 8.9E−05 | 0.66 | 0.66 | 0.67 | 43 | 48 | 25 | 12.5 | 11 | 26.5 | 11 | 48 | 25.75 |
| MT1E-GINS1 | 2.5E−05 | 9.4E−06 | 2.6E−04 | 0.65 | 0.66 | 0.65 | 7 | 4 | 73 | 34 | 20.5 | 145 | 4 | 145 | 27.25 |
| C20orf111-SEC14L1 | 1.3E−03 | 8.3E−04 | 2.1E−04 | 0.67 | 0.67 | 0.68 | 298 | 248 | 61 | 5 | 6 | 12 | 5 | 298 | 36.5 |
| AEBP1-RPUSD1 | 3.9E−05 | 1.8E−04 | 1.6E−04 | 0.66 | 0.65 | 0.66 | 13 | 52 | 40 | 12.5 | 39 | 72 | 12.5 | 72 | 39.5 |
| AEBP1-NCDN | 1.4E−04 | 3.7E−04 | 2.2E−04 | 0.65 | 0.65 | 0.67 | 33 | 130 | 63 | 25 | 45.5 | 37.5 | 25 | 130 | 41.5 |
| VAMP2-NCOA4 | 5.6E−05 | 2.7E−05 | 1.3E−05 | 0.64 | 0.65 | 0.66 | 16 | 9 | 5 | 74.5 | 67.5 | 72 | 5 | 74.5 | 41.75 |
| ABHD12-MPP6 | 1.3E−03 | 2.0E−03 | 3.5E−05 | 0.65 | 0.65 | 0.69 | 289 | 458 | 12 | 34 | 52.5 | 2 | 2 | 458 | 43.25 |
| ANAPC11-GINS1 | 3.8E−05 | 1.7E−05 | 1.7E−04 | 0.64 | 0.64 | 0.65 | 12 | 6 | 47 | 44 | 81.5 | 124.5 | 6 | 124.5 | 45.5 |
| VAMP2-ZFAND5 | 3.1E−04 | 9.9E−05 | 3.1E−05 | 0.62 | 0.64 | 0.67 | 68 | 28 | 9 | 215.5 | 77.5 | 17.5 | 9 | 215.5 | 48 |
| VAMP2-C5orf32 | 1.1E−04 | 1.3E−04 | 1.8E−04 | 0.64 | 0.65 | 0.66 | 25 | 37 | 52 | 44 | 58 | 80 | 25 | 80 | 48 |
| NCOA4-C8orf33 | 4.6E−04 | 3.1E−04 | 7.8E−05 | 0.64 | 0.65 | 0.66 | 111 | 107 | 21 | 55.5 | 39 | 44 | 21 | 111 | 49.75 |
| VAMP2-GCH1 | 1.5E−04 | 2.3E−04 | 2.0E−04 | 0.66 | 0.65 | 0.64 | 38 | 82 | 57 | 17.5 | 45.5 | 222.5 | 17.5 | 222.5 | 51.25 |
| GINS1-PRKAR1B | 1.7E−04 | 1.8E−04 | 2.0E−04 | 0.65 | 0.65 | 0.66 | 40 | 56 | 56 | 34 | 52.5 | 94 | 34 | 94 | 54.25 |
| VAMP2-C5orf62 | 2.2E−03 | 1.5E−03 | 2.1E−04 | 0.65 | 0.65 | 0.66 | 445 | 381 | 60 | 38 | 45.5 | 60 | 38 | 445 | 60 |
| VAMP2-KIAA1949 | 1.4E−04 | 1.8E−04 | 7.8E−05 | 0.64 | 0.64 | 0.66 | 34 | 55 | 20 | 74.5 | 98 | 72 | 20 | 98 | 63.5 |
| MPP6-SEC14L1 | 5.0E−03 | 4.0E−03 | 1.7E−04 | 0.64 | 0.66 | 0.67 | 768 | 739 | 45 | 82.5 | 24 | 20 | 20 | 768 | 63.75 |
| SELM-RPUSD1 | 3.9E−04 | 2.9E−04 | 1.5E−03 | 0.65 | 0.65 | 0.67 | 94 | 102 | 312 | 30 | 35 | 29 | 29 | 312 | 64.5 |
| TMEM49-PLAC8 | 2.8E−05 | 8.7E−05 | 2.7E−05 | 0.64 | 0.63 | 0.65 | 8 | 24 | 7 | 112.5 | 238.5 | 133 | 7 | 238.5 | 68.25 |
| TMEM49-FLT3LG | 3.0E−03 | 2.7E−03 | 2.8E−04 | 0.64 | 0.65 | 0.66 | 539 | 564 | 80 | 44 | 58 | 47 | 44 | 564 | 69 |
| MPP5-SEC14L1 | 4.4E−03 | 3.0E−03 | 2.7E−04 | 0.64 | 0.65 | 0.69 | 699 | 602 | 78 | 68 | 45.5 | 8.5 | 8.5 | 699 | 73 |
| SEC14L1-LYRM5 | 3.0E−03 | 2.0E−03 | 3.5E−04 | 0.64 | 0.65 | 0.67 | 543 | 469 | 94 | 52.5 | 27 | 37.5 | 27 | 543 | 73.25 |
| PDCD6IP-LYRM5 | 2.6E−03 | 4.1E−03 | 4.9E−04 | 0.66 | 0.66 | 0.68 | 503 | 746 | 126 | 8.5 | 23 | 13 | 8.5 | 746 | 74.5 |
| NCOA4-PLAC8 | 1.0E−03 | 7.5E−04 | 1.1E−04 | 0.64 | 0.64 | 0.66 | 235 | 239 | 31 | 58.5 | 90.5 | 50 | 31 | 239 | 74.5 |
| TMEM49-MRPL42 | 1.9E−04 | 3.4E−04 | 4.8E−04 | 0.65 | 0.65 | 0.65 | 45 | 120 | 125 | 25 | 45.5 | 107 | 25 | 125 | 76.25 |
| PDCD6IP-TATDN1 | 2.7E−03 | 1.8E−03 | 3.4E−04 | 0.64 | 0.64 | 0.66 | 516 | 440 | 91 | 68 | 72.5 | 60 | 60 | 516 | 81.75 |
| TMEM49-VAMP2 | 2.4E−06 | 3.9E−06 | 9.7E−06 | 0.63 | 0.63 | 0.62 | 1 | 1 | 4 | 164 | 285 | 570.5 | 1 | 570.5 | 84 |
| MAF-RPS20 | 2.0E−05 | 2.0E−05 | 1.6E−04 | 0.63 | 0.64 | 0.62 | 5 | 7 | 41 | 181.5 | 138 | 683.5 | 5 | 683.5 | 89.5 |
| SEC14L1-RPL19 | 6.2E−03 | 2.7E−03 | 5.9E−04 | 0.65 | 0.67 | 0.67 | 866 | 573 | 149 | 22.5 | 10 | 32 | 10 | 866 | 90.5 |
| ADRB2-MT1E | 8.9E−05 | 4.8E−05 | 4.5E−04 | 0.63 | 0.65 | 0.64 | 22 | 15 | 119 | 139 | 67.5 | 180 | 15 | 180 | 93.25 |
| NCOA4-PAIP2 | 3.7E−04 | 2.1E−04 | 3.4E−04 | 0.63 | 0.64 | 0.65 | 89 | 71 | 90 | 139 | 98 | 119 | 71 | 139 | 94 |
| NCOA4-MPP6 | 2.5E−04 | 2.6E−04 | 4.6E−06 | 0.63 | 0.63 | 0.65 | 54 | 90 | 3 | 145 | 175 | 100 | 3 | 175 | 95 |
| CRTAP-LYRM5 | 2.0E−03 | 2.1E−03 | 7.3E−04 | 0.66 | 0.66 | 0.67 | 425 | 490 | 177 | 11 | 12 | 21.5 | 11 | 490 | 99.25 |
| MRPL42-GINS1 | 7.5E−05 | 4.5E−05 | 2.7E−04 | 0.63 | 0.63 | 0.64 | 19 | 14 | 77 | 123 | 165.5 | 262 | 14 | 262 | 100 |
| AAK1-SEC14L1 | 1.9E−02 | 1.3E−02 | 5.4E−04 | 0.64 | 0.65 | 0.69 | 1789 | 1549 | 138 | 64 | 31.5 | 5.5 | 5.5 | 1789 | 101 |
| SELM-NCOA4 | 8.9E−04 | 3.4E−04 | 1.1E−04 | 0.62 | 0.64 | 0.66 | 211 | 117 | 30 | 261.5 | 90.5 | 88 | 30 | 261.5 | 103.75 |
| PREX1-KLF12 | 1.2E−03 | 9.2E−04 | 2.6E−04 | 0.64 | 0.64 | 0.65 | 268 | 266 | 75 | 103.5 | 104.5 | 107 | 75 | 268 | 105.75 |
| CRTAP-PLAC8 | 3.7E−03 | 3.6E−03 | 6.0E−04 | 0.65 | 0.65 | 0.67 | 616 | 691 | 150 | 27 | 67.5 | 26.5 | 26.5 | 691 | 108.75 |
| RPL37-GINS1 | 5.0E−04 | 2.8E−04 | 1.3E−03 | 0.64 | 0.64 | 0.64 | 119 | 100 | 288 | 89 | 85 | 229 | 85 | 288 | 109.5 |
| XRCC1-PREX1 | 1.1E−03 | 1.5E−03 | 5.3E−04 | 0.64 | 0.64 | 0.67 | 244 | 371 | 135 | 42 | 85 | 39.5 | 39.5 | 371 | 110 |
| SNX27-TATDN1 | 8.5E−04 | 7.5E−04 | 2.9E−04 | 0.64 | 0.64 | 0.66 | 205 | 240 | 82 | 74.5 | 138 | 72 | 72 | 240 | 110 |
| AEBP1-TM9SF1 | 3.4E−04 | 9.6E−04 | 3.7E−04 | 0.64 | 0.64 | 0.65 | 78 | 281 | 99 | 58.5 | 129.5 | 133 | 58.5 | 281 | 114.25 |
| SEC14L1-CALM3 | 6.5E−03 | 5.0E−03 | 8.3E−04 | 0.64 | 0.65 | 0.68 | 898 | 858 | 197 | 48.5 | 31.5 | 11 | 11 | 898 | 122.75 |
| TMEM49-ANXA11 | 3.2E−04 | 1.1E−03 | 1.3E−03 | 0.64 | 0.64 | 0.65 | 73 | 324 | 285 | 55.5 | 138 | 119 | 55.5 | 324 | 128.5 |
| C5orf62-RPS20 | 6.0E−03 | 4.4E−03 | 6.7E−04 | 0.64 | 0.64 | 0.66 | 846 | 787 | 163 | 74.5 | 98 | 72 | 72 | 846 | 130.5 |
| HMGB2-SEC14L1 | 3.5E−03 | 2.3E−03 | 1.1E−03 | 0.67 | 0.68 | 0.68 | 597 | 512 | 250 | 2 | 2.5 | 14 | 2 | 597 | 132 |
| ADRB2-AEBP1 | 1.3E−03 | 3.4E−03 | 6.2E−04 | 0.64 | 0.64 | 0.67 | 300 | 670 | 158 | 48.5 | 111.5 | 32 | 32 | 670 | 134.75 |
| VAMP2-MAF | 4.2E−04 | 3.2E−04 | 1.1E−03 | 0.63 | 0.64 | 0.63 | 102 | 112 | 242 | 142.5 | 129.5 | 389.5 | 102 | 389.5 | 136 |
| XRCC1-SEC14L1 | 8.8E−03 | 7.6E−03 | 1.0E−03 | 0.65 | 0.65 | 0.69 | 1127 | 1120 | 239 | 34 | 31.5 | 5.5 | 5.5 | 1127 | 136.5 |
| ABHD12-MRPL42 | 4.0E−03 | 3.4E−03 | 8.2E−04 | 0.64 | 0.65 | 0.66 | 661 | 660 | 193 | 80.5 | 64.5 | 50 | 50 | 661 | 136.75 |
| AEBP1-SARM1 | 7.8E−04 | 1.6E−03 | 1.5E−03 | 0.66 | 0.66 | 0.66 | 186 | 404 | 317 | 7 | 14 | 88 | 7 | 404 | 137 |
| TMEM49-AEBP1 | 8.5E−05 | 4.8E−04 | 1.4E−04 | 0.64 | 0.62 | 0.62 | 20 | 156 | 39 | 118 | 406 | 655.5 | 20 | 655.5 | 137 |
| MAF-LYRM5 | 2.4E−04 | 3.7E−04 | 1.2E−03 | 0.64 | 0.64 | 0.63 | 52 | 129 | 271 | 103.5 | 147.5 | 449.5 | 52 | 449.5 | 138.25 |
| VAMP2-PREX1 | 1.4E−04 | 9.1E−05 | 6.0E−05 | 0.62 | 0.63 | 0.63 | 32 | 25 | 16 | 245.5 | 253 | 349 | 16 | 349 | 138.75 |
| NDUFC1-SEC14L1 | 1.3E−02 | 8.2E−03 | 1.2E−03 | 0.67 | 0.67 | 0.69 | 1438 | 1180 | 274 | 5 | 6 | 8.5 | 5 | 1438 | 141.25 |
| C5orf62-RPL19 | 7.7E−03 | 5.1E−03 | 5.8E−04 | 0.63 | 0.64 | 0.66 | 1007 | 865 | 146 | 139 | 138 | 72 | 72 | 1007 | 142.5 |
| SELM-CRTAP | 3.3E−03 | 1.8E−03 | 6.0E−04 | 0.64 | 0.64 | 0.65 | 572 | 438 | 153 | 112.5 | 90.5 | 133 | 90.5 | 572 | 143 |
| AEBP1-ZFAND5 | 6.5E−04 | 1.5E−03 | 1.3E−04 | 0.63 | 0.63 | 0.65 | 148 | 380 | 37 | 145 | 226.5 | 100 | 37 | 380 | 146.5 |
| NPTN-AEBP1 | 7.9E−04 | 2.0E−03 | 1.6E−03 | 0.67 | 0.65 | 0.65 | 189 | 464 | 327 | 5 | 27 | 107 | 5 | 464 | 148 |
| C8orf33-SEC14L1 | 7.0E−03 | 4.6E−03 | 7.6E−04 | 0.64 | 0.65 | 0.69 | 942 | 812 | 184 | 116.5 | 36 | 7 | 7 | 942 | 150.25 |
| CRTAP-CALM3 | 1.4E−03 | 1.8E−03 | 5.1E−04 | 0.64 | 0.64 | 0.65 | 320 | 433 | 131 | 98 | 155.5 | 145 | 98 | 433 | 150.25 |
| VAMP2-FOXN2 | 1.3E−03 | 8.7E−04 | 7.0E−04 | 0.63 | 0.64 | 0.65 | 295 | 255 | 169 | 134.5 | 104.5 | 107 | 104.5 | 295 | 151.75 |
| SEC14L1-SON | 7.3E−03 | 4.3E−03 | 1.1E−03 | 0.65 | 0.66 | 0.66 | 977 | 780 | 244 | 38 | 18 | 60 | 18 | 977 | 152 |
| SEC14L1-RPS20 | 5.4E−03 | 3.0E−03 | 8.9E−04 | 0.64 | 0.65 | 0.65 | 811 | 608 | 204 | 103.5 | 45.5 | 107 | 45.5 | 811 | 155.5 |
| PREX1-C20orf111 | 3.1E−04 | 3.3E−04 | 2.9E−04 | 0.63 | 0.62 | 0.63 | 70 | 116 | 81 | 195.5 | 316.5 | 302 | 70 | 316.5 | 155.75 |
| NR2F6-PRKAR1B | 3.3E−03 | 5.5E−03 | 1.0E−03 | 0.65 | 0.65 | 0.66 | 580 | 910 | 236 | 30 | 58 | 80 | 30 | 910 | 158 |
| TMEM8B-C5orf62 | 1.7E−03 | 1.0E−03 | 1.7E−04 | 0.63 | 0.64 | 0.68 | 362 | 295 | 44 | 189.5 | 129.5 | 15.5 | 15.5 | 362 | 159.5 |
| VAMP2-TMEM5 | 8.6E−04 | 1.0E−03 | 1.6E−03 | 0.64 | 0.64 | 0.66 | 208 | 293 | 326 | 64 | 111.5 | 53.5 | 53.5 | 326 | 159.75 |
| AP2A1-MPP6 | 6.3E−03 | 8.2E−03 | 8.2E−04 | 0.64 | 0.64 | 0.67 | 882 | 1179 | 192 | 80.5 | 129.5 | 30 | 30 | 1179 | 160.75 |
| VAMP2-ABHD12 | 1.5E−05 | 1.3E−05 | 1.6E−06 | 0.61 | 0.62 | 0.63 | 3 | 5 | 2 | 579 | 324 | 389.5 | 2 | 579 | 164.5 |
| MT1E-SPG7 | 7.4E−04 | 2.8E−04 | 3.9E−03 | 0.63 | 0.64 | 0.62 | 174 | 98 | 644 | 158 | 118.5 | 517 | 98 | 644 | 166 |
| FLT3LG-GINS1 | 5.2E−04 | 2.3E−04 | 3.8E−04 | 0.62 | 0.63 | 0.62 | 123 | 83 | 101 | 285.5 | 209.5 | 517 | 83 | 517 | 166.25 |
| VAMP2-URM1 | 1.9E−05 | 6.0E−06 | 3.4E−05 | 0.62 | 0.62 | 0.61 | 4 | 2 | 10 | 435 | 324 | 1027.5 | 2 | 1027.5 | 167 |
| VAMP2-TMEM167B | 6.1E−03 | 2.4E−03 | 7.3E−04 | 0.63 | 0.64 | 0.66 | 860 | 520 | 176 | 158 | 81.5 | 80 | 80 | 860 | 167 |
| SEC14L1-SNURF | 9.3E−03 | 6.4E−03 | 1.3E−03 | 0.64 | 0.66 | 0.67 | 1171 | 1014 | 283 | 55.5 | 15 | 26.5 | 15 | 1171 | 169.25 |
| FOXN2-RPS20 | 2.1E−03 | 1.5E−03 | 9.5E−04 | 0.63 | 0.65 | 0.66 | 430 | 387 | 218 | 123 | 58 | 80 | 58 | 430 | 170.5 |
| SEPT6-GINS1 | 1.6E−04 | 1.6E−04 | 4.5E−04 | 0.62 | 0.63 | 0.63 | 39 | 45 | 118 | 229 | 268.5 | 449.5 | 39 | 449.5 | 173.5 |
| GINS1-RPL19 | 3.1E−04 | 1.7E−04 | 8.3E−04 | 0.63 | 0.63 | 0.62 | 69 | 50 | 196 | 158 | 209.5 | 517 | 50 | 517 | 177 |
| PLAC8-SEC14L1 | 1.4E−02 | 1.0E−02 | 1.6E−03 | 0.66 | 0.67 | 0.69 | 1508 | 1329 | 339 | 17.5 | 6 | 3 | 3 | 1508 | 178.25 |
| PPHLN1-SEC14L1 | 8.5E−03 | 7.5E−03 | 1.3E−03 | 0.64 | 0.65 | 0.66 | 1090 | 1113 | 282 | 74.5 | 25 | 44 | 25 | 1113 | 178.25 |
| TATDN1-SEC14L1 | 1.0E−02 | 5.1E−03 | 7.8E−04 | 0.63 | 0.64 | 0.66 | 1236 | 862 | 187 | 181.5 | 138 | 72 | 72 | 1236 | 184.25 |
| TMEM49-LYRM5 | 3.2E−05 | 9.1E−05 | 6.8E−05 | 0.62 | 0.62 | 0.63 | 10 | 26 | 19 | 344 | 422.5 | 434 | 10 | 434 | 185 |
| PDCD6IP-MT1E | 4.3E−04 | 1.9E−04 | 4.5E−03 | 0.62 | 0.63 | 0.61 | 104 | 58 | 703 | 207 | 165.5 | 958 | 58 | 958 | 186.25 |
| AEBP1-GRK6 | 9.6E−04 | 2.8E−03 | 6.3E−04 | 0.64 | 0.63 | 0.65 | 222 | 586 | 159 | 84 | 216.5 | 114 | 84 | 586 | 187.75 |
| CRTAP-MPP6 | 3.8E−03 | 4.8E−03 | 2.9E−04 | 0.63 | 0.63 | 0.65 | 646 | 833 | 84 | 145 | 226.5 | 154.5 | 84 | 833 | 190.5 |
| AEBP1-SNX27 | 1.3E−04 | 5.8E−04 | 1.7E−04 | 0.63 | 0.61 | 0.63 | 30 | 193 | 51 | 195.5 | 571 | 302 | 30 | 571 | 194.25 |
| VAMP2-GINS1 | 3.7E−05 | 2.1E−05 | 1.3E−04 | 0.62 | 0.62 | 0.61 | 11 | 8 | 36 | 402 | 355.5 | 861 | 8 | 861 | 195.75 |
| PREX1-MPP6 | 8.4E−04 | 1.0E−03 | 6.7E−05 | 0.63 | 0.63 | 0.66 | 203 | 307 | 18 | 189.5 | 238.5 | 88 | 18 | 307 | 196.25 |
| TATDN1-CCDC6 | 1.5E−02 | 6.4E−03 | 8.4E−04 | 0.63 | 0.63 | 0.67 | 1607 | 1026 | 199 | 199.5 | 173 | 23.5 | 23.5 | 1607 | 199.25 |
| NCOA4-SNURF | 4.7E−03 | 3.9E−03 | 1.9E−03 | 0.66 | 0.68 | 0.68 | 728 | 719 | 391 | 10 | 2.5 | 10 | 2.5 | 728 | 200.5 |
| SEC14L1-PAIP2 | 5.5E−03 | 2.8E−03 | 1.1E−03 | 0.63 | 0.64 | 0.65 | 814 | 584 | 261 | 129.5 | 77.5 | 145 | 77.5 | 814 | 203 |
| TMEM8B-TM9SF1 | 2.2E−03 | 1.2E−03 | 1.1E−03 | 0.63 | 0.64 | 0.65 | 463 | 337 | 259 | 149 | 121 | 128 | 121 | 463 | 204 |
| PREX1-SNURF | 6.4E−04 | 5.8E−04 | 3.2E−04 | 0.62 | 0.63 | 0.64 | 146 | 194 | 87 | 344 | 226.5 | 215 | 87 | 344 | 204.5 |
| AEBP1-NCOA4 | 2.6E−04 | 6.5E−04 | 1.2E−04 | 0.63 | 0.62 | 0.64 | 55 | 211 | 35 | 199.5 | 307 | 235 | 35 | 307 | 205.25 |
| VAMP2-SERPINB9 | 1.8E−03 | 1.1E−03 | 1.2E−03 | 0.63 | 0.64 | 0.65 | 388 | 316 | 269 | 129.5 | 111.5 | 145 | 111.5 | 388 | 207 |
| SELM-GINS1 | 9.8E−05 | 4.4E−05 | 2.1E−04 | 0.61 | 0.62 | 0.62 | 23 | 13 | 59 | 527 | 355.5 | 623.5 | 13 | 623.5 | 207.25 |
| GINS1-MT1G | 4.7E−04 | 2.4E−04 | 7.4E−03 | 0.62 | 0.63 | 0.61 | 114 | 86 | 1047 | 215.5 | 200.5 | 1068 | 86 | 1068 | 208 |
| AEBP1-SPG7 | 1.2E−04 | 2.2E−04 | 9.1E−05 | 0.62 | 0.61 | 0.61 | 29 | 74 | 28 | 344 | 571 | 834.5 | 28 | 834.5 | 209 |
| SEC14L1-KLF12 | 1.2E−02 | 7.3E−03 | 1.0E−03 | 0.63 | 0.64 | 0.66 | 1361 | 1091 | 231 | 189.5 | 90.5 | 50 | 50 | 1361 | 210.25 |
| SEC14L1-PRKAR1B | 7.7E−03 | 8.5E−03 | 7.5E−04 | 0.63 | 0.63 | 0.67 | 1009 | 1204 | 180 | 195.5 | 226.5 | 35.5 | 35.5 | 1204 | 211 |
| SMNDC1-SEC14L1 | 6.4E−03 | 4.5E−03 | 1.1E−03 | 0.63 | 0.64 | 0.65 | 894 | 801 | 251 | 172 | 147.5 | 162.5 | 147.5 | 894 | 211.5 |
| VAMP2-RARS2 | 4.3E−03 | 1.6E−03 | 1.5E−03 | 0.64 | 0.64 | 0.66 | 686 | 409 | 320 | 103.5 | 72.5 | 60 | 60 | 686 | 211.75 |
| STRADB-GINS1 | 3.4E−04 | 2.3E−04 | 4.5E−04 | 0.62 | 0.62 | 0.61 | 79 | 84 | 117 | 308.5 | 355.5 | 861 | 79 | 861 | 212.75 |
| HMGB2-PREX1 | 6.6E−04 | 6.5E−04 | 1.5E−03 | 0.63 | 0.63 | 0.62 | 153 | 210 | 325 | 195.5 | 226.5 | 599 | 153 | 599 | 218.25 |
| NCOA4-TATDN1 | 5.8E−04 | 2.1E−04 | 2.4E−05 | 0.61 | 0.62 | 0.63 | 136 | 70 | 6 | 449 | 422.5 | 302 | 6 | 449 | 219 |
| MRPL42-HEATR3 | 6.3E−03 | 1.6E−03 | 3.6E−03 | 0.66 | 0.67 | 0.67 | 880 | 399 | 614 | 8.5 | 4 | 39.5 | 4 | 880 | 219.25 |
| AEBP1-URM1 | 8.5E−04 | 2.2E−03 | 9.2E−04 | 0.64 | 0.63 | 0.63 | 206 | 499 | 213 | 116.5 | 226.5 | 434 | 116.5 | 499 | 219.75 |
| GINS1-LYRM5 | 5.1E−05 | 4.3E−05 | 2.3E−04 | 0.62 | 0.62 | 0.62 | 15 | 12 | 64 | 386.5 | 377 | 784 | 12 | 784 | 220.5 |
| CALM3-HEATR3 | 3.9E−03 | 9.7E−04 | 3.1E−03 | 0.63 | 0.64 | 0.65 | 653 | 282 | 553 | 164 | 77.5 | 145 | 77.5 | 653 | 223 |
| TMEM49-SNUPN | 3.6E−04 | 6.1E−04 | 7.2E−04 | 0.62 | 0.62 | 0.62 | 84 | 201 | 174 | 245.5 | 467 | 683.5 | 84 | 683.5 | 223.25 |
| SNX27-MPP6 | 9.8E−04 | 2.0E−03 | 2.6E−04 | 0.63 | 0.62 | 0.64 | 225 | 468 | 71 | 172 | 355.5 | 222.5 | 71 | 468 | 223.75 |
| PREX1-C8orf33 | 1.7E−03 | 1.7E−03 | 9.3E−04 | 0.63 | 0.63 | 0.64 | 369 | 423 | 214 | 189.5 | 238.5 | 198.5 | 189.5 | 423 | 226.25 |
| TMEM49-MPP6 | 1.7E−04 | 5.6E−04 | 3.5E−05 | 0.62 | 0.61 | 0.62 | 41 | 187 | 11 | 271 | 571 | 599 | 11 | 599 | 229 |
| HEMK1-GINS1 | 5.0E−04 | 2.7E−04 | 6.0E−04 | 0.62 | 0.62 | 0.63 | 120 | 95 | 151 | 308.5 | 355.5 | 449.5 | 95 | 449.5 | 229.75 |
| SMARCB1-SEC14L1 | 1.3E−02 | 5.9E−03 | 1.8E−03 | 0.64 | 0.65 | 0.66 | 1481 | 955 | 364 | 98 | 52.5 | 94 | 52.5 | 1481 | 231 |
| TMEM8B-SEC14L1 | 1.0E−03 | 4.6E−04 | 1.2E−04 | 0.61 | 0.62 | 0.64 | 236 | 149 | 34 | 807.5 | 366 | 231.5 | 34 | 807.5 | 233.75 |
| SELM-C5orf62 | 1.4E−02 | 9.2E−03 | 1.5E−03 | 0.64 | 0.64 | 0.66 | 1533 | 1257 | 322 | 103.5 | 147.5 | 60 | 60 | 1533 | 234.75 |
| RPL37-C5orf62 | 1.7E−02 | 1.1E−02 | 1.8E−03 | 0.64 | 0.64 | 0.66 | 1678 | 1436 | 379 | 93.5 | 81.5 | 80 | 80 | 1678 | 236.25 |
| SEC14L1-YY1AP1 | 6.0E−03 | 3.1E−03 | 1.1E−03 | 0.62 | 0.64 | 0.64 | 850 | 619 | 258 | 215.5 | 155.5 | 206.5 | 155.5 | 850 | 236.75 |
| ZFAND5-C20orf111 | 1.3E−03 | 7.3E−04 | 1.8E−04 | 0.62 | 0.63 | 0.64 | 291 | 234 | 54 | 245.5 | 181 | 247.5 | 54 | 291 | 239.75 |
| ABHD12-CALM3 | 9.6E−04 | 1.6E−03 | 1.7E−04 | 0.62 | 0.62 | 0.66 | 220 | 397 | 48 | 261.5 | 440 | 88 | 48 | 440 | 240.75 |
| TMEM8B-C16orf53 | 3.8E−03 | 1.7E−03 | 2.6E−03 | 0.65 | 0.66 | 0.66 | 638 | 416 | 488 | 28 | 13 | 66 | 13 | 638 | 241 |
| TMEM49-MT1E | 1.9E−04 | 1.0E−04 | 1.9E−03 | 0.62 | 0.63 | 0.62 | 44 | 29 | 383 | 294.5 | 200.5 | 784 | 29 | 784 | 247.5 |
| MAST2-MT1E | 3.7E−04 | 1.6E−04 | 2.1E−03 | 0.62 | 0.63 | 0.62 | 87 | 44 | 406 | 294.5 | 200.5 | 570.5 | 44 | 570.5 | 247.5 |
| PREX1-AAK1 | 8.2E−03 | 7.8E−03 | 6.3E−04 | 0.62 | 0.63 | 0.66 | 1045 | 1143 | 161 | 294.5 | 200.5 | 53.5 | 53.5 | 1143 | 247.5 |
| MT1E-SARM1 | 7.5E−04 | 3.2E−04 | 6.2E−03 | 0.62 | 0.63 | 0.62 | 178 | 109 | 919 | 294.5 | 200.5 | 784 | 109 | 919 | 247.5 |
| ABHD12-RPS20 | 1.7E−03 | 1.4E−03 | 5.0E−04 | 0.62 | 0.63 | 0.65 | 364 | 365 | 129 | 308.5 | 189 | 162.5 | 129 | 365 | 248.75 |
| AEBP1-NSUN5 | 1.4E−04 | 4.5E−04 | 3.1E−04 | 0.62 | 0.61 | 0.61 | 37 | 148 | 86 | 350 | 749.5 | 897.5 | 37 | 897.5 | 249 |
| TMEM49-CALM3 | 2.2E−05 | 1.2E−04 | 1.7E−04 | 0.61 | 0.61 | 0.62 | 6 | 32 | 50 | 449 | 1000.5 | 599 | 6 | 1000.5 | 249.5 |
| LAPTM5-LYRM5 | 3.4E−03 | 5.2E−03 | 2.3E−03 | 0.66 | 0.66 | 0.66 | 586 | 886 | 447 | 17.5 | 18 | 60 | 17.5 | 886 | 253.5 |
| MT1E-SHMT1 | 9.1E−04 | 4.1E−04 | 8.4E−03 | 0.62 | 0.63 | 0.62 | 214 | 137 | 1123 | 294.5 | 200.5 | 784 | 137 | 1123 | 254.25 |
| VAMP2-AP2A1 | 3.0E−04 | 2.2E−04 | 1.2E−04 | 0.61 | 0.61 | 0.63 | 67 | 79 | 33 | 762.5 | 775 | 434 | 33 | 775 | 256.5 |
| NCOA4-SNUPN | 4.8E−03 | 2.8E−03 | 1.2E−03 | 0.63 | 0.63 | 0.64 | 748 | 587 | 266 | 181.5 | 253 | 180 | 180 | 748 | 259.5 |
| LAPTM5-RPL19 | 4.0E−03 | 3.4E−03 | 1.7E−03 | 0.63 | 0.64 | 0.65 | 668 | 669 | 352 | 172 | 104.5 | 162.5 | 104.5 | 669 | 262 |
| VAMP2-CCDC6 | 9.8E−04 | 3.9E−04 | 1.0E−04 | 0.61 | 0.62 | 0.63 | 226 | 134 | 29 | 595 | 316.5 | 302 | 29 | 595 | 264 |
| PREX1-LYRM5 | 1.2E−03 | 1.2E−03 | 6.3E−04 | 0.62 | 0.63 | 0.63 | 280 | 331 | 160 | 245.5 | 253 | 499.5 | 160 | 499.5 | 266.5 |
| PREX1-SMARCB1 | 4.1E−03 | 2.2E−03 | 2.2E−03 | 0.64 | 0.64 | 0.66 | 672 | 498 | 426 | 108 | 98 | 44 | 44 | 672 | 267 |
| RPL37-MAF | 1.4E−03 | 1.1E−03 | 5.1E−03 | 0.64 | 0.64 | 0.64 | 322 | 310 | 788 | 89 | 85 | 229 | 85 | 788 | 269.5 |
| GINS1-RPS20 | 2.0E−04 | 1.2E−04 | 5.5E−04 | 0.62 | 0.62 | 0.61 | 46 | 34 | 139 | 402 | 495.5 | 1164.5 | 34 | 1164.5 | 270.5 |
| XPO1-SEC14L1 | 2.0E−02 | 1.6E−02 | 2.5E−03 | 0.64 | 0.65 | 0.67 | 1837 | 1679 | 480 | 64 | 52.5 | 32 | 32 | 1837 | 272 |
| MRPL42-CCDC6 | 1.6E−02 | 8.1E−03 | 2.0E−03 | 0.63 | 0.64 | 0.66 | 1645 | 1171 | 402 | 147.5 | 124 | 66 | 66 | 1645 | 274.75 |
| RCHY1-MT1E | 1.2E−03 | 5.2E−04 | 5.1E−03 | 0.62 | 0.63 | 0.62 | 264 | 168 | 786 | 285.5 | 209.5 | 517 | 168 | 786 | 274.75 |
| PRPF3-MT1E | 1.2E−03 | 5.2E−04 | 7.3E−03 | 0.62 | 0.63 | 0.61 | 266 | 167 | 1030 | 285.5 | 209.5 | 958 | 167 | 1030 | 275.75 |
| GINS1-CALM3 | 6.3E−05 | 5.1E−05 | 2.4E−04 | 0.61 | 0.62 | 0.62 | 17 | 18 | 65 | 527 | 495.5 | 623.5 | 17 | 623.5 | 280.25 |
| GCH1-C20orf111 | 1.4E−03 | 3.2E−03 | 3.1E−03 | 0.64 | 0.64 | 0.64 | 313 | 645 | 560 | 74.5 | 138 | 247.5 | 74.5 | 645 | 280.25 |
| AEBP1-PDCD6IP | 8.0E−04 | 2.5E−03 | 9.8E−04 | 0.63 | 0.62 | 0.63 | 190 | 541 | 226 | 139 | 337.5 | 349 | 139 | 541 | 281.75 |
| NCOA4-C20orf111 | 5.7E−04 | 4.7E−04 | 3.5E−04 | 0.62 | 0.62 | 0.63 | 133 | 151 | 96 | 417.5 | 467 | 499.5 | 96 | 499.5 | 284.25 |
| TMEM8B-VTI1B | 1.1E−03 | 7.7E−04 | 5.4E−04 | 0.61 | 0.61 | 0.63 | 240 | 242 | 136 | 606 | 749.5 | 330.5 | 136 | 749.5 | 286.25 |
| MT1E-RNPEP | 4.7E−04 | 2.8E−04 | 2.8E−03 | 0.62 | 0.63 | 0.61 | 115 | 99 | 514 | 294.5 | 285 | 1068 | 99 | 1068 | 289.75 |
| MT1E-C5orf32 | 8.6E−05 | 4.9E−05 | 9.0E−04 | 0.62 | 0.62 | 0.61 | 21 | 16 | 207 | 373.5 | 393 | 1276.5 | 16 | 1276.5 | 290.25 |
| FOXN2-LYRM5 | 1.6E−03 | 1.7E−03 | 7.2E−04 | 0.62 | 0.63 | 0.64 | 345 | 424 | 173 | 435 | 238.5 | 198.5 | 173 | 435 | 291.75 |
| LYRM5-C5orf62 | 8.2E−03 | 7.5E−03 | 1.0E−03 | 0.62 | 0.62 | 0.65 | 1061 | 1110 | 233 | 229 | 355.5 | 162.5 | 162.5 | 1110 | 294.25 |
| SEC14L1-HNRNPD | 2.2E−03 | 1.3E−03 | 1.1E−03 | 0.63 | 0.63 | 0.63 | 455 | 348 | 241 | 181.5 | 181 | 499.5 | 181 | 499.5 | 294.5 |
| MRPL42-SEC14L1 | 1.4E−02 | 8.4E−03 | 2.5E−03 | 0.64 | 0.65 | 0.66 | 1525 | 1194 | 479 | 112.5 | 64.5 | 50 | 50 | 1525 | 295.75 |
| TMEM49-TMEM8B | 1.2E−03 | 1.1E−03 | 9.0E−04 | 0.63 | 0.62 | 0.62 | 277 | 317 | 208 | 151 | 345 | 520.5 | 151 | 520.5 | 297 |
| VAMP2-SERBP1 | 6.8E−04 | 2.0E−04 | 1.4E−04 | 0.61 | 0.62 | 0.61 | 157 | 67 | 38 | 579 | 440 | 1027.5 | 38 | 1027.5 | 298.5 |
| TMEM8B-SPG7 | 2.3E−03 | 6.6E−04 | 7.5E−04 | 0.61 | 0.63 | 0.63 | 468 | 218 | 182 | 466.5 | 276 | 324 | 182 | 468 | 300 |
| LYRM5-TPT1 | 1.9E−03 | 2.6E−03 | 1.7E−03 | 0.64 | 0.64 | 0.64 | 405 | 550 | 353 | 74.5 | 98 | 247.5 | 74.5 | 550 | 300.25 |
| NSUN5-MPP6 | 8.5E−04 | 9.2E−04 | 3.5E−04 | 0.62 | 0.62 | 0.63 | 207 | 269 | 97 | 417.5 | 337.5 | 349 | 97 | 417.5 | 303.25 |
| MRPL42-FOXN2 | 5.5E−03 | 4.0E−03 | 2.4E−03 | 0.63 | 0.65 | 0.67 | 815 | 742 | 460 | 147.5 | 63 | 23.5 | 23.5 | 815 | 303.75 |
| SELM-AP2A1 | 5.1E−03 | 3.2E−03 | 1.7E−03 | 0.62 | 0.63 | 0.65 | 772 | 635 | 346 | 261.5 | 177.5 | 133 | 133 | 772 | 303.75 |
| AEBP1-ABHD12 | 7.0E−04 | 2.1E−03 | 2.7E−04 | 0.62 | 0.62 | 0.64 | 164 | 472 | 76 | 355 | 544 | 271.5 | 76 | 544 | 313.25 |
| AEBP1-SERPINB9 | 6.2E−04 | 1.4E−03 | 6.0E−04 | 0.62 | 0.62 | 0.62 | 144 | 370 | 155 | 261.5 | 440 | 547.5 | 144 | 547.5 | 315.75 |
| IL1RN-MT1G | 1.6E−03 | 9.8E−04 | 1.3E−02 | 0.63 | 0.64 | 0.62 | 354 | 283 | 1450 | 164 | 155.5 | 570.5 | 155.5 | 1450 | 318.5 |
| ABHD12-RPL19 | 1.5E−03 | 1.0E−03 | 2.6E−04 | 0.62 | 0.62 | 0.64 | 338 | 300 | 72 | 417.5 | 337.5 | 180 | 72 | 417.5 | 318.75 |
| PREX1-MT1E | 2.6E−04 | 1.2E−04 | 1.7E−03 | 0.62 | 0.63 | 0.61 | 57 | 33 | 356 | 386.5 | 285 | 1068 | 33 | 1068 | 320.5 |
| GINS1-KLF12 | 2.6E−04 | 1.8E−04 | 5.7E−04 | 0.61 | 0.62 | 0.62 | 59 | 54 | 145 | 501.5 | 521.5 | 784 | 54 | 784 | 323.25 |
| CBX5-PREX1 | 1.9E−03 | 1.6E−03 | 5.4E−04 | 0.62 | 0.63 | 0.64 | 406 | 394 | 137 | 417.5 | 253 | 247.5 | 137 | 417.5 | 323.5 |
| SNX27-TMEM8B | 1.5E−03 | 1.1E−03 | 8.4E−04 | 0.62 | 0.62 | 0.62 | 326 | 321 | 198 | 276 | 449 | 578 | 198 | 578 | 323.5 |
| TMEM8B-AP2A1 | 2.8E−03 | 1.9E−03 | 1.1E−03 | 0.62 | 0.63 | 0.65 | 521 | 451 | 255 | 357 | 293.5 | 153 | 153 | 521 | 325.25 |
| VAMP2-STAM | 9.6E−04 | 5.2E−04 | 3.8E−04 | 0.62 | 0.61 | 0.60 | 221 | 166 | 103 | 435 | 803 | 1352 | 103 | 1352 | 328 |
| SMNDC1-PREX1 | 2.7E−03 | 3.3E−03 | 5.5E−03 | 0.64 | 0.65 | 0.65 | 512 | 657 | 846 | 48.5 | 52.5 | 145 | 48.5 | 846 | 328.5 |
| AEBP1-DGKA | 1.5E−03 | 4.7E−03 | 4.4E−03 | 0.64 | 0.63 | 0.63 | 341 | 823 | 699 | 68 | 268.5 | 316.5 | 68 | 823 | 328.75 |
| HMGB2-C5orf32 | 1.1E−03 | 2.0E−03 | 4.9E−03 | 0.64 | 0.64 | 0.63 | 251 | 457 | 760 | 48.5 | 111.5 | 408 | 48.5 | 760 | 329.5 |
| ERMP1-GINS1 | 2.1E−03 | 1.5E−03 | 2.3E−03 | 0.63 | 0.64 | 0.64 | 429 | 374 | 434 | 164 | 111.5 | 288 | 111.5 | 434 | 331 |
| AEBP1-C16orf53 | 4.1E−04 | 1.1E−03 | 9.7E−04 | 0.62 | 0.61 | 0.62 | 101 | 320 | 223 | 344 | 775 | 599 | 101 | 775 | 332 |
| XRCC1-SNX27 | 1.6E−03 | 4.3E−03 | 2.4E−03 | 0.63 | 0.63 | 0.63 | 351 | 768 | 461 | 134.5 | 268.5 | 316.5 | 134.5 | 768 | 333.75 |
| MT1E-DPP7 | 6.5E−04 | 3.7E−04 | 5.5E−03 | 0.62 | 0.63 | 0.61 | 151 | 128 | 835 | 386.5 | 285 | 1068 | 128 | 1068 | 335.75 |
| FGFR1OP2-MT1E | 1.0E−03 | 4.1E−04 | 3.3E−03 | 0.62 | 0.63 | 0.61 | 232 | 139 | 584 | 386.5 | 285 | 1068 | 139 | 1068 | 335.75 |
| MT1E-IKBKB | 1.2E−03 | 5.7E−04 | 9.0E−03 | 0.62 | 0.63 | 0.62 | 284 | 190 | 1177 | 386.5 | 285 | 784 | 190 | 1177 | 335.75 |
| C5orf32-MT1H | 5.4E−04 | 5.2E−04 | 9.8E−03 | 0.62 | 0.62 | 0.60 | 126 | 169 | 1248 | 363.5 | 311.5 | 1828.5 | 126 | 1828.5 | 337.5 |
| AEBP1-FOXN2 | 1.1E−03 | 3.3E−03 | 8.6E−04 | 0.62 | 0.61 | 0.63 | 253 | 650 | 200 | 350 | 749.5 | 330.5 | 200 | 749.5 | 340.25 |
| MT1E-CH25H | 2.6E−04 | 8.0E−05 | 9.5E−04 | 0.61 | 0.62 | 0.60 | 56 | 21 | 217 | 705.5 | 467 | 1635 | 21 | 1635 | 342 |
| TMEM8B-SERPINB9 | 1.2E−03 | 5.5E−04 | 4.7E−04 | 0.60 | 0.60 | 0.63 | 265 | 185 | 124 | 1036 | 1179.5 | 421.5 | 124 | 1179.5 | 343.25 |
| NCOA4-SMARCB1 | 5.2E−03 | 2.2E−03 | 1.8E−03 | 0.62 | 0.63 | 0.63 | 780 | 492 | 372 | 308.5 | 189 | 316.5 | 189 | 780 | 344.25 |
| XRCC1-GINS1 | 2.3E−04 | 2.2E−04 | 8.2E−04 | 0.61 | 0.61 | 0.61 | 51 | 76 | 194 | 501.5 | 695.5 | 1068 | 51 | 1068 | 347.75 |
| MAF-RPL19 | 3.3E−04 | 2.3E−04 | 1.1E−03 | 0.61 | 0.62 | 0.60 | 75 | 80 | 256 | 579 | 440 | 1352 | 75 | 1352 | 348 |
| MAST2-MT1H | 1.7E−03 | 1.2E−03 | 1.7E−02 | 0.64 | 0.64 | 0.63 | 368 | 335 | 1704 | 85 | 70 | 426 | 70 | 1704 | 351.5 |
| TMEM8B-EIF4H | 3.7E−03 | 2.2E−03 | 1.7E−03 | 0.62 | 0.63 | 0.65 | 628 | 506 | 354 | 350 | 216.5 | 114 | 114 | 628 | 352 |
| RPL37-SEC14L1 | 1.6E−02 | 7.7E−03 | 2.4E−03 | 0.62 | 0.64 | 0.64 | 1642 | 1133 | 463 | 245.5 | 98 | 180 | 98 | 1642 | 354.25 |
| VAMP2-EIF4H | 2.6E−03 | 1.5E−03 | 1.7E−03 | 0.62 | 0.63 | 0.63 | 492 | 384 | 344 | 285.5 | 165.5 | 365.5 | 165.5 | 492 | 354.75 |
| VAMP2-AKIRIN2 | 1.9E−03 | 1.9E−03 | 2.6E−04 | 0.62 | 0.62 | 0.64 | 404 | 450 | 74 | 308.5 | 495.5 | 222.5 | 74 | 495.5 | 356.25 |
| VAMP2-GPBAR1 | 1.2E−03 | 1.4E−03 | 4.1E−04 | 0.62 | 0.62 | 0.63 | 279 | 363 | 107 | 402 | 355.5 | 449.5 | 107 | 449.5 | 359.25 |
| SMYD3-SEC14L1 | 1.2E−02 | 1.0E−02 | 1.8E−03 | 0.62 | 0.62 | 0.65 | 1365 | 1359 | 382 | 323.5 | 337.5 | 119 | 119 | 1365 | 359.75 |
| PLAC8-GINS1 | 1.1E−04 | 8.1E−05 | 2.5E−04 | 0.61 | 0.61 | 0.60 | 24 | 22 | 69 | 654.5 | 905 | 1810 | 22 | 1810 | 361.75 |
| TMEM8B-SIPA1L2 | 5.4E−03 | 3.8E−03 | 3.6E−03 | 0.63 | 0.64 | 0.65 | 809 | 709 | 610 | 119 | 122.5 | 111.5 | 111.5 | 809 | 366.25 |
| RABL2B-GINS1 | 4.2E−05 | 3.1E−05 | 1.7E−04 | 0.60 | 0.61 | 0.62 | 14 | 10 | 49 | 846.5 | 695.5 | 784 | 10 | 846.5 | 372.25 |
| FOXN2-RPL19 | 4.7E−03 | 2.7E−03 | 1.8E−03 | 0.62 | 0.63 | 0.66 | 732 | 575 | 368 | 386.5 | 200.5 | 94 | 94 | 732 | 377.25 |
| CRTAP-RPS20 | 2.4E−03 | 1.8E−03 | 9.8E−04 | 0.62 | 0.62 | 0.64 | 479 | 442 | 227 | 435 | 324 | 198.5 | 198.5 | 479 | 379.5 |
| MAF-MT1E | 5.6E−04 | 3.0E−04 | 4.6E−03 | 0.62 | 0.62 | 0.60 | 131 | 104 | 721 | 386.5 | 377 | 1391.5 | 104 | 1391.5 | 381.75 |
| TMEM8B-ZFAND5 | 4.1E−03 | 3.1E−03 | 1.2E−03 | 0.61 | 0.63 | 0.64 | 679 | 622 | 268 | 462 | 302.5 | 193 | 193 | 679 | 382.25 |
| ADRB2-MT1H | 6.7E−04 | 5.7E−04 | 5.0E−03 | 0.62 | 0.62 | 0.61 | 156 | 191 | 770 | 373.5 | 393 | 1276.5 | 156 | 1276.5 | 383.25 |
| VAMP2-CTCF | 4.7E−03 | 1.6E−03 | 1.9E−03 | 0.62 | 0.64 | 0.62 | 731 | 393 | 393 | 215.5 | 111.5 | 570.5 | 111.5 | 731 | 393 |
| ANXA11-GINS1 | 7.1E−04 | 5.0E−04 | 2.1E−03 | 0.62 | 0.61 | 0.61 | 170 | 164 | 415 | 373.5 | 714.5 | 1276.5 | 164 | 1276.5 | 394.25 |
| RPUSD1-PRKAR1B | 6.5E−04 | 1.4E−03 | 5.7E−04 | 0.59 | 0.59 | 0.63 | 149 | 368 | 142 | 1563 | 1972 | 421.5 | 142 | 1972 | 394.75 |
| AEBP1-CCDC6 | 2.2E−03 | 4.5E−03 | 7.2E−04 | 0.62 | 0.62 | 0.64 | 442 | 798 | 172 | 350 | 554 | 235 | 172 | 798 | 396 |
| PREX1-MRPL42 | 8.0E−03 | 6.1E−03 | 4.2E−03 | 0.64 | 0.64 | 0.66 | 1030 | 986 | 681 | 112.5 | 90.5 | 88 | 88 | 1030 | 396.75 |
| LYRM5-GPBAR1 | 7.6E−03 | 1.1E−02 | 2.8E−03 | 0.62 | 0.63 | 0.66 | 998 | 1434 | 512 | 215.5 | 285 | 94 | 94 | 1434 | 398.5 |
| NCOA4-RPS20 | 6.2E−04 | 3.4E−04 | 2.0E−04 | 0.59 | 0.60 | 0.62 | 143 | 118 | 58 | 1802 | 1236 | 655.5 | 58 | 1802 | 399.25 |
| FOXN2-MPP6 | 1.7E−03 | 2.5E−03 | 9.1E−05 | 0.62 | 0.61 | 0.66 | 366 | 539 | 27 | 435 | 592 | 88 | 27 | 592 | 400.5 |
| SEC14L1-AKIRIN2 | 1.4E−02 | 6.0E−03 | 4.6E−03 | 0.64 | 0.66 | 0.66 | 1531 | 975 | 718 | 48.5 | 20.5 | 94 | 20.5 | 1531 | 406 |
| SELM-SEC14L1 | 6.5E−03 | 2.9E−03 | 6.0E−04 | 0.62 | 0.63 | 0.63 | 901 | 601 | 152 | 435 | 238.5 | 389.5 | 152 | 901 | 412.25 |
| LYRM5-DPP7 | 2.4E−03 | 4.0E−03 | 1.0E−02 | 0.64 | 0.64 | 0.63 | 481 | 729 | 1282 | 74.5 | 98 | 349 | 74.5 | 1282 | 415 |
| HMGB2-C5orf62 | 1.2E−02 | 1.2E−02 | 4.0E−03 | 0.64 | 0.63 | 0.64 | 1410 | 1448 | 651 | 93.5 | 165.5 | 188 | 93.5 | 1448 | 419.5 |
| AEBP1-TPT1 | 2.2E−03 | 6.9E−03 | 2.7E−03 | 0.64 | 0.63 | 0.63 | 450 | 1055 | 509 | 112.5 | 238.5 | 389.5 | 112.5 | 1055 | 419.75 |
| CRTAP-SMARCB1 | 1.3E−02 | 7.8E−03 | 5.0E−03 | 0.64 | 0.65 | 0.66 | 1467 | 1138 | 774 | 55.5 | 67.5 | 72 | 55.5 | 1467 | 423 |
| SNX27-DGKA | 8.7E−03 | 1.8E−02 | 4.6E−03 | 0.64 | 0.64 | 0.65 | 1112 | 1798 | 712 | 108 | 138 | 119 | 108 | 1798 | 425 |
| TMEM49-SMARCB1 | 4.5E−03 | 5.4E−03 | 9.3E−03 | 0.63 | 0.64 | 0.65 | 714 | 902 | 1210 | 142.5 | 129.5 | 133 | 129.5 | 1210 | 428.25 |
| AEBP1-CH25H | 1.8E−03 | 1.6E−03 | 7.5E−04 | 0.61 | 0.61 | 0.63 | 391 | 395 | 179 | 807.5 | 896.5 | 464.5 | 179 | 896.5 | 429.75 |
| NCOA4-MPP5 | 2.0E−03 | 1.9E−03 | 4.3E−04 | 0.61 | 0.61 | 0.64 | 419 | 444 | 112 | 736 | 592 | 279.5 | 112 | 736 | 431.5 |
| NDUFC1-GINS1 | 4.4E−04 | 3.1E−04 | 1.0E−03 | 0.61 | 0.61 | 0.62 | 106 | 108 | 240 | 705.5 | 624.5 | 683.5 | 106 | 705.5 | 432.25 |
| NSUN5-KLF12 | 6.2E−03 | 3.9E−03 | 8.6E−03 | 0.64 | 0.65 | 0.65 | 869 | 720 | 1143 | 64 | 31.5 | 145 | 31.5 | 1143 | 432.5 |
| TATDN1-GINS1 | 6.8E−05 | 3.3E−05 | 8.7E−05 | 0.60 | 0.61 | 0.61 | 18 | 11 | 24 | 1128.5 | 843 | 934.5 | 11 | 1128.5 | 433.5 |
| VAMP2-GCA | 1.9E−02 | 1.5E−02 | 3.9E−03 | 0.63 | 0.63 | 0.64 | 1782 | 1632 | 638 | 154.5 | 171.5 | 229 | 154.5 | 1782 | 433.5 |
| TATDN1-C5orf62 | 1.5E−02 | 9.8E−03 | 1.2E−03 | 0.61 | 0.62 | 0.65 | 1590 | 1309 | 264 | 449 | 422.5 | 100 | 100 | 1590 | 435.75 |
| HMGB2-URM1 | 2.5E−03 | 1.6E−03 | 1.4E−02 | 0.63 | 0.63 | 0.62 | 483 | 389 | 1554 | 172 | 189 | 623.5 | 172 | 1554 | 436 |
| SNX27-MT1E | 3.7E−04 | 1.9E−04 | 2.7E−03 | 0.61 | 0.62 | 0.60 | 88 | 61 | 500 | 501.5 | 377 | 1391.5 | 61 | 1391.5 | 438.5 |
| TMEM8B-NSUN5 | 5.1E−03 | 2.6E−03 | 4.3E−03 | 0.63 | 0.64 | 0.63 | 775 | 554 | 686 | 150 | 75 | 324 | 75 | 775 | 439 |
| ABHD12-SEPT6 | 1.3E−02 | 2.1E−02 | 3.6E−03 | 0.62 | 0.63 | 0.65 | 1477 | 1980 | 607 | 271 | 226.5 | 100 | 100 | 1980 | 439 |
| NSUN5-MT1E | 7.6E−04 | 3.5E−04 | 5.6E−03 | 0.61 | 0.62 | 0.60 | 181 | 124 | 860 | 501.5 | 377 | 1391.5 | 124 | 1391.5 | 439.25 |
| MT1E-C7orf68 | 1.1E−03 | 3.9E−04 | 5.4E−03 | 0.61 | 0.62 | 0.60 | 238 | 136 | 832 | 501.5 | 377 | 1391.5 | 136 | 1391.5 | 439.25 |
| MT1E-TIMM23 | 9.7E−04 | 4.4E−04 | 5.2E−03 | 0.61 | 0.62 | 0.61 | 223 | 147 | 797 | 501.5 | 377 | 1068 | 147 | 1068 | 439.25 |
| MT1E-RANBP1 | 8.7E−04 | 4.7E−04 | 7.3E−03 | 0.61 | 0.62 | 0.60 | 209 | 153 | 1034 | 501.5 | 377 | 1391.5 | 153 | 1391.5 | 439.25 |
| SMNDC1-MT1E | 1.2E−03 | 5.3E−04 | 6.0E−03 | 0.61 | 0.62 | 0.61 | 270 | 175 | 893 | 501.5 | 377 | 1068 | 175 | 1068 | 439.25 |
| MT1E-CD2BP2 | 1.1E−03 | 5.3E−04 | 7.7E−03 | 0.61 | 0.62 | 0.60 | 261 | 176 | 1067 | 501.5 | 377 | 1391.5 | 176 | 1391.5 | 439.25 |
| MT1E-DGKH | 7.7E−04 | 3.2E−04 | 4.2E−03 | 0.61 | 0.62 | 0.61 | 182 | 110 | 676 | 527 | 355.5 | 861 | 110 | 861 | 441.25 |
| SEC14L1-SNRPC | 1.2E−02 | 6.4E−03 | 4.7E−03 | 0.63 | 0.64 | 0.65 | 1407 | 1019 | 729 | 134.5 | 104.5 | 162.5 | 104.5 | 1407 | 445.75 |
| PSMD7-ABHD12 | 4.5E−03 | 6.1E−03 | 5.0E−03 | 0.63 | 0.64 | 0.65 | 713 | 984 | 766 | 181.5 | 138 | 119 | 119 | 984 | 447.25 |
| SMARCB1-GINS1 | 4.1E−04 | 2.0E−04 | 1.2E−03 | 0.60 | 0.61 | 0.62 | 100 | 68 | 275 | 917.5 | 624.5 | 683.5 | 68 | 917.5 | 449.75 |
| SNX27-SNURF | 4.1E−03 | 6.0E−03 | 4.9E−03 | 0.63 | 0.63 | 0.65 | 677 | 973 | 753 | 195.5 | 226.5 | 100 | 100 | 973 | 451.75 |
| SEC14L1-CRLF3 | 1.7E−02 | 1.7E−02 | 5.0E−03 | 0.63 | 0.64 | 0.66 | 1709 | 1770 | 771 | 139 | 98 | 44 | 44 | 1770 | 455 |
| SEC14L1-YPEL5 | 4.6E−03 | 2.9E−03 | 3.5E−03 | 0.64 | 0.65 | 0.63 | 724 | 595 | 604 | 52.5 | 45.5 | 316.5 | 45.5 | 724 | 455.75 |
| NCOA4-MRPL42 | 1.3E−03 | 7.4E−04 | 3.2E−04 | 0.61 | 0.61 | 0.62 | 311 | 235 | 88 | 617 | 708.5 | 808 | 88 | 808 | 464 |
| C5orf62-TMEM167B | 1.3E−02 | 1.6E−02 | 3.8E−03 | 0.63 | 0.63 | 0.64 | 1423 | 1672 | 631 | 158 | 297.5 | 262 | 158 | 1672 | 464.25 |
| NCOA4-CALM3 | 7.9E−04 | 8.2E−04 | 3.0E−04 | 0.60 | 0.60 | 0.62 | 188 | 247 | 85 | 917.5 | 1100 | 683.5 | 85 | 1100 | 465.25 |
| VAMP2-HEATR3 | 2.1E−03 | 4.8E−04 | 1.4E−03 | 0.60 | 0.62 | 0.61 | 436 | 160 | 300 | 875.5 | 495.5 | 1164.5 | 160 | 1164.5 | 465.75 |
| CRTAP-TATDN1 | 2.7E−03 | 1.5E−03 | 2.4E−04 | 0.61 | 0.61 | 0.63 | 509 | 382 | 66 | 762.5 | 775 | 434 | 66 | 775 | 471.5 |
| VAMP2-UBXN4 | 9.3E−03 | 5.7E−03 | 2.2E−03 | 0.61 | 0.62 | 0.65 | 1162 | 941 | 422 | 527 | 355.5 | 162.5 | 162.5 | 1162 | 474.5 |
| C20orf111-C5orf32 | 1.5E−03 | 2.6E−03 | 4.2E−03 | 0.63 | 0.62 | 0.61 | 333 | 548 | 685 | 154.5 | 401.5 | 874 | 154.5 | 874 | 474.75 |
| VTI1B-MT1E | 4.3E−04 | 2.4E−04 | 2.4E−03 | 0.61 | 0.62 | 0.60 | 103 | 85 | 455 | 527 | 495.5 | 1513 | 85 | 1513 | 475.25 |
| AEBP1-MAST2 | 7.4E−04 | 1.8E−03 | 7.2E−04 | 0.61 | 0.60 | 0.61 | 175 | 432 | 175 | 527 | 1394.5 | 1164.5 | 175 | 1394.5 | 479.5 |
| NCOA4-RPL19 | 8.0E−04 | 3.3E−04 | 1.6E−04 | 0.60 | 0.61 | 0.61 | 193 | 115 | 43 | 1230.5 | 775 | 834.5 | 43 | 1230.5 | 484 |
| MPP6-NR2F6 | 1.4E−02 | 1.8E−02 | 4.4E−03 | 0.62 | 0.63 | 0.65 | 1548 | 1797 | 702 | 229 | 268.5 | 162.5 | 162.5 | 1797 | 485.25 |
| NCOA4-HMGB2 | 7.6E−04 | 5.9E−04 | 1.1E−03 | 0.61 | 0.61 | 0.60 | 179 | 197 | 243 | 736 | 1048.5 | 1766.5 | 179 | 1766.5 | 489.5 |
| SERPINB9-PRKAR1B | 9.3E−03 | 1.2E−02 | 4.1E−03 | 0.62 | 0.62 | 0.65 | 1168 | 1491 | 663 | 271 | 316.5 | 100 | 100 | 1491 | 489.75 |
| KIAA1949-TATDN1 | 3.8E−03 | 3.2E−03 | 6.4E−04 | 0.61 | 0.62 | 0.66 | 635 | 642 | 162 | 457 | 554 | 66 | 66 | 642 | 505.5 |
| SELM-EIF4H | 1.3E−02 | 7.0E−03 | 5.1E−03 | 0.62 | 0.63 | 0.64 | 1443 | 1064 | 785 | 229 | 189 | 222.5 | 189 | 1443 | 507 |
| NCOA4-PRKAR1B | 1.6E−03 | 2.5E−03 | 2.5E−04 | 0.60 | 0.59 | 0.63 | 356 | 540 | 68 | 1003 | 1756.5 | 475.5 | 68 | 1756.5 | 507.75 |
| SERPINB9-MT1E | 5.7E−04 | 2.7E−04 | 3.3E−03 | 0.61 | 0.62 | 0.60 | 132 | 94 | 579 | 501.5 | 521.5 | 1391.5 | 94 | 1391.5 | 511.5 |
| ABHD12-C20orf111 | 4.0E−04 | 5.8E−04 | 1.7E−04 | 0.60 | 0.61 | 0.61 | 97 | 195 | 46 | 980.5 | 1000.5 | 834.5 | 46 | 1000.5 | 514.75 |
| ABHD12-TATDN1 | 3.4E−03 | 2.1E−03 | 2.2E−04 | 0.61 | 0.61 | 0.64 | 583 | 479 | 62 | 579 | 592 | 198.5 | 62 | 592 | 529 |
| AEBP1-CRTAP | 7.0E−04 | 1.8E−03 | 3.6E−04 | 0.61 | 0.60 | 0.62 | 165 | 443 | 98 | 617 | 1179.5 | 808 | 98 | 1179.5 | 530 |
| SNX27-MRPL42 | 4.8E−03 | 5.6E−03 | 6.3E−03 | 0.62 | 0.63 | 0.63 | 746 | 923 | 922 | 229 | 189 | 316.5 | 189 | 923 | 531.25 |
| TTC21A-MT1E | 1.8E−03 | 5.6E−04 | 6.8E−03 | 0.61 | 0.62 | 0.61 | 392 | 188 | 971 | 678 | 355.5 | 1164.5 | 188 | 1164.5 | 535 |
| KLF12-DPP7 | 6.5E−03 | 9.9E−03 | 1.9E−02 | 0.64 | 0.64 | 0.65 | 902 | 1318 | 1845 | 89 | 122.5 | 171.5 | 89 | 1845 | 536.75 |
| KIAA1949-RPL19 | 2.2E−03 | 2.1E−03 | 8.1E−04 | 0.61 | 0.61 | 0.62 | 452 | 485 | 191 | 736 | 592 | 756 | 191 | 756 | 538.5 |
| NCOA4-LYRM5 | 3.5E−04 | 2.6E−04 | 8.6E−05 | 0.60 | 0.60 | 0.61 | 81 | 92 | 23 | 1023.5 | 1204.5 | 988 | 23 | 1204.5 | 540 |
| PLAC8-URM1 | 1.5E−03 | 9.3E−04 | 7.0E−04 | 0.60 | 0.61 | 0.62 | 334 | 272 | 170 | 1182 | 1048.5 | 756 | 170 | 1182 | 545 |
| NCDN-MT1E | 3.2E−04 | 1.3E−04 | 2.2E−03 | 0.60 | 0.61 | 0.60 | 71 | 36 | 430 | 875.5 | 665.5 | 1513 | 36 | 1513 | 547.75 |
| MT1E-GPBAR1 | 6.0E−04 | 3.5E−04 | 2.5E−03 | 0.60 | 0.61 | 0.60 | 141 | 122 | 475 | 875.5 | 665.5 | 1513 | 122 | 1513 | 570.25 |
| SEC14L1-BCL7B | 2.3E−02 | 1.0E−02 | 6.8E−03 | 0.63 | 0.64 | 0.66 | 1989 | 1345 | 972 | 172 | 72.5 | 60 | 60 | 1989 | 572 |
| RPUSD1-MT1E | 4.3E−04 | 2.2E−04 | 3.7E−03 | 0.61 | 0.62 | 0.60 | 105 | 75 | 627 | 654.5 | 521.5 | 1391.5 | 75 | 1391.5 | 574.25 |
| VAMP2-CCDC130 | 1.6E−02 | 7.7E−03 | 1.5E−02 | 0.66 | 0.67 | 0.67 | 1664 | 1134 | 1620 | 15 | 8 | 19 | 8 | 1664 | 576.5 |
| VAMP2-C16orf53 | 7.9E−03 | 4.6E−03 | 1.3E−02 | 0.62 | 0.64 | 0.63 | 1021 | 815 | 1477 | 245.5 | 138 | 349 | 138 | 1477 | 582 |
| PREX1-RPL26L1 | 6.6E−03 | 7.2E−03 | 7.8E−03 | 0.62 | 0.63 | 0.64 | 911 | 1085 | 1070 | 245.5 | 253 | 180 | 180 | 1085 | 582 |
| C8orf33-EIF4H | 1.0E−02 | 8.9E−03 | 4.9E−03 | 0.62 | 0.62 | 0.65 | 1245 | 1222 | 763 | 402 | 355.5 | 162.5 | 162.5 | 1245 | 582.5 |
| NCOA4-KLF12 | 3.6E−03 | 2.5E−03 | 6.0E−04 | 0.61 | 0.61 | 0.61 | 613 | 542 | 154 | 579 | 592 | 1027.5 | 154 | 1027.5 | 585.5 |
| LAPTM5-MT1E | 8.1E−04 | 4.3E−04 | 4.7E−03 | 0.61 | 0.62 | 0.60 | 194 | 144 | 730 | 678 | 495.5 | 1513 | 144 | 1513 | 586.75 |
| CC2D1B-MT1E | 1.3E−03 | 5.4E−04 | 8.3E−03 | 0.61 | 0.62 | 0.61 | 312 | 179 | 1120 | 678 | 495.5 | 1164.5 | 179 | 1164.5 | 586.75 |
| MT1E-STAM | 8.4E−04 | 4.1E−04 | 5.4E−03 | 0.61 | 0.62 | 0.60 | 202 | 141 | 828 | 654.5 | 521.5 | 1391.5 | 141 | 1391.5 | 588 |
| RARS2-MT1E | 1.0E−03 | 4.4E−04 | 5.2E−03 | 0.61 | 0.62 | 0.60 | 233 | 146 | 807 | 654.5 | 521.5 | 1391.5 | 146 | 1391.5 | 588 |
| MT1E-YPEL5 | 1.1E−03 | 4.9E−04 | 4.9E−03 | 0.61 | 0.62 | 0.60 | 245 | 163 | 764 | 654.5 | 521.5 | 1391.5 | 163 | 1391.5 | 588 |
| MT1E-C16orf53 | 1.1E−03 | 5.3E−04 | 7.3E−03 | 0.61 | 0.62 | 0.60 | 255 | 173 | 1024 | 654.5 | 521.5 | 1391.5 | 173 | 1391.5 | 588 |
| ANXA11-MT1E | 1.1E−03 | 5.4E−04 | 7.9E−03 | 0.61 | 0.62 | 0.60 | 254 | 177 | 1081 | 654.5 | 521.5 | 1810 | 177 | 1810 | 588 |
| MT1E-RAB35 | 4.7E−04 | 2.0E−04 | 2.8E−03 | 0.60 | 0.61 | 0.59 | 113 | 65 | 516 | 875.5 | 665.5 | 1963 | 65 | 1963 | 590.75 |
| VAMP2-SIPA1L2 | 1.0E−02 | 8.0E−03 | 1.1E−02 | 0.66 | 0.66 | 0.67 | 1246 | 1153 | 1299 | 14 | 16 | 34 | 14 | 1299 | 593.5 |
| TAF1-PREX1 | 8.2E−03 | 9.3E−03 | 8.4E−03 | 0.65 | 0.65 | 0.65 | 1053 | 1267 | 1132 | 22.5 | 31.5 | 145 | 22.5 | 1267 | 599 |
| AEBP1-C5orf62 | 2.2E−03 | 4.1E−03 | 4.3E−04 | 0.60 | 0.60 | 0.63 | 451 | 748 | 109 | 1182 | 1574.5 | 389.5 | 109 | 1574.5 | 599.5 |
| ABHD12-SMARCB1 | 3.5E−03 | 2.4E−03 | 7.0E−04 | 0.61 | 0.61 | 0.62 | 601 | 524 | 167 | 762.5 | 775 | 599 | 167 | 775 | 600 |
| LAPTM5-TATDN1 | 1.9E−02 | 1.6E−02 | 4.9E−03 | 0.61 | 0.62 | 0.66 | 1811 | 1673 | 751 | 462 | 398.5 | 84 | 84 | 1811 | 606.5 |
| ADRB2-SNUPN | 1.5E−02 | 1.8E−02 | 6.5E−03 | 0.63 | 0.63 | 0.65 | 1630 | 1807 | 949 | 172 | 268.5 | 107 | 107 | 1807 | 608.75 |
| MAF-KLF12 | 5.5E−03 | 6.1E−03 | 1.0E−02 | 0.63 | 0.64 | 0.63 | 817 | 985 | 1265 | 129.5 | 155.5 | 408 | 129.5 | 1265 | 612.5 |
| TMEM49-XRCC1 | 8.2E−04 | 3.3E−03 | 1.8E−03 | 0.61 | 0.60 | 0.61 | 200 | 647 | 361 | 579 | 1306 | 1027.5 | 200 | 1306 | 613 |
| AEBP1-DPP7 | 4.0E−04 | 1.8E−03 | 1.0E−03 | 0.61 | 0.59 | 0.60 | 96 | 441 | 238 | 796.5 | 1715.5 | 1310 | 96 | 1715.5 | 618.75 |
| PSMD7-SEC14L1 | 2.6E−03 | 1.7E−03 | 7.8E−04 | 0.60 | 0.61 | 0.61 | 506 | 410 | 188 | 1262 | 749.5 | 897.5 | 188 | 1262 | 627.75 |
| AEBP1-VTI1B | 2.7E−04 | 9.5E−04 | 4.4E−04 | 0.60 | 0.60 | 0.60 | 60 | 280 | 113 | 980.5 | 1514 | 1468.5 | 60 | 1514 | 630.25 |
| MPP6-C5orf32 | 4.7E−03 | 8.0E−03 | 1.9E−03 | 0.61 | 0.61 | 0.65 | 735 | 1157 | 386 | 527 | 881 | 162.5 | 162.5 | 1157 | 631 |
| SMYD3-GINS1 | 2.3E−04 | 2.0E−04 | 7.6E−04 | 0.60 | 0.60 | 0.61 | 50 | 66 | 185 | 1092 | 1140.5 | 1164.5 | 50 | 1164.5 | 638.5 |
| SELM-URM1 | 8.2E−04 | 1.9E−04 | 3.5E−04 | 0.59 | 0.60 | 0.60 | 196 | 59 | 93 | 1657.5 | 1100 | 1635 | 59 | 1657.5 | 648 |
| SIPA1L2-TATDN1 | 1.5E−02 | 1.0E−02 | 8.0E−03 | 0.62 | 0.63 | 0.64 | 1571 | 1344 | 1093 | 207 | 165.5 | 188 | 165.5 | 1571 | 650 |
| TATDN1-FOXN2 | 4.9E−03 | 2.7E−03 | 5.7E−04 | 0.60 | 0.60 | 0.64 | 762 | 561 | 144 | 1283.5 | 1204.5 | 193 | 144 | 1283.5 | 661.5 |
| MT1E-TMEM167B | 7.4E−04 | 3.0E−04 | 3.7E−03 | 0.60 | 0.61 | 0.60 | 176 | 105 | 628 | 846.5 | 695.5 | 1810 | 105 | 1810 | 661.75 |
| RPS20-RAB35 | 1.2E−02 | 6.7E−03 | 7.3E−03 | 0.62 | 0.64 | 0.64 | 1344 | 1045 | 1032 | 294.5 | 155.5 | 206.5 | 155.5 | 1344 | 663.25 |
| TMEM8B-GINS1 | 3.7E−04 | 2.0E−04 | 4.4E−04 | 0.60 | 0.60 | 0.60 | 90 | 62 | 114 | 1230.5 | 1263 | 1908.5 | 62 | 1908.5 | 672.25 |
| MT1E-UBXN4 | 9.1E−04 | 4.3E−04 | 4.4E−03 | 0.60 | 0.61 | 0.60 | 213 | 145 | 700 | 875.5 | 665.5 | 1513 | 145 | 1513 | 682.75 |
| SELM-C16orf53 | 1.8E−02 | 8.5E−03 | 2.1E−02 | 0.63 | 0.64 | 0.65 | 1779 | 1202 | 1943 | 164 | 111.5 | 145 | 111.5 | 1943 | 683 |
| TMEM49-RPS20 | 3.4E−04 | 5.1E−04 | 6.8E−04 | 0.59 | 0.59 | 0.61 | 77 | 165 | 166 | 1526 | 1756.5 | 1211 | 77 | 1756.5 | 688.5 |
| NPTN-MT1E | 5.2E−04 | 2.5E−04 | 4.4E−03 | 0.60 | 0.61 | 0.60 | 124 | 89 | 697 | 846.5 | 695.5 | 1810 | 89 | 1810 | 696.25 |
| SNX27-CALM3 | 6.7E−04 | 1.6E−03 | 2.0E−03 | 0.60 | 0.59 | 0.61 | 154 | 403 | 398 | 1003 | 1756.5 | 1211 | 154 | 1756.5 | 703 |
| AEBP1-KIAA1949 | 6.7E−04 | 2.4E−03 | 4.7E−04 | 0.60 | 0.59 | 0.61 | 155 | 521 | 121 | 1003 | 1756.5 | 897.5 | 121 | 1756.5 | 709.25 |
| GRK6-MT1E | 8.3E−04 | 3.8E−04 | 4.9E−03 | 0.60 | 0.61 | 0.60 | 201 | 131 | 758 | 875.5 | 665.5 | 1513 | 131 | 1513 | 711.75 |
| C20orf111-TIMM23 | 1.3E−02 | 9.1E−03 | 1.1E−02 | 0.63 | 0.64 | 0.64 | 1416 | 1243 | 1370 | 181.5 | 138 | 180 | 138 | 1416 | 712.25 |
| AEBP1-NR2F6 | 7.3E−04 | 1.9E−03 | 5.0E−04 | 0.60 | 0.59 | 0.61 | 171 | 447 | 130 | 980.5 | 1799 | 1132 | 130 | 1799 | 713.75 |
| TMEM8B-C5orf32 | 1.0E−03 | 8.8E−04 | 7.1E−04 | 0.59 | 0.60 | 0.61 | 229 | 258 | 171 | 1579 | 1275.5 | 1178 | 171 | 1579 | 718 |
| C20orf111-GINS1 | 2.4E−04 | 1.7E−04 | 7.5E−04 | 0.59 | 0.60 | 0.60 | 53 | 51 | 181 | 1495 | 1263 | 1908.5 | 51 | 1908.5 | 722 |
| SIPA1L2-PRKAR1B | 1.6E−02 | 1.9E−02 | 1.0E−02 | 0.64 | 0.63 | 0.66 | 1661 | 1891 | 1287 | 93.5 | 165.5 | 80 | 80 | 1891 | 726.25 |
| NPTN-PLAC8 | 8.6E−03 | 8.8E−03 | 1.3E−02 | 0.62 | 0.63 | 0.63 | 1104 | 1214 | 1490 | 245.5 | 181 | 349 | 181 | 1490 | 726.5 |
| TMEM8B-UBXN4 | 1.3E−02 | 7.4E−03 | 3.4E−03 | 0.61 | 0.61 | 0.64 | 1424 | 1104 | 585 | 810 | 645 | 191 | 191 | 1424 | 727.5 |
| MT1E-CDC37 | 8.2E−04 | 4.8E−04 | 5.3E−03 | 0.60 | 0.61 | 0.59 | 199 | 157 | 817 | 875.5 | 665.5 | 1963 | 157 | 1963 | 741.25 |
| TM9SF1-MT1E | 7.1E−04 | 3.4E−04 | 4.0E−03 | 0.60 | 0.61 | 0.60 | 167 | 121 | 647 | 1128.5 | 843 | 1635 | 121 | 1635 | 745 |
| ABHD12-PRKAR1B | 4.5E−03 | 8.3E−03 | 6.2E−04 | 0.61 | 0.60 | 0.63 | 711 | 1188 | 157 | 796.5 | 1450.5 | 373.5 | 157 | 1450.5 | 753.75 |
| FOXN2-SNURF | 1.8E−02 | 1.9E−02 | 9.9E−03 | 0.62 | 0.63 | 0.64 | 1744 | 1855 | 1250 | 261.5 | 238.5 | 198.5 | 198.5 | 1855 | 755.75 |
| RPL19-RAB35 | 2.0E−02 | 8.8E−03 | 9.0E−03 | 0.62 | 0.63 | 0.63 | 1849 | 1220 | 1172 | 285.5 | 165.5 | 365.5 | 165.5 | 1849 | 768.75 |
| MT1E-POLR3K | 1.1E−03 | 4.7E−04 | 7.8E−03 | 0.60 | 0.61 | 0.59 | 250 | 154 | 1077 | 875.5 | 665.5 | 1963 | 154 | 1963 | 770.5 |
| MT1E-ZNF641 | 1.1E−03 | 4.8E−04 | 7.1E−03 | 0.60 | 0.61 | 0.60 | 241 | 158 | 1001 | 875.5 | 665.5 | 1513 | 158 | 1513 | 770.5 |
| SERBP1-MT1E | 1.2E−03 | 5.2E−04 | 5.9E−03 | 0.60 | 0.61 | 0.60 | 262 | 171 | 887 | 875.5 | 665.5 | 1513 | 171 | 1513 | 770.5 |
| MT1E-MED6 | 1.1E−03 | 5.3E−04 | 7.7E−03 | 0.60 | 0.61 | 0.59 | 248 | 174 | 1069 | 875.5 | 665.5 | 1963 | 174 | 1963 | 770.5 |
| MT1E-SRCAP | 1.1E−03 | 5.4E−04 | 6.4E−03 | 0.60 | 0.61 | 0.59 | 260 | 180 | 938 | 875.5 | 665.5 | 1963 | 180 | 1963 | 770.5 |
| IL12RB1-MT1E | 1.3E−03 | 5.7E−04 | 7.3E−03 | 0.60 | 0.61 | 0.60 | 292 | 189 | 1036 | 875.5 | 665.5 | 1513 | 189 | 1513 | 770.5 |
| AEBP1-GINS1 | 2.8E−05 | 5.0E−05 | 5.7E−05 | 0.59 | 0.59 | 0.60 | 9 | 17 | 14 | 1526 | 1756.5 | 1582.5 | 9 | 1756.5 | 771.5 |
| KIAA1949-SNURF | 1.5E−02 | 2.1E−02 | 1.1E−02 | 0.65 | 0.65 | 0.64 | 1560 | 1976 | 1313 | 30 | 58 | 262 | 30 | 1976 | 787.5 |
| AEBP1-ANXA11 | 7.3E−03 | 2.0E−02 | 7.9E−03 | 0.63 | 0.61 | 0.62 | 978 | 1932 | 1086 | 195.5 | 571 | 599 | 195.5 | 1932 | 788.5 |
| GINS1-SNURF | 4.6E−04 | 3.5E−04 | 1.3E−03 | 0.59 | 0.60 | 0.60 | 112 | 123 | 289 | 1448 | 1306 | 1766.5 | 112 | 1766.5 | 797.5 |
| SNX27-MYCBP2 | 8.0E−03 | 1.6E−02 | 9.2E−03 | 0.63 | 0.61 | 0.62 | 1027 | 1676 | 1191 | 189.5 | 592 | 547.5 | 189.5 | 1676 | 809.5 |
| ARHGAP10-MT1E | 6.8E−04 | 4.9E−04 | 4.9E−03 | 0.60 | 0.61 | 0.59 | 158 | 162 | 755 | 875.5 | 881 | 1963 | 158 | 1963 | 815.25 |
| GPBAR1-RPS20 | 1.0E−02 | 1.2E−02 | 4.1E−03 | 0.60 | 0.62 | 0.65 | 1232 | 1445 | 658 | 1003 | 554 | 174 | 174 | 1445 | 830.5 |
| SERBP1-LYRM5 | 1.8E−03 | 1.3E−03 | 6.2E−04 | 0.59 | 0.60 | 0.60 | 384 | 353 | 156 | 1448 | 1574.5 | 1352 | 156 | 1574.5 | 868 |
| MPP6-RARS2 | 8.7E−03 | 6.8E−03 | 4.3E−04 | 0.60 | 0.61 | 0.66 | 1118 | 1052 | 110 | 1003 | 749.5 | 41 | 41 | 1118 | 876.25 |
| SELM-SIPA1L2 | 2.1E−02 | 1.5E−02 | 1.7E−02 | 0.64 | 0.64 | 0.65 | 1921 | 1667 | 1752 | 86 | 87 | 127 | 86 | 1921 | 897 |
| KIAA1949-MPP6 | 4.0E−03 | 7.7E−03 | 7.0E−04 | 0.60 | 0.59 | 0.62 | 671 | 1127 | 168 | 1283.5 | 1715.5 | 724.5 | 168 | 1715.5 | 925.75 |
| TXK-GINS1 | 5.8E−04 | 6.5E−04 | 9.9E−04 | 0.59 | 0.59 | 0.60 | 137 | 212 | 228 | 1711.5 | 1847 | 1766.5 | 137 | 1847 | 969.75 |
| PDCD6IP-MPP6 | 7.0E−03 | 1.1E−02 | 3.5E−04 | 0.59 | 0.59 | 0.61 | 945 | 1377 | 95 | 1366.5 | 1928 | 861 | 95 | 1928 | 1155.75 |
| ABHD12-NDUFC1 | 4.3E−03 | 4.6E−03 | 4.3E−04 | 0.59 | 0.59 | 0.60 | 689 | 806 | 111 | 1994 | 1847 | 1766.5 | 111 | 1994 | 1286.25 |
| MPP6-C5orf62 | 1.4E−02 | 1.4E−02 | 7.4E−04 | 0.59 | 0.59 | 0.61 | 1494 | 1569 | 178 | 1548.5 | 1715.5 | 988 | 178 | 1715.5 | 1521.25 |

TABLE 15
List of memberships of 175 SGs in 348 RGPs with high outcome
predictive performance ranks (Within the list of 348 RGP,
128 of the 175 SGs are represented, ranging from participation
of each SG in 1 to 53 different RGPs).

| SG175 ABI | SG175 PGP |
|---|---|
| Gene Symbol | count in GP348 |
| MT1E | 53 |
| SEC14L1 | 38 |
| VAMP2 | 34 |
| AEBP1 | 33 |
| GINS1 | 32 |
| NCOA4 | 21 |
| PREX1 | 17 |
| TMEM8B | 17 |
| MPP6 | 16 |
| TMEM49 | 16 |
| LYRM5 | 15 |
| ABHD12 | 14 |
| TATDN1 | 14 |
| C5orf62 | 12 |
| RPS20 | 11 |
| SELM | 11 |
| SNX27 | 11 |
| CRTAP | 10 |
| MRPL42 | 10 |
| RPL19 | 10 |
| C20orf111 | 9 |
| FOXN2 | 9 |
| CALM3 | 8 |
| PRKAR1B | 8 |
| C5orf32 | 7 |
| KLF12 | 7 |
| MAF | 7 |
| PLAC8 | 7 |
| SMARCB1 | 7 |
| SNURF | 7 |
| HMGB2 | 6 |
| KIAA1949 | 6 |
| C16orf53 | 5 |
| LAPTM5 | 5 |
| NSUN5 | 5 |
| PDCD6IP | 5 |
| SERPINB9 | 5 |
| SIPA1L2 | 5 |
| URM1 | 5 |
| XRCC1 | 5 |
| ADRB2 | 4 |
| ANXA11 | 4 |
| AP2A1 | 4 |
| C8orf33 | 4 |
| CCDC6 | 4 |
| DPP7 | 4 |
| EIF4H | 4 |
| GPBAR1 | 4 |
| MT1H | 4 |
| RPL37 | 4 |
| RPUSD1 | 4 |
| ZFAND5 | 4 |
| HEATR3 | 3 |
| MAST2 | 3 |
| NDUFC1 | 3 |
| NPTN | 3 |
| NR2F6 | 3 |
| RAB35 | 3 |
| RARS2 | 3 |
| SERBP1 | 3 |
| SMNDC1 | 3 |
| SNUPN | 3 |
| SPG7 | 3 |
| TM9SF1 | 3 |
| TMEM167B | 3 |
| UBXN4 | 3 |
| VTI1B | 3 |
| AAK1 | 2 |
| AKIRIN2 | 2 |
| CH25H | 2 |
| DGKA | 2 |
| FLT3LG | 2 |
| GCH1 | 2 |
| GRK6 | 2 |
| MPP5 | 2 |
| MT1G | 2 |
| NCDN | 2 |
| PAIP2 | 2 |
| PSMD7 | 2 |
| SARM1 | 2 |
| SEPT6 | 2 |
| SMYD3 | 2 |
| STAM | 2 |
| TIMM23 | 2 |
| TPT1 | 2 |
| YPEL5 | 2 |
| ANAPC11 | 1 |
| ARHGAP10 | 1 |
| BCL7B | 1 |
| C7orf68 | 1 |
| CBX5 | 1 |
| CC2D1B | 1 |
| CCDC130 | 1 |
| CD2BP2 | 1 |
| CDC37 | 1 |
| CRLF3 | 1 |
| CTCF | 1 |
| DGKH | 1 |
| ERMP1 | 1 |
| FGFR1OP2 | 1 |
| GCA | 1 |
| HEMK1 | 1 |
| HNRNPD | 1 |
| IKBKB | 1 |
| IL12RB1 | 1 |
| IL1RN | 1 |
| MED6 | 1 |
| MYCBP2 | 1 |
| POLR3K | 1 |
| PPHLN1 | 1 |
| PRPF3 | 1 |
| RABL2B | 1 |
| RANBP1 | 1 |
| RCHY1 | 1 |
| RNPEP | 1 |
| RPL26L1 | 1 |
| SHMT1 | 1 |
| SNRPC | 1 |
| SON | 1 |
| SRCAP | 1 |
| STRADB | 1 |
| TAF1 | 1 |
| TMEM5 | 1 |
| TTC21A | 1 |
| TXK | 1 |
| XPO1 | 1 |
| YY1AP1 | 1 |
| ZNF641 | 1 |
| ACER3 | 0 |
| ANXA7 | 0 |
| AQP3 | 0 |
| B4GALT2 | 0 |
| C10orf35 | 0 |
| CA2 | 0 |
| CCDC76 | 0 |
| CD226 | 0 |
| CD79A | 0 |
| CHST13 | 0 |
| COG5 | 0 |
| COQ5 | 0 |
| COX5A | 0 |
| CSAD | 0 |
| EI24 | 0 |
| EPS15 | 0 |
| ERH | 0 |
| FAM177A1 | 0 |
| GSTM2 | 0 |
| HBXIP | 0 |
| ICAM1 | 0 |
| KIF3B | 0 |
| N4BP2 | 0 |
| NAP1L3 | 0 |
| NCAPD2 | 0 |
| NFAM1 | 0 |
| NFATC1 | 0 |
| NUDC | 0 |
| PHAX | 0 |
| PIBF1 | 0 |
| PIGO | 0 |
| PJA2 | 0 |
| PNRC2 | 0 |
| POF1B | 0 |
| PPARG | 0 |
| RNF44 | 0 |
| SCAND2 | 0 |
| SENP7 | 0 |
| SRSF4 | 0 |
| TCN2 | 0 |
| TIMM8B | 0 |
| TLR5 | 0 |
| TMC8 | 0 |
| UTRN | 0 |
| WDR41 | 0 |
| ZFYVE19 | 0 |
| ZNF296 | 0 |

[0362] Determination of PRGPs (Pairs of RGPs):

[0363] As an alternative reduction of candidate RGPs for further refinement into a GVHD outcome prediction profile, it was conjectured that for RGPs to perform well in (operationally semi-additive) multi-RGP voting model, they should also perform well in additive pairs of RGP (PRGP, defined below) models. By preselecting RGPs that perform well in PRGPs, multi-RGP voting models may be seeded with candidate RGPs with an increased propensity to synergistically interact toward improved GVHD outcome prediction in a multi-RGP scenario.

[0364] Just as competitive interactions (see above) are expressed mathematically in a competitive, ratiometric relationship (x/y, or in logarithmic form, log(x/y), or equivalently, log x−log y), synergistic interactions are expressed mathematically in a synergistic, multiplicative relationship (x*y, or in logarithmic form, log (x*y), or equivalently, log x+log y). In the technical implementation described herein, because the RRCF and RGP values are expressed in logarithmic form of underlying mRNA concentration measurement levels, such synergistic interactions would be expressed in additive form with respect to RGP values.

[0365] PRGP values for RGP/RRCF data are defined as follows:

PRGP=RGP X+RGP Y.

[0366] When reduced to SG measurements, at the RRCF level (RL2F calibrated by HSK signal subtraction), PRGPs are defined as, for

RGP X=RRCF A−RRCF B, and for

RGP Y=RRCF C−RRCF D, as

PRGP=(RRCF A−RRCF B)+(RRCF C−RRCF D)

[0367] Alternatively, when reduced to SG measurements, at the RL2F level, PRGPs are defined as, for

RGP X=RL2F A−RL2F B, and for

RGP Y=RL2F C−RL2F D, as

PRGP=(RL2F A−RL2F B)+(RL2F C−RL2F D)

[0368] For PRGP determinations, 175 RGPs were selected from the RGP348 list (Table 14) according to the following criteria:
[0369] (1) Only consider RGPs for which both gene members that show a minimal performance rank of 100, i.e. filter for minimal rank<=100
[0370] (2) Prioritize filtered RGPs according to median rank and select the best 175 median ranking RGPs

[0371] All of the selected 175 RGPs for PRGP determination show a minimal rank<=100, median rank<=464, and maximal rank<=1380.

[0372] The PRGP values for all 180 samples were determined for the complete set 15,225 unique PRGPs from the derived select 175 RGPs (analogously as described above for RGPs). GVHD outcome predictive performance and rankings were evaluated for the set of 15,225 PRGPs analogously as described above for RGPs.

[0373] Evaluation of Outcome Predictive Performance of PRGPs:

[0374] A set of 348 PRGPs (PRGP348; Table 16 lists the specific PRGPs) was selected from the complete set of 15,225 PRGPs by
[0375] (1) requiring each PRGP to have over all 6 predictive performance variable ranks a maximal rank (from 1 to 15,225)<=5000, and minimal rank<=500, resulting in 890 PRGPs,
[0376] (2) prioritizing within this set of 890 PRGPs the best 348 median ranking PRGPs.

[0377] Performance values and rankings were determined for PRGPs analogously as described above for RGPs

TABLE 16
List of 348 PRGPs (PRGP348)

| PRGP ABI Gene Symbol | PRGP ABI Gene Symbol | PRGP ABI Gene Symbol |
|---|---|---|
| TMEM49-VAMP2-ABHD12-CALM3 | AEBP1-RPUSD1-VAMP2-URM1 | PREX1-SMARCB1-GINS1-KLF12 |
| AEBP1-NCDN-ANAPC11-GINS1 | SEC14L1-LYRM5-GINS1-CALM3 | TMEM49-TATDN1-GINS1-MT1H |
| VAMP2-GCH1-LYRM5-TPT1 | SEC14L1-CALM3-GINS1-LYRM5 | MT1E-GINS1-AEBP1-DGKA |
| VAMP2-C5orf32-CALM3-HEATR3 | ANAPC11-GINS1-MRPL42-HEATR3 | AEBP1-ZFAND5-SELM-GINS1 |
| ANAPC11-GINS1-TATDN1-C5orf62 | VAMP2-SEC14L1-AEBP1-ZFAND5 | MAF-LYRM5-NCOA4-RPS20 |
| ABHD12-MPP6-TMEM49-VAMP2 | AEBP1-SEC14L1-VAMP2-ZFAND5 | PREX1-MPP6-GINS1-CALM3 |
| AEBP1-SEC14L1-ANAPC11-GINS1 | MAF-RPL19-NCOA4-RPS20 | VAMP2-CCDC6-AEBP1-ABHD12 |
| VAMP2-GINS1-AEBP1-SPG7 | ANAPC11-GINS1-VAMP2-C5orf62 | GINS1-MT1H-ADRB2-AEBP1 |
| ANAPC11-GINS1-AEBP1-SNX27 | AEBP1-NCDN-MPP5-SEC14L1 | ANAPC11-GINS1-TMEM8B-NSUN5 |
| AAK1-SEC14L1-TMEM8B-C16orf53 | MAF-RPS20-TMEM49-AEBP1 | PDCD6IP-LYRM5-TMEM49-CALM3 |
| ANAPC11-GINS1-AEBP1-NCOA4 | TMEM49-TATDN1-MAF-RPL19 | VAMP2-TMEM5-MRPL42-CCDC6 |
| VAMP2-CRTAP-ANAPC11-GINS1 | C5orf62-RPL19-GINS1-CALM3 | TMEM49-VAMP2-SEC14L1-PAIP2 |
| VAMP2-LAPTM5-XRCC1-PREX1 | VAMP2-URM1-AEBP1-DGKA | SELM-RPUSD1-SEPT6-GINS1 |
| VAMP2-NCOA4-ANAPC11-GINS1 | MAF-RPS20-TMEM49-SNUPN | RPL37-GINS1-AEBP1-SPG7 |
| VAMP2-LAPTM5-AEBP1-SARM1 | VAMP2-TMEM5-PLAC8-SEC14L1 | TMEM49-TATDN1-NCOA4-PLAC8 |
| VAMP2-PREX1-TMEM8B-SEC14L1 | VAMP2-TMEM5-TATDN1-SEC14L1 | TMEM49-PLAC8-NCOA4-TATDN1 |
| TMEM49-TATDN1-PREX1-SMARCB1 | TMEM49-TATDN1-TMEM49-CALM3 | ANAPC11-GINS1-XRCC1-SEC14L1 |
| ANAPC11-GINS1-AEBP1-ZFAND5 | MAF-RPS20-NCOA4-MPP6 | MPP5-SEC14L1-VAMP2-SERBP1 |
| MAF-RPS20-TMEM49-CALM3 | VAMP2-ZFAND5-RABL2B-GINS1 | VAMP2-NCOA4-MPP5-SEC14L1 |
| ANAPC11-GINS1-VAMP2-KIAA1949 | AEBP1-RPUSD1-LYRM5-TPT1 | AEBP1-ZFAND5-SMARCB1-GINS1 |
| TMEM49-VAMP2-MAF-RPS20 | VAMP2-C5orf62-SMARCB1-GINS1 | PDCD6IP-TATDN1-TMEM49-CALM3 |
| VAMP2-SEC14L1-TMEM8B-NSUN5 | MAF-RPS20-TMEM49-MPP6 | VAMP2-TMEM5-SMARCB1-SEC14L1 |
| SELM-NCOA4-TMEM8B-C16orf53 | AEBP1-RPUSD1-VAMP2-GCH1 | ADRB2-AEBP1-MAST2-MT1E |
| ABHD12-MPP6-TMEM49-CALM3 | VAMP2-NCOA4-SMARCB1-GINS1 | TMEM49-PLAC8-CRTAP-CALM3 |
| TMEM49-MPP6-ABHD12-CALM3 | AEBP1-NCOA4-PLAC8-GINS1 | CRTAP-PLAC8-TMEM49-CALM3 |
| VAMP2-C5orf32-VAMP2-TMEM5 | TMEM49-VAMP2-ZFAND5-C20orf111 | VAMP2-SEC14L1-XRCC1-GINS1 |
| MPP5-SEC14L1-TMEM8B-C16orf53 | VAMP2-RARS2-TMEM8B-SEC14L1 | XRCC1-SEC14L1-VAMP2-GINS1 |
| GINS1-CALM3-NCOA4-MRPL42 | PDCD6IP-LYRM5-SEC14L1-CALM3 | TMEM49-TATDN1-NCOA4-C8orf33 |
| ANAPC11-GINS1-PLAC8-SEC14L1 | AEBP1-SEC14L1-VAMP2-TMEM5 | PREX1-C20orf111-GINS1-KLF12 |
| ANAPC11-GINS1-TMEM8B-C5orf62 | VAMP2-C5orf32-VAMP2-GINS1 | NCOA4-MPP6-PREX1-C20orf111 |
| SELM-RPUSD1-AEBP1-NSUN5 | AEBP1-NCDN-VAMP2-NCOA4 | PREX1-MPP6-NCOA4-C20orf111 |
| AEBP1-ZFAND5-VAMP2-TMEM5 | AEBP1-NCDN-VAMP2-ZFAND5 | ABHD12-MPP6-PREX1-C20orf111 |
| ANAPC11-GINS1-AEBP1-NSUN5 | TMEM49-TATDN1-TMEM49-ANXA11 | VAMP2-TMEM5-AEBP1-SPG7 |
| NCOA4-TATDN1-GINS1-CALM3 | VAMP2-SEC14L1-ANAPC11-GINS1 | AEBP1-SEC14L1-TATDN1-GINS1 |
| VAMP2-SEC14L1-TMEM8B-C16orf53 | XRCC1-PREX1-VAMP2-TMEM5 | VAMP2-PREX1-PLAC8-GINS1 |
| MAF-RPS20-TMEM49-LYRM5 | ANAPC11-GINS1-TATDN1-SEC14L1 | TMEM8B-C5orf62-RABL2B-GINS1 |
| AEBP1-RPUSD1-VAMP2-ZFAND5 | VAMP2-CCDC6-HMGB2-C5orf32 | VAMP2-SEC14L1-SEPT6-GINS1 |
| VAMP2-SEC14L1-AEBP1-SARM1 | NCOA4-MPP6-TMEM49-CALM3 | AEBP1-NCDN-VAMP2-SERBP1 |
| ANAPC11-GINS1-VAMP2-GCH1 | AEBP1-SARM1-RABL2B-GINS1 | MRPL42-GINS1-AEBP1-ZFAND5 |
| ANAPC11-GINS1-SELM-NCOA4 | TMEM49-TATDN1-ABHD12-CALM3 | TMEM49-AEBP1-NCOA4-TATDN1 |
| SEC14L1-LYRM5-TMEM49-CALM3 | VAMP2-SEC14L1-AEBP1-RPUSD1 | C8orf33-SEC14L1-VAMP2-TMEM5 |
| SEC14L1-CALM3-TMEM49-LYRM5 | AEBP1-RPUSD1-VAMP2-ABHD12 | AEBP1-RPUSD1-HMGB2-SEC14L1 |
| TMEM8B-SEC14L1-MRPL42-FOXN2 | AEBP1-RPUSD1-VAMP2-TMEM5 | LYRM5-TPT1-RABL2B-GINS1 |
| ANAPC11-GINS1-VAMP2-C5orf32 | MT1E-GINS1-AEBP1-RPUSD1 | SNX27-TATDN1-GINS1-CALM3 |
| VAMP2-URM1-MRPL42-CCDC6 | VAMP2-TMEM5-HMGB2-C5orf32 | AEBP1-SNX27-VAMP2-SERBP1 |
| AEBP1-RPUSD1-RABL2B-GINS1 | GINS1-LYRM5-NCOA4-C20orf111 | VAMP2-TMEM5-AEBP1-NCOA4 |
| AEBP1-RPUSD1-VAMP2-GINS1 | TMEM49-VAMP2-PREX1-SNURF | VAMP2-ZFAND5-AEBP1-GRK6 |
| AEBP1-SPG7-TMEM8B-NSUN5 | AEBP1-NSUN5-RABL2B-GINS1 | TMEM49-TATDN1-PREX1-KLF12 |
| TMEM49-CALM3-ABHD12-RPL19 | VAMP2-KIAA1949-AEBP1-SARM1 | VAMP2-SEC14L1-AEBP1-NSUN5 |
| TMEM49-VAMP2-PREX1-MPP6 | ANAPC11-GINS1-HMGB2-C5orf32 | VAMP2-NCOA4-AEBP1-DGKA |
| AEBP1-RPUSD1-VAMP2-NCOA4 | C5orf62-RPS20-GINS1-CALM3 | MPP6-SEC14L1-VAMP2-ABHD12 |
| MPP6-SEC14L1-VAMP2-SERBP1 | VAMP2-ZFAND5-AEBP1-DGKA | MPP6-SEC14L1-AEBP1-NSUN5 |
| AEBP1-SPG7-XRCC1-GINS1 | ANAPC11-GINS1-AAK1-SEC14L1 | VAMP2-PREX1-AEBP1-SNX27 |
| PREX1-SMARCB1-GINS1-CALM3 | AEBP1-ZFAND5-VAMP2-URM1 | VAMP2-LAPTM5-AEBP1-ZFAND5 |
| AEBP1-RPUSD1-SELM-NCOA4 | VAMP2-NCOA4-AEBP1-ZFAND5 | VAMP2-TMEM5-AEBP1-GRK6 |
| SELM-RPUSD1-AEBP1-NCOA4 | VAMP2-ZFAND5-AEBP1-NCOA4 | GINS1-PRKAR1B-PREX1-SMARCB1 |
| AEBP1-NCDN-VAMP2-C5orf62 | GINS1-CALM3-PREX1-MRPL42 | ANAPC11-GINS1-HMGB2-SEC14L1 |
| NCOA4-PLAC8-GINS1-CALM3 | VAMP2-CRTAP-AEBP1-RPUSD1 | TMEM49-CALM3-NSUN5-MPP6 |
| VAMP2-PREX1-TMEM8B-C5orf62 | NCOA4-C8orf33-PDCD6IP-LYRM5 | MRPL42-FOXN2-RABL2B-GINS1 |
| MRPL42-GINS1-AEBP1-SPG7 | VAMP2-ZFAND5-AEBP1-ABHD12 | VAMP2-C5orf32-VAMP2-ABHD12 |
| VAMP2-NCOA4-TMEM8B-SEC14L1 | AEBP1-ZFAND5-VAMP2-ABHD12 | SEC14L1-SNURF-GINS1-CALM3 |
| TMEM49-TATDN1-TMEM49-FLT3LG | TMEM49-TATDN1-TMEM49-PLAC8 | SELM-RPUSD1-AEBP1-DGKA |
| TMEM49-TATDN1-GINS1-CALM3 | VAMP2-URM1-AEBP1-SPG7 | NCOA4-C8orf33-MAF-RPS20 |
| ANAPC11-GINS1-VAMP2-ZFAND5 | VAMP2-URM1-AEBP1-GRK6 | ANAPC11-GINS1-SMARCB1-SEC14L1 |
| C20orf111-SEC14L1-AEBP1-NCDN | VAMP2-C5orf32-TMEM8B-NSUN5 | MPP5-SEC14L1-VAMP2-URM1 |
| PREX1-SNURF-GINS1-CALM3 | XRCC1-PREX1-RABL2B-GINS1 | MT1E-C5orf32-PLAC8-GINS1 |
| AEBP1-ZFAND5-VAMP2-GINS1 | VAMP2-LAPTM5-AEBP1-NCDN | TMEM49-MRPL42-MAF-RPS20 |
| VAMP2-ABHD12-TMEM8B-C16orf53 | AEBP1-NCDN-MRPL42-FOXN2 | GINS1-PRKAR1B-SEC14L1-CALM3 |
| XRCC1-PREX1-TMEM8B-C5orf62 | VAMP2-PREX1-SELM-GINS1 | SEC14L1-PRKAR1B-GINS1-CALM3 |
| TMEM49-PLAC8-GINS1-CALM3 | MAF-LYRM5-GINS1-LYRM5 | NCOA4-PLAC8-MAF-RPS20 |
| ANAPC11-GINS1-VAMP2-ABHD12 | MT1E-GINS1-AEBP1-GRK6 | TMEM49-CALM3-MAF-RPL19 |
| VAMP2-ZFAND5-AEBP1-SNX27 | MT1E-GINS1-AEBP1-SNX27 | C20orf111-SEC14L1-VAMP2-ABHD12 |
| ANAPC11-GINS1-VAMP2-PREX1 | VAMP2-NCOA4-VAMP2-GINS1 | VAMP2-GCH1-PLAC8-GINS1 |
| TMEM49-LYRM5-ABHD12-CALM3 | NCOA4-TATDN1-TMEM49-CALM3 | NCOA4-SNURF-GINS1-CALM3 |
| ANAPC11-GINS1-SELM-C5orf62 | AEBP1-NCDN-SELM-NCOA4 | VAMP2-KIAA1949-PLAC8-GINS1 |
| TMEM49-VAMP2-FOXN2-MPP6 | MAF-LYRM5-FOXN2-RPS20 | ANAPC11-GINS1-VAMP2-AKIRIN2 |
| VAMP2-GINS1-AEBP1-NSUN5 | ANAPC11-GINS1-C8orf33-SEC14L1 | VAMP2-PREX1-AEBP1-NSUN5 |
| MAF-RPS20-TMEM49-ANXA11 | AEBP1-NCDN-VAMP2-ABHD12 | MPP5-SEC14L1-VAMP2-ABHD12 |
| MT1E-GINS1-AEBP1-NCDN | MT1E-GINS1-AEBP1-NSUN5 | AEBP1-RPUSD1-VAMP2-RARS2 |
| AEBP1-SPG7-PLAC8-GINS1 | ANAPC11-GINS1-LYRM5-GPBAR1 | VAMP2-NCOA4-LYRM5-TPT1 |
| PREX1-SNURF-TMEM49-CALM3 | ANAPC11-GINS1-HMGB2-C5orf62 | GINS1-PRKAR1B-ABHD12-CALM3 |
| XRCC1-PREX1-VAMP2-ABHD12 | VAMP2-SEC14L1-VAMP2-TMEM5 | AEBP1-NCDN-SELM-GINS1 |
| AEBP1-NCDN-SMARCB1-SEC14L1 | TMEM49-CALM3-GINS1-RPS20 | TMEM49-TATDN1-NCOA4-C20orf111 |
| GINS1-CALM3-NCOA4-RPS20 | XRCC1-PREX1-SELM-GINS1 | TMEM49-MT1E-GINS1-RPS20 |
| ANAPC11-GINS1-AEBP1-ABHD12 | TMEM49-TATDN1-CRTAP-CALM3 | MPP6-SEC14L1-VAMP2-URM1 |
| MT1E-GINS1-AEBP1-SARM1 | VAMP2-C5orf62-TMEM8B-C16orf53 | FOXN2-RPS20-TMEM49-CALM3 |
| SEPT6-GINS1-AEBP1-SPG7 | VAMP2-SEC14L1-TMEM8B-SEC14L1 | VAMP2-URM1-AEBP1-NSUN5 |
| MRPL42-GINS1-AEBP1-NSUN5 | VAMP2-KIAA1949-AEBP1-GRK6 | SEC14L1-CALM3-GINS1-RPS20 |
| MPP6-SEC14L1-VAMP2-TMEM5 | TMEM8B-C5orf62-VAMP2-AP2A1 | SEC14L1-RPS20-GINS1-CALM3 |
| VAMP2-ZFAND5-AEBP1-NSUN5 | VAMP2-CRTAP-AEBP1-SPG7 | ABHD12-MRPL42-GINS1-CALM3 |
| SEC14L1-CALM3-TMEM49-MPP6 | MT1E-GINS1-AEBP1-TM9SF1 | TMEM49-VAMP2-SEC14L1-PRKAR1B |
| ANAPC11-GINS1-TMEM8B-SEC14L1 | VAMP2-PREX1-STRADB-GINS1 | VAMP2-SEC14L1-STRADB-GINS1 |
| MT1E-GINS1-AEBP1-ZFAND5 | VAMP2-PREX1-AEBP1-DGKA | C20orf111-SEC14L1-VAMP2-GCH1 |
| MRPL42-GINS1-AEBP1-NCOA4 | VAMP2-ABHD12-CALM3-HEATR3 | AEBP1-NCDN-HMGB2-C5orf32 |
| TMEM49-TATDN1-MAF-RPS20 | GINS1-LYRM5-NSUN5-KLF12 | VAMP2-ABHD12-AEBP1-NSUN5 |
| XRCC1-SEC14L1-VAMP2-TMEM5 | PREX1-AAK1-GINS1-CALM3 | GINS1-MT1H-TMEM49-AEBP1 |
| ZFAND5-C20orf111-TMEM49-CALM3 | AEBP1-NSUN5-PLAC8-GINS1 | VAMP2-C5orf32-TMEM8B-SEC14L1 |
| PREX1-KLF12-GINS1-CALM3 | AEBP1-NCDN-HMGB2-SEC14L1 | VAMP2-ABHD12-AEBP1-GRK6 |
| MRPL42-GINS1-VAMP2-PREX1 | VAMP2-NCOA4-STRADB-GINS1 | TMEM49-FLT3LG-PDCD6IP-TATDN1 |
| AEBP1-SPG7-TMEM8B-SEC14L1 | XRCC1-PREX1-PLAC8-GINS1 | VAMP2-ABHD12-MRPL42-CCDC6 |
| VAMP2-KIAA1949-AEBP1-ZFAND5 | XRCC1-PREX1-SEPT6-GINS1 | AEBP1-NCDN-PLAC8-GINS1 |
| ANAPC11-GINS1-TMEM8B-C16orf53 | ANAPC11-GINS1-RPL37-C5orf62 | MAF-RPS20-NCOA4-PAIP2 |
| AEBP1-NCDN-MPP6-SEC14L1 | VAMP2-LAPTM5-AEBP1-SPG7 | GINS1-RPL19-ABHD12-CALM3 |
| AEBP1-RPUSD1-SELM-GINS1 | NCOA4-C8orf33-NSUN5-MPP6 | GINS1-CALM3-ABHD12-RPL19 |
| ANAPC11-GINS1-VAMP2-URM1 | VAMP2-LAPTM5-AEBP1-DGKA | TMEM49-VAMP2-CRTAP-PLAC8 |
| VAMP2-PREX1-SMARCB1-GINS1 | TMEM49-PLAC8-NCOA4-MPP6 | TMEM49-SNUPN-MAF-RPL19 |
| AEBP1-SPG7-TATDN1-GINS1 | NCOA4-PLAC8-TMEM49-MPP6 | TMEM49-VAMP2-PREX1-SMARCB1 |
| TMEM49-VAMP2-SEC14L1-CALM3 | AEBP1-RPUSD1-VAMP2-PREX1 | GINS1-MT1H-C5orf62-RPS20 |
| XRCC1-PREX1-VAMP2-GINS1 | VAMP2-SEC14L1-AEBP1-DGKA | AEBP1-GRK6-SMARCB1-GINS1 |
| VAMP2-PREX1-XRCC1-GINS1 | GINS1-PRKAR1B-ADRB2-MT1E | TMEM49-AEBP1-PREX1-SMARCB1 |
| NR2F6-PRKAR1B-GINS1-CALM3 | AEBP1-NCDN-XRCC1-SEC14L1 | VAMP2-ABHD12-AEBP1-DGKA |
| MT1E-GINS1-AEBP1-SPG7 | VAMP2-NCOA4-AEBP1-SPG7 | ABHD12-CALM3-GINS1-RPS20 |
| VAMP2-ZFAND5-AEBP1-SARM1 | AEBP1-RPUSD1-VAMP2-SERBP1 | ADRB2-AEBP1-GINS1-LYRM5 |
| ANAPC11-GINS1-MRPL42-SEC14L1 | TMEM49-VAMP2-SEC14L1-CRLF3 | AEBP1-TM9SF1-VAMP2-ABHD12 |
| ANAPC11-GINS1-AEBP1-SARM1 | C20orf111-SEC14L1-VAMP2-TMEM5 | TMEM49-TATDN1-GINS1-PRKAR1B |
| AEBP1-NCDN-VAMP2-C5orf32 | MT1E-GINS1-AEBP1-ABHD12 | VAMP2-NCOA4-AEBP1-GRK6 |

### Example 13

[0378] This example includes a description of alternative RGP Vmod (voting model) implementations of the GVHD prediction, definition of top-performing RGP Vmods, and other well-performing alternative RGP Vmods.

[0379] In addition to harnessing the combined ratiometric GVHD outcome predictive and self-calibrating properties of the RGPs selected above, further accuracy and robustness in GVHD outcome prediction would be expected to be achieved by averaging out errors contributed by individual RGP voters through the use of multi-RGP voting models (Vmods). Within such a GVHD outcome prediction Vmod, prioritized subsets of RGPs are used to provide individual “N” (N=not causing GVHD in the recipient) outcome predictive votes, and these votes are aggregated and averaged as a GVHD N Outcome Score, or GNOS. In turn, when the GNOS is above a pre-determined “GNOS threshold” level, a donor sample is ultimately called as N, or “likely to lead to a GVHD NEGATIVE outcome in the recipient when used for transplantation.”

[0380] Selection of Alternative RGP Vmods:

[0381] Multiple, principled ways have been applied for aggregating the RGPs (or PRGPs, for indirect RGP selection) into Vmods for GNOS determination, such as to result in GVHD outcome prediction using a total of 48 SGs, including the 6 HSKs listed above (Table 12) for initial SG calibration. The list of RGPs and SGs contributing to the different Vmods is detailed in below (see Tables 17 and 18, VmodRGP100 and VmodSG64, respectively).

[0382] Note that Vmod GNOS calculations for all Vmods are always directly carried out on RGPs values, and never directly on PRGP or SG values (even though PRGPs have contributed to RGP selections, and SG values are used to determine the RGP values).

[0383] Three basic methods are outlined below for RGP prioritization from the RGP348 list (Table 14) into 3 alternative Vmods:
[0384] (1) Vmod: SG43RGP46-GPperformance:
   [0385] RGPs in RGP348 list (Table 14) were prioritized solely according to median performance rank, without any restriction of contributing SGs being a member of multiple GPs. The top median performance ranking 46 RGPs contain 43 unique SGs, including one of the HSK6 SGs (Table 12). Combining these 43 SGs with the remaining 5 HSK6 SGs, results in a total of 48 SGs for implementation as the GVHD outcome prediction test.
[0386] (2) Vmod: SG42RGP21-GPminimalist
   [0387] RGPs in RGP348 list (Table 14) were prioritized according to median performance rank. After the best ranking RGP is selected to go into the Vmod, all RGPs containing SGs already selected for the Vmod are removed from the candidate list, and then the next best ranking RGP is selected. The top 21 ranking RGPs, not allowing for any SG to appear in more than one RGP, result in a total of 42 unique SGs. Combining these 42 SGs with the remaining 6 HSK6 SGs results in a total of 48 SGs for implementation as a GVHD outcome prediction test.
[0388] (3) Vmod: SG43RGP37-GPconnectivity:
   [0389] The 121 SGs contributing to the RGP348 list (Table 14) were prioritized in two steps, i.e.,
      [0390] 1. the highest numbers of RGPs for which a particular SG is a member, i.e., the highest SG connectivities in the RGP network, and
      [0391] 2. the best median outcome predictive performance rank (over the 6 standard performance ranks, see above).
   [0392] The 43 combined top rankings SGs were selected according to this method. RGPs, including only SG members from this list of 43 SGs, where then prioritized according to median performance rank. The minimal number of top ranking RGPs from this restricted selection for which each of the select 43 SGs appears in at least once, was then selected by aggregating the prioritized RGPs in median performance rank order; however, only allowing new RGPs in the aggregation process to be included if none or only one (not both) of its SG members is found in the RGPs already selected for the Vmod. (Note: Without this restriction, likely more than 100 GPs would be required to cover the 43 most connected SGs, because many of the most connected SGs participate in lower ranking RGPs). A total number of 37 RGPs contribute to this Vmod, containing 43 unique SGs, including one of the HSK6 SGs. Combining these 43 SGs with the remaining 5 HSK6 SGs, results in a total of 48 SGs for implementation as a GVHD outcome prediction test.

[0393] By preselecting RGPs that perform well in PRGPs, Vmods may be seeded with candidate RGPs with an increased propensity to synergistically interact toward improved outcome prediction in a multi-RGP scenario. Two basic methods are outlined below for PRGP (and implicit contributing RGP and SG) prioritization from the PRGP348 list (Table 16) into 2 alternative Vmods:
[0394] (1) Vmod: SG43RGP51−PRGPminranksort:
   [0395] PRGPs in the PRGP348 list (see Table 16) were prioritized first by maximal (worst) performance rank, then by median rank, and then by minimal (best) rank, such that the final prioritization criterion is the best, i.e., minimal, performance rank. No restrictions were placed on SGs or RGPs being a member of multiple PRGPs. The top median performance ranking 45 PRGPs contain 51 unique RGPs, and 43 unique SGs, including one of the HSK6 SGs. Combining these 43 SGs with the remaining 5 HSK6 SGs, results in a total of 48 SGs for implementation as a GVHD outcome prediction test.
[0396] (2) Vmod: SG43RGP55-PRGPmedranksort:
   [0397] PRGPs in the PRGP348 list (Table 16) were prioritized first by maximal (worst) performance rank, then by minimal (best) rank, and then by median rank, such that the final prioritization criterion is the median performance rank. No restrictions were placed on SGs or RGPs being a member of multiple PRGPs. The top median performance ranking 60 PRGPs contain 55 unique RGPs, and 43 unique SGs, including one of the HSK6 SGs. Combining these 43 SGs with the remaining 5 HSK6 SGs, results in a total of 48 SGs for implementation as a GVHD outcome prediction test.

[0398] The set of 5 Vmods described above contain a total of 100 unique RGPs, and 64 unique SGs, which are listed in Tables 17 and 18 below, VmodRGP100 and VmodSG64, respectively.

TABLE 17
Vmod memberships of 100 RGPs (“VmodRGP100”) that participate in the alternative Vmod GVHD outcome prediction implementation

| | | | | SG43RGP51- | SG43RGP55- | SG43RGP36- | SG21RGP28- |
|---|---|---|---|---|---|---|---|
| RGP ABI | SG43RGP46- | SG42RGP21- | SG43RGP37- | PRGPmin- | PRGPmed- | RGPgreedy- | RGPmaxgreedy- |
| Gene Symbol | RGPperformance | RGPminimalist | RGPconnectivity | ranksort | ranksort | search | search |
| AEBP1-SEC14L1 | x | — | x | x | x | x | x |
| AEBP1-NCDN | x | — | — | x | x | x | x |
| ANAPC11-GINS1 | x | — | — | x | x | x | x |
| MT1E-GINS1 | x | — | x | — | x | x | x |
| PDCD6IP-LYRM5 | x | x | x | — | — | x | x |
| MPP5-SEC14L1 | x | — | — | x | — | x | x |
| MRPL42-GINS1 | x | — | — | — | x | x | x |
| PDCD6IP-TATDN1 | x | — | — | — | — | x | x |
| RPL37-GINS1 | x | — | — | — | — | x | x |
| TMEM8B-C16orf53 | — | — | x | x | x | x | x |
| TMEM8B-C5orf62 | — | — | x | x | x | x | x |
| ABHD12-CALM3 | — | — | — | x | x | x | x |
| AEBP1-SARM1 | — | — | — | x | x | x | x |
| PREX1-SMARCB1 | — | — | — | x | x | x | x |
| TMEM49-CALM3 | — | — | — | x | x | x | x |
| VAMP2-TMEM5 | — | — | — | x | x | x | x |
| CALM3-HEATR3 | — | — | — | x | — | x | x |
| MRPL42-FOXN2 | — | — | — | x | — | x | x |
| PLAC8-SEC14L1 | — | — | — | x | — | x | x |
| TMEM8B-NSUN5 | — | — | — | x | — | x | x |
| TMEM8B-SIPA1L2 | — | — | x | — | — | x | x |
| AEBP1-RPUSD1 | x | x | x | x | x | x | — |
| TMEM49-TATDN1 | x | x | x | x | x | x | — |
| ADRB2-MT1E | x | x | x | — | — | x | — |
| GINS1-MT1H | x | x | — | — | — | x | — |
| TMEM49-FLT3LG | x | — | — | — | x | x | — |
| TMEM49-MRPL42 | x | — | x | — | — | x | — |
| NCOA4-PAIP2 | x | — | — | — | — | x | — |
| AEBP1-ZFAND5 | — | — | — | x | x | x | — |
| FOXN2-SNURF | — | x | — | — | — | x | — |
| MRPL42-CCDC6 | — | — | — | x | — | x | — |
| NR2F6-PRKAR1B | — | x | — | — | — | x | — |
| TMEM8B-TM9SF1 | — | x | — | — | — | x | — |
| VAMP2-FOXN2 | — | — | x | — | — | x | — |
| VAMP2-SERPINB9 | — | — | x | — | — | x | — |
| XRCC1-SNX27 | — | x | — | — | — | x | — |
| MAF-RPS20 | x | x | x | x | x | — | — |
| VAMP2-SEC14L1 | x | x | x | x | x | — | — |
| ABHD12-MPP6 | x | x | x | x | — | — | — |
| SEC14L1-LYRM5 | x | — | x | x | x | — | — |
| SELM-RPUSD1 | x | — | x | x | x | — | — |
| VAMP2-C5orf32 | x | — | x | x | x | — | — |
| VAMP2-CRTAP | x | — | x | x | x | — | — |
| VAMP2-KIAA1949 | x | — | x | x | x | — | — |
| VAMP2-NCOA4 | x | — | x | x | x | — | — |
| VAMP2-ZFAND5 | x | — | x | x | x | — | — |
| AAK1-SEC14L1 | x | — | — | x | x | — | — |
| PREX1-KLF12 | x | x | x | — | — | — | — |
| SELM-NCOA4 | x | — | — | x | x | — | — |
| TMEM49-VAMP2 | x | — | — | x | x | — | — |
| VAMP2-C5orf62 | x | — | x | — | x | — | — |
| VAMP2-LAPTM5 | x | — | x | x | — | — | — |
| XRCC1-PREX1 | x | — | x | x | — | — | — |
| AEBP1-TM9SF1 | x | — | — | — | x | — | — |
| C20orf111-SEC14L1 | x | — | x | — | — | — | — |
| CRTAP-PLAC8 | x | x | — | — | — | — | — |
| GINS1-PRKAR1B | x | — | x | — | — | — | — |
| NCOA4-C8orf33 | x | x | — | — | — | — | — |
| NCOA4-MPP6 | x | — | — | — | x | — | — |
| NCOA4-PLAC8 | x | — | — | — | x | — | — |
| SEC14L1-RPL19 | x | — | x | — | — | — | — |
| SNX27-TATDN1 | x | — | x | — | — | — | — |
| TMEM49-PLAC8 | x | — | x | — | — | — | — |
| VAMP2-GCH1 | x | — | — | x | — | — | — |
| CRTAP-LYRM5 | x | — | — | — | — | — | — |
| MPP6-SEC14L1 | x | — | — | — | — | — | — |
| AEBP1-NSUN5 | — | — | x | x | x | — | — |
| SEC14L1-CALM3 | — | — | x | x | x | — | — |
| VAMP2-URM1 | — | — | x | x | x | — | — |
| AEBP1-NCOA4 | — | — | — | x | x | — | — |
| AEBP1-SNX27 | — | — | — | x | x | — | — |
| AEBP1-SPG7 | — | — | — | x | x | — | — |
| C5orf62-RPL19 | — | x | — | — | x | — | — |
| GINS1-CALM3 | — | — | — | x | x | — | — |
| MRPL42-HEATR3 | — | x | — | — | x | — | — |
| NCOA4-MRPL42 | — | — | — | x | x | — | — |
| NCOA4-TATDN1 | — | — | — | x | x | — | — |
| TMEM8B-SEC14L1 | — | — | — | x | x | — | — |
| VAMP2-GINS1 | — | — | — | x | x | — | — |
| VAMP2-PREX1 | — | — | — | x | x | — | — |
| AEBP1-ABHD12 | — | — | — | — | x | — | — |
| C5orf62-RPS20 | — | — | — | — | x | — | — |
| FOXN2-MPP6 | — | — | — | — | x | — | — |
| GINS1-LYRM5 | — | — | — | — | x | — | — |
| HMGB2-C5orf32 | — | x | — | — | — | — | — |
| HMGB2-SEC14L1 | — | — | x | — | — | — | — |
| IL1RN-MT1G | — | x | — | — | — | — | — |
| LYRM5-TPT1 | — | — | — | x | — | — | — |
| NCOA4-C20orf111 | — | — | — | — | x | — | — |
| PREX1-AAK1 | — | — | — | — | x | — | — |
| PREX1-SNURF | — | — | — | — | x | — | — |
| SEC14L1-SNURF | — | — | x | — | — | — | — |
| SELM-AP2A1 | — | x | — | — | — | — | — |
| SELM-C5orf62 | — | — | — | — | x | — | — |
| SMARCB1-SEC14L1 | — | — | x | — | — | — | — |
| TATDN1-C5orf62 | — | — | — | x | — | — | — |
| TMEM49-LYRM5 | — | — | — | x | — | — | — |
| TMEM49-MPP6 | — | — | — | x | — | — | — |
| VAMP2-ABHD12 | — | — | — | — | x | — | — |
| ZFAND5-C20orf111 | — | x | — | — | — | — | — |

(An “x” in a column indicates that the RGP in the corresponding row is a member of the Vmod listed in the column; otherwise the “—” indicates the RGP is not a component of the Vmod)

TABLE 18
Vmod memberships of 64 SGs (“VmodSG64”) that participate in the alternative Vmod GVHD outcome prediction implementation

| | | | | SGs from | SGs from | | |
|---|---|---|---|---|---|---|---|
| SG ABI | SGs from | SGs from | SGs from | SG43RGP51- | SG43RGP55- | SGs from | SGs from |
| Gene | SG43RGP46- | SG42RGP21- | SG43RGP37- | PRGPmin- | PRGPmed- | SG43RGP36- | SG21RGP28- |
| Symbol | RGPperformance | RGPminimalist | RGPconnectivity | ranksort | ranksort | RGPgreedysearch | RGPmaxgreedysearch |
| VAMP2 | x | x | x | x | x | x | x |
| SEC14L1 | x | x | x | x | x | x | x |
| AEBP1 | x | x | x | x | x | x | x |
| GINS1 | x | x | x | x | x | x | x |
| TMEM49 | x | x | x | x | x | x | x |
| MRPL42 | x | x | x | x | x | x | x |
| TATDN1 | x | x | x | x | x | x | x |
| PREX1 | x | x | x | x | x | x | x |
| LYRM5 | x | x | x | x | x | x | x |
| C5orf62 | x | x | x | x | x | x | x |
| ABHD12 | x | x | x | x | x | x | x |
| PLAC8 | x | x | x | x | x | x | x |
| MT1E | x | x | x | — | x | x | x |
| PDCD6IP | x | x | x | — | — | x | x |
| ANAPC11 | x | — | — | x | x | x | x |
| NCDN | x | — | — | x | x | x | x |
| MPP5 | x | — | — | x | — | x | x |
| RPL37 | x | — | — | — | — | x | x |
| TMEM8B | — | x | x | x | x | x | x |
| FOXN2 | — | x | x | x | x | x | x |
| CALM3 | — | — | x | x | x | x | x |
| NSUN5 | — | — | x | x | x | x | x |
| C16orf53 | — | — | x | x | x | x | x |
| HEATR3 | — | x | — | x | x | x | x |
| SMARCB1 | — | — | x | x | x | x | x |
| SARM1 | — | — | — | x | x | x | x |
| TMEM5 | — | — | — | x | x | x | x |
| SIPA1L2 | — | — | x | — | — | x | x |
| NCOA4 | x | x | x | x | x | x | — |
| RPUSD1 | x | x | x | x | x | x | — |
| ZFAND5 | x | x | x | x | x | x | — |
| SNX27 | x | x | x | x | x | x | — |
| XRCC1 | x | x | x | x | — | x | — |
| ADRB2 | x | x | x | — | — | x | — |
| PRKAR1B | x | x | x | — | — | x | — |
| TM9SF1 | x | x | — | — | x | x | — |
| FLT3LG | x | — | — | — | x | x | — |
| MT1H | x | x | — | — | — | x | — |
| PAIP2 | x | — | — | — | — | x | — |
| SNURF | — | x | x | — | x | x | — |
| CCDC6 | — | — | — | x | — | x | — |
| NR2F6 | — | x | — | — | — | x | — |
| SERPINB9 | — | — | x | — | — | x | — |
| MPP6 | x | x | x | x | x | — | — |
| SELM | x | x | x | x | x | — | — |
| CRTAP | x | x | x | x | x | — | — |
| RPS20 | x | x | x | x | x | — | — |
| C5orf32 | x | x | x | x | x | — | — |
| MAF | x | x | x | x | x | — | — |
| C20orf111 | x | x | x | — | x | — | — |
| KIAA1949 | x | — | x | x | x | — | — |
| RPL19 | x | x | x | — | x | — | — |
| AAK1 | x | — | — | x | x | — | — |
| KLF12 | x | x | x | — | — | — | — |
| LAPTM5 | x | — | x | x | — | — | — |
| C8orf33 | x | x | — | — | — | — | — |
| GCH1 | x | — | — | x | — | — | — |
| URM1 | — | — | x | x | x | — | — |
| HMGB2 | — | x | x | — | — | — | — |
| SPG7 | — | — | — | x | x | — | — |
| AP2A1 | — | x | — | — | — | — | — |
| IL1RN | — | x | — | — | — | — | — |
| MT1G | — | x | — | — | — | — | — |
| TPT1 | — | — | — | x | — | — | — |

(An “x” in the column indicates that the SG in the corresponding row is a member of the Vmod listed in the column; otherwise the “—” indicates the RGP is not a component of the Vmod)

[0399] In general, for each and every Vmod, the ultimate GVHD N Outcome Score (GNOS) is calculated from the RGP values for each sample as follows (as also described above for general voting model (Vmod) implementations): For each RGP, if its value is above or below a defined threshold (LDA separatrix; defined as the midpoint between the GVHD negative and positive population average RGP values), the sample is classified as N (negative), i.e., not leading to aGVHD in the transplantation. N votes are counted as “1”, otherwise counted as “0”, and averaged over all of the RGPs in a particular voting model to arrive at the GNOS.

[0400] Greedy Optimization of RGP Vmods:

[0401] Multiple sources of empirical, data-derived evidence have contributed to the selection of the 100 RGPs (Table 17, VmodRGP100) as outcome predictive high-performance RGP candidates for GVHD outcome prediction implementations of differing selections of 48 total SGs, through Vmods incorporating varying numbers of RGPs. These sources of evidence range from individual RGP performance, compound RGP in PRGP performance, and integrated RGP performance in Vmods designed with alternative RGP selection criteria.

[0402] Thus, an RGP optimization (instead of RGP prioritization, as used above) procedure applied in the design of the GVHD outcome prediction Vmod might result in superior Vmod performance. Accordingly, the following, simple “greedy” search/aggregation procedure was applied for Vmod optimization as described below:
[0403] (1) Vmod: SG43RGP36-RGPgreedysearch.
   [0404] The greedy search begins by selection of the best performing RGP from Table 17 (VmodRGP100 list), which defines Vmod(1). 100 minus 1 alternative Vmods are then evaluated by combining the RGP in Vmod(1) with the remaining 100 minus 1 RGPs, and the outcome predictive performance is determined for each of these 100 minus 1 Vmods. From this list of 100 minus 1 Vmods, the best performing Vmod is selected as Vmod(2). Then 100 minus 2 alternative Vmods are evaluated by combining the RGPs in Vmod(2) with the remaining 100 minus 2 RGPs, and the outcome predictive performance is determined for each of these 100 minus 2 Vmods. From this list of 100 minus 2 Vmods, the best performing Vmod is selected as Vmod(3). In general, 100 minus i alternative Vmods are evaluated by combining the RGPs in Vmod(i) with the remaining 100 minus i RGPs, and the outcome predictive performance is determined for each of these 100 minus i Vmods. From this list of 100 minus i Vmods, the best performing Vmod is selected as Vmod(i+1). The index, i, is then increased by 1, until i=101, at which the search is terminated and all the RGPs have been aggregated. Vmod Gneg vs. Gag3 T-test p-values are determined from the GNOS of each sample. All Vmods are evaluated at a GNOS threshold of 0.55, i.e., at least 55% of the constituent RGP voters in each Vmod must have cast a vote 1, i.e., an N vote (no GVHD) for a given sample. Balanced CMCVs are determined from the 1 (N) and 0 (not N) values determined by a candidate Vmod for each of the Gneg and Gag3 samples.
   [0405] The best performing Vmod from the i Vmod candidates at each iteration is selected according to the following criteria:
      [0406] 1. For the division Gneg vs. Gag3, the TNR (true negative rate, specificity) must be >=0.4 for a Vmod to be considered.
      [0407] 2. The best ranking Vmod is selected, according to the best average rank of the NPV (class numbers-wise balanced negative predictive value, i.e. P_{b}=0.5) rank and p-value rank for the Gneg vs. Gag3 division.
   [0408] After 36 iterations of the greedy search, a total of 36 RGPs were selected, containing 43 unique SGs, including one of the HSK6 SGs (see Table 19, VmodGreedySearch). Combining these 43 SGs with the remaining 5 HSK6 SGs, results in a total of 48 SGs for implementation as a GVHD outcome prediction test.
[0409] (2) Vmod: SG21RGP28-RGPmaxgreedysearch.
   [0410] Note that the best performing Vmod in the greedy search outlined above, in terms of Gneg vs. Gag3 combined NPV (0.96), ACC (0.90) and p-value (2.04×10⁻²³), occurs at 21 iterations of RGP selections, i.e. representing 21 unique SGs that participate in 28 different RGPs (SG21RGP28, see Table 19, VmodGreedySearch). While this Vmod could be implemented as the GVHD outcome prediction test with potentially superior performance, it is neither clear nor certain that SG21RGP28-RGPmaxgreedysearch, using less than half the SGs compared to SG43RGP36-RGPgreedysearch, would perform as consistently or robustly as SG43RGP36-RGPgreedysearch in routine GVHD outcome prediction practice.

TABLE 19
Greedy search performance for Vmods SG43GRP36 and SG21RGP28 (“VmodGreedySearch”)

| | | | Gneg vs. | Gneg vs. | Gneg vs. | | | | ACC |
|---|---|---|---|---|---|---|---|---|---|
| Greedy search | | | Gpos T- | Gag2 T- | Gag3 T- | NPV | TNR Gneg | TPR Gneg | Gneg |
| iteration, | | | test log10 | test log10 | test log10 | Gneg | vs. Gpos | vs. Gpos | vs. |
| GPs per Vmod | Select Vmod | RGP ABI Symbol | p-value | p-value | p-value | vs. Gpos | (specificity) | (sensitivity) | Gpos |
| 1 | | AEBP1-SEC14L1 | −4.69 | −4.55 | −5.90 | 0.68 | 0.63 | 0.71 | 0.67 |
| 2 | | MRPL42-FOXN2 | −5.82 | −6.25 | −8.28 | 0.77 | 0.41 | 0.88 | 0.64 |
| 3 | | PDCD6IP-LYRM5 | −9.00 | −9.19 | −12.16 | 0.76 | 0.64 | 0.79 | 0.72 |
| 4 | | MRPL42-GINS1 | −12.28 | −12.38 | −15.63 | 0.81 | 0.56 | 0.87 | 0.71 |
| 5 | | TMEM8B-C16orf53 | −14.31 | −14.66 | −17.20 | 0.79 | 0.80 | 0.79 | 0.79 |
| 6 | | TMEM8B-SIPA1L2 | −14.44 | −14.74 | −17.27 | 0.82 | 0.66 | 0.86 | 0.76 |
| 7 | | CALM3-HEATR3 | −14.43 | −15.11 | −17.77 | 0.77 | 0.80 | 0.77 | 0.78 |
| 8 | | ABHD12-CALM3 | −14.63 | −15.16 | −18.28 | 0.81 | 0.66 | 0.84 | 0.75 |
| 9 | | MPP5-SEC14L1 | −14.33 | −14.90 | −18.45 | 0.78 | 0.78 | 0.79 | 0.78 |
| 10 | | ANAPC11-GINS1 | −15.48 | −15.86 | −19.22 | 0.80 | 0.71 | 0.83 | 0.77 |
| 11 | | PREX1-SMARCB1 | −15.58 | −16.00 | −19.55 | 0.83 | 0.68 | 0.86 | 0.77 |
| 12 | | AEBP1-NCDN | −16.91 | −17.18 | −20.85 | 0.82 | 0.76 | 0.83 | 0.80 |
| 13 | | VAMP2-TMEM5 | −17.80 | −17.93 | −21.46 | 0.83 | 0.73 | 0.85 | 0.79 |
| 14 | | TMEM49-CALM3 | −18.63 | −18.56 | −22.14 | 0.83 | 0.81 | 0.83 | 0.82 |
| 15 | | MT1E-GINS1 | −19.55 | −19.48 | −22.64 | 0.85 | 0.75 | 0.87 | 0.81 |
| 16 | | TMEM8B-C5orf62 | −18.87 | −18.94 | −22.47 | 0.83 | 0.80 | 0.83 | 0.87 |
| 17 | | PDCD6IP-TATDN1 | −18.93 | −19.09 | −22.59 | 0.84 | 0.76 | 0.85 | 0.81 |
| 18 | | AEBP1-SARM1 | −19.11 | −19.15 | −22.47 | 0.84 | 0.81 | 0.84 | 0.83 |
| 19 | | TMEM8B-NSUN5 | −19.03 | −19.23 | −22.12 | 0.85 | 0.78 | 0.86 | 0.82 |
| 20 | | PLAC8-SEC14L1 | −18.65 | −19.01 | −21.97 | 0.84 | 0.83 | 0.84 | 0.84 |
| 21 | SG21RGP28- | RPL37-GINS1 | −19.45 | −19.74 | −22.69 | 0.86 | 0.83 | 0.86 | 0.85 |
| | RGPmaxgreedy- | | | | | | | | |
| | search | | | | | | | | |
| 22 | | GINS1-MT1H | −20.19 | −20.43 | −23.10 | 0.85 | 0.81 | 0.86 | 0.84 |
| 23 | | TMEM49-MRPL42 | −20.40 | −20.58 | −23.24 | 0.84 | 0.83 | 0.84 | 0.84 |
| 24 | | VAMP2-FOXN2 | −20.22 | −20.36 | −22.91 | 0.85 | 0.81 | 0.85 | 0.83 |
| 25 | | TMEM8B-TM9SF1 | −20.08 | −20.25 | −22.59 | 0.84 | 0.81 | 0.84 | 0.83 |
| 26 | | AEBP1-ZFAND5 | −20.01 | −20.16 | −22.58 | 0.84 | 0.80 | 0.85 | 0.82 |
| 27 | | TMEM49-TATDN1 | −19.31 | −19.54 | −22.18 | 0.84 | 0.81 | 0.84 | 0.83 |
| 28 | | ADRB2-MT1E | −19.17 | −19.42 | −21.93 | 0.84 | 0.80 | 0.85 | 0.82 |
| 29 | | FOXN2-SNURF | −18.93 | −19.23 | −21.76 | 0.83 | 0.81 | 0.83 | 0.82 |
| 30 | | XRCC1-SNX27 | −19.10 | −19.34 | −21.73 | 0.84 | 0.81 | 0.84 | 0.83 |
| 31 | | NR2F6-PRKAR1B | −18.89 | −19.14 | −21.55 | 0.84 | 0.78 | 0.85 | 0.82 |
| 32 | | NCOA4-PAIP2 | −18.58 | −18.86 | −21.22 | 0.84 | 0.80 | 0.84 | 0.82 |
| 33 | | MRPL42-CCDC6 | −18.15 | −18.47 | −20.90 | 0.85 | 0.78 | 0.86 | 0.82 |
| 34 | | TMEM49-FLT3LG | −18.03 | −18.35 | −20.75 | 0.84 | 0.81 | 0.84 | 0.83 |
| 35 | | VAMP2-SERPINB9 | −17.81 | −18.13 | −20.48 | 0.84 | 0.78 | 0.85 | 0.82 |
| 36 | SG43RGP36- | AEBP1-RPUSD1 | −17.95 | −18.20 | −20.48 | 0.83 | 0.80 | 0.83 | 0.82 |
| | RGPgreedy- | | | | | | | | |
| | search | | | | | | | | |

| Greedy search | NPV | TNR Gneg | TPR Gneg | ACC | NPV | TNR Gneg | TPR Gneg | ACC | Unique |
|---|---|---|---|---|---|---|---|---|---|
| iteration, | Gneg | vs. Gag2 | vs. Gag2 | Gneg | Gneg | vs. Gag3 | vs. Gag3 | Gneg | SG |
| GPs per Vmod | vs. Gag2 | (specificity) | (sensitivity) | vs. Gag2 | vs. Gag3 | (specificity) | (sensitivity) | vs. Gag3 | count |
| 1 | 0.68 | 0.63 | 0.71 | 0.67 | 0.74 | 0.63 | 0.78 | 0.70 | 2 |
| 2 | 0.79 | 0.41 | 0.89 | 0.65 | 0.94 | 0.41 | 0.97 | 0.69 | 4 |
| 3 | 0.76 | 0.64 | 0.80 | 0.72 | 0.86 | 0.64 | 0.90 | 0.77 | 6 |
| 4 | 0.81 | 0.56 | 0.87 | 0.79 | 0.93 | 0.56 | 0.96 | 0.76 | 7 |
| 5 | 0.80 | 0.80 | 0.80 | 0.80 | 0.88 | 0.80 | 0.90 | 0.85 | 9 |
| 6 | 0.84 | 0.66 | 0.87 | 0.77 | 0.94 | 0.66 | 0.96 | 0.81 | 10 |
| 7 | 0.80 | 0.80 | 0.80 | 0.80 | 0.90 | 0.80 | 0.91 | 0.85 | 12 |
| 8 | 0.82 | 0.66 | 0.85 | 0.76 | 0.94 | 0.66 | 0.96 | 0.81 | 13 |
| 9 | 0.80 | 0.78 | 0.81 | 0.79 | 0.92 | 0.78 | 0.94 | 0.86 | 14 |
| 10 | 0.82 | 0.71 | 0.85 | 0.78 | 0.95 | 0.71 | 0.96 | 0.84 | 15 |
| 11 | 0.85 | 0.68 | 0.88 | 0.78 | 0.96 | 0.68 | 0.97 | 0.83 | 17 |
| 12 | 0.84 | 0.76 | 0.85 | 0.81 | 0.94 | 0.76 | 0.95 | 0.86 | 18 |
| 13 | 0.85 | 0.73 | 0.87 | 0.80 | 0.95 | 0.73 | 0.96 | 0.84 | 20 |
| 14 | 0.85 | 0.81 | 0.85 | 0.83 | 0.94 | 0.81 | 0.95 | 0.88 | 21 |
| 15 | 0.85 | 0.75 | 0.87 | 0.81 | 0.95 | 0.75 | 0.96 | 0.85 | 22 |
| 16 | 0.84 | 0.80 | 0.85 | 0.89 | 0.94 | 0.80 | 0.95 | 0.87 | 23 |
| 17 | 0.85 | 0.76 | 0.86 | 0.81 | 0.95 | 0.76 | 0.96 | 0.86 | 24 |
| 18 | 0.85 | 0.81 | 0.85 | 0.83 | 0.94 | 0.81 | 0.95 | 0.88 | 25 |
| 19 | 0.86 | 0.78 | 0.87 | 0.83 | 0.95 | 0.78 | 0.96 | 0.87 | 26 |
| 20 | 0.86 | 0.83 | 0.86 | 0.85 | 0.96 | 0.83 | 0.96 | 0.90 | 27 |
| 21 | 0.87 | 0.83 | 0.87 | 0.85 | 0.96 | 0.83 | 0.96 | 0.90 | 28 |
| 22 | 0.86 | 0.81 | 0.87 | 0.84 | 0.95 | 0.81 | 0.96 | 0.89 | 29 |
| 23 | 0.85 | 0.83 | 0.85 | 0.84 | 0.94 | 0.83 | 0.95 | 0.89 | 29 |
| 24 | 0.86 | 0.81 | 0.86 | 0.84 | 0.95 | 0.81 | 0.96 | 0.89 | 29 |
| 25 | 0.85 | 0.81 | 0.85 | 0.83 | 0.94 | 0.81 | 0.95 | 0.88 | 30 |
| 26 | 0.85 | 0.80 | 0.86 | 0.83 | 0.95 | 0.80 | 0.96 | 0.88 | 31 |
| 27 | 0.85 | 0.81 | 0.85 | 0.83 | 0.94 | 0.81 | 0.95 | 0.88 | 31 |
| 28 | 0.85 | 0.80 | 0.86 | 0.83 | 0.95 | 0.80 | 0.96 | 0.88 | 32 |
| 29 | 0.84 | 0.81 | 0.85 | 0.83 | 0.93 | 0.81 | 0.94 | 0.87 | 33 |
| 30 | 0.85 | 0.81 | 0.85 | 0.83 | 0.94 | 0.81 | 0.95 | 0.88 | 35 |
| 31 | 0.85 | 0.78 | 0.86 | 0.82 | 0.95 | 0.78 | 0.96 | 0.87 | 37 |
| 32 | 0.85 | 0.80 | 0.85 | 0.83 | 0.94 | 0.80 | 0.95 | 0.87 | 39 |
| 33 | 0.85 | 0.78 | 0.86 | 0.82 | 0.95 | 0.78 | 0.96 | 0.87 | 40 |
| 34 | 0.85 | 0.81 | 0.85 | 0.83 | 0.94 | 0.81 | 0.95 | 0.88 | 41 |
| 35 | 0.85 | 0.78 | 0.86 | 0.82 | 0.95 | 0.78 | 0.96 | 0.87 | 42 |
| 36 | 0.84 | 0.80 | 0.85 | 0.82 | 0.92 | 0.80 | 0.94 | 0.87 | 43 |

[0411] Determination and Evaluation of Outcome Predictive Performance of RGP Vmods:

[0412] The overall GVHD outcome predictive performance of all 7 Vmods is summarized in Table 20 (VmodSpecs). For all 3 divisions (Gneg vs. Gpos, Gneg vs. Gag2, Gneg vs. Gag3), the following standard specifications (SSPCs) for outcome predictive performance are reported:
[0413] (1) Heteroscedastic, 2-tailed, T-test p-values, based on GNOS values reported for each sample in the Vmod output.
[0414] (2) For 5 different GNOS separatrices (GNOS threshold value at or above which a donor sample is ultimately classified as N, i.e. not causing GVHD in the recipient), of 0.50, 0.55, 0.65, 0.75 and 0.85, 5 additional outcome predictive SSPCs (for example, see definition of CMCVs above).
   [0415] 1. NPV, negative predictive value, balanced, i.e., adjusted for equal proportions of real N outcomes (TN+FP) and real P outcomes (TP+FN), i.e. for balanced prevalence P_{b}=0.5

NPV=TN_{b}/(TN_{b}+FN_{b})
[0416] 2. TNR, true negative rate, i.e., specificity (unaffected by proportions of real N outcomes and real P outcomes)

TNR=TN(TN+FP)
[0417] 3. PPV, positive predictive value, balanced, i.e., adjusted for equal proportions of real N outcomes (TN+FP) and real P outcomes (TP+FN), i.e. for balanced prevalence P_{b}=0.5

PPV=TP_{b}/(TP_{b}+FP_{b})
[0418] 4. TPR, true positive rate, i.e., sensitivity (unaffected by proportions of real N outcomes and real P outcomes)

TPR=TP/(TP+FN)
[0419] 5. ACC, accuracy, balanced, i.e., adjusted for equal proportions of real N outcomes (TN+FP) and real P outcomes (TP+FN), i.e. for balanced prevalence P_{b}=0.5

ACC=(TN_{b}+TP_{b})/(TN_{b}+FN_{b}+TP_{b}+FP_{b})

[0420] The following observations concern Table 20 (VmodSpecs):
[0421] (1) Note that the NPV for the Gneg vs. Gag3 division at GNOS separatrices of 0.75 or 0.85 often reaches values>=0.90, however often also accompanied by TNR values<=0.25.
[0422] (2) Note that for the Gneg vs. Gag3 division, the Vmod SG43RGP36-RGPgreedysearch, at GNOS threshold 0.55, reaches the highest accuracy (0.87) of any Vmod at any division with 42 or 43 SGs, also combining an NPV value of 0.92 with a TNR (specificity) value of 0.80, and with a TPR (sensitivity) value of 0.94.
[0423] (3) Note that for all 3 divisions, and for all Vmods with 42 or 43 SGs, the Vmod SG43RGP36-RGPgreedysearch shows by far the lowest (best) T-test p-values, ranging from 1.1×10⁻¹⁸ for the Gneg vs. Gpos division, to as low as 3.3×10⁻¹⁹ for the Gneg vs. Gag3 division.
[0424] (4) Note that SG21RGP28-RGPmaxgreedysearch shows by far the best SSPCs in every category. While this Vmod could be implemented as GVHD outcome prediction test with potentially superior performance, SG21RGP28-RGPmaxgreedysearch, using less than half the SGs compared to SG43RGP36-RGPgreedysearch, may not perform as consistently or robustly as SG43RGP36-RGPgreedysearch in routine GVHD outcome prediction practice.

TABLE 20
Overall outcome predictive performance for selected 7 Vmods (“VmodSpecs”) at prevalence, P = 0.5

| | Gneg vs. | Gneg vs. | Gneg vs. | | NPV | | | ACC |
|---|---|---|---|---|---|---|---|---|
| | Gpos | Gag2 | Gag3 | | Gneg | TNR Gneg | TPR Gneg | Gneg |
| | T-test | T-test | T-test | GNOS | vs. | vs. Gpos | vs. Gpos | vs. |
| Vmod | p-value | p-value | p-value | threshold | Gpos | (specificity) | (sensitivity) | Gpos |
| SG43RGP46-RGPperformance | 1.0E−11 | 8.3E−12 | 5.4E−13 | 0.50 | 0.75 | 0.78 | 0.74 | 0.76 |
| SG43RGP46-RGPperformance | 1.0E−11 | 8.3E−12 | 5.4E−13 | 0.55 | 0.73 | 0.66 | 0.75 | 0.71 |
| SG43RGP46-RGPperformance | 1.0E−11 | 8.3E−12 | 5.4E−13 | 0.65 | 0.78 | 0.54 | 0.84 | 0.69 |
| SG43RGP46-RGPperformance | 1.0E−11 | 8.3E−12 | 5.4E−13 | 0.75 | 0.77 | 0.42 | 0.88 | 0.65 |
| SG43RGP46-RGPperformance | 1.0E−11 | 8.3E−12 | 5.4E−13 | 0.85 | 0.79 | 0.25 | 0.93 | 0.59 |
| SG42RGP21-RGPminimalist | 1.8E−11 | 1.1E−11 | 1.2E−12 | 0.50 | 0.72 | 0.71 | 0.73 | 0.72 |
| SG42RGP21-RGPminimalist | 1.8E−11 | 1.1E−11 | 1.2E−12 | 0.55 | 0.77 | 0.66 | 0.80 | 0.73 |
| SG42RGP21-RGPminimalist | 1.8E−11 | 1.1E−11 | 1.2E−12 | 0.65 | 0.78 | 0.54 | 0.85 | 0.70 |
| SG42RGP21-RGPminimalist | 1.8E−11 | 1.1E−11 | 1.2E−12 | 0.75 | 0.79 | 0.42 | 0.88 | 0.65 |
| SG42RGP21-RGPminimalist | 1.8E−11 | 1.1E−11 | 1.2E−12 | 0.85 | 0.88 | 0.25 | 0.97 | 0.61 |
| SG43RGP37-RGPconnectivity | 5.5E−11 | 2.8E−11 | 1.6E−12 | 0.50 | 0.73 | 0.75 | 0.72 | 0.73 |
| SG43RGP37-RGPconnectivity | 5.5E−11 | 2.8E−11 | 1.6E−12 | 0.55 | 0.75 | 0.68 | 0.78 | 0.73 |
| SG43RGP37-RGPconnectivity | 5.5E−11 | 2.8E−11 | 1.6E−12 | 0.65 | 0.78 | 0.53 | 0.85 | 0.69 |
| SG43RGP37-RGPconnectivity | 5.5E−11 | 2.8E−11 | 1.6E−12 | 0.75 | 0.80 | 0.46 | 0.88 | 0.67 |
| SG43RGP37-RGPconnectivity | 5.5E−11 | 2.8E−11 | 1.6E−12 | 0.85 | 0.77 | 0.25 | 0.93 | 0.59 |
| SG43RGP51-PRGPminranksort | 9.3E−12 | 5.7E−12 | 1.4E−13 | 0.50 | 0.76 | 0.75 | 0.76 | 0.75 |
| SG43RGP51-PRGPminranksort | 9.3E−12 | 5.7E−12 | 1.4E−13 | 0.55 | 0.77 | 0.63 | 0.81 | 0.72 |
| SG43RGP51-PRGPminranksort | 9.3E−12 | 5.7E−12 | 1.4E−13 | 0.65 | 0.78 | 0.51 | 0.86 | 0.68 |
| SG43RGP51-PRGPminranksort | 9.3E−12 | 5.7E−12 | 1.4E−13 | 0.75 | 0.85 | 0.41 | 0.93 | 0.67 |
| SG43RGP51-PRGPminranksort | 9.3E−12 | 5.7E−12 | 1.4E−13 | 0.85 | 0.80 | 0.10 | 0.98 | 0.54 |
| SG43RGP55-PRGPmedranksort | 2.8E−11 | 2.1E−11 | 6.5E−13 | 0.50 | 0.74 | 0.76 | 0.74 | 0.75 |
| SG43RGP55-PRGPmedranksort | 2.8E−11 | 2.1E−11 | 6.5E−13 | 0.55 | 0.74 | 0.64 | 0.78 | 0.71 |
| SG43RGP55-PRGPmedranksort | 2.8E−11 | 2.1E−11 | 6.5E−13 | 0.65 | 0.77 | 0.51 | 0.85 | 0.68 |
| SG43RGP55-PRGPmedranksort | 2.8E−11 | 2.1E−11 | 6.5E−13 | 0.75 | 0.79 | 0.37 | 0.90 | 0.64 |
| SG43RGP55-PRGPmedranksort | 2.8E−11 | 2.1E−11 | 6.5E−13 | 0.85 | 0.79 | 0.15 | 0.96 | 0.56 |
| SG43RGP36-RGPgreedysearch | 1.1E−18 | 6.3E−19 | 3.3E−21 | 0.50 | 0.79 | 0.86 | 0.77 | 0.82 |
| SG43RGP36-RGPgreedysearch | 1.1E−18 | 6.3E−19 | 3.3E−21 | 0.55 | 0.83 | 0.80 | 0.83 | 0.82 |
| SG43RGP36-RGPgreedysearch | 1.1E−18 | 6.3E−19 | 3.3E−21 | 0.65 | 0.82 | 0.53 | 0.88 | 0.70 |
| SG43RGP36-RGPgreedysearch | 1.1E−18 | 6.3E−19 | 3.3E−21 | 0.75 | 0.84 | 0.25 | 0.95 | 0.60 |
| SG43RGP36-RGPgreedysearch | 1.1E−18 | 6.3E−19 | 3.3E−21 | 0.85 | 0.86 | 0.05 | 0.99 | 0.52 |
| SG21RGP28-RGPmaxgreedysearch | 3.6E−20 | 1.8E−20 | 2.0E−23 | 0.50 | 0.81 | 0.83 | 0.80 | 0.82 |
| SG21RGP28-RGPmaxgreedysearch | 3.6E−20 | 1.8E−20 | 2.0E−23 | 0.55 | 0.86 | 0.83 | 0.86 | 0.85 |
| SG21RGP28-RGPmaxgreedysearch | 3.6E−20 | 1.8E−20 | 2.0E−23 | 0.65 | 0.79 | 0.47 | 0.88 | 0.68 |
| SG21RGP28-RGPmaxgreedysearch | 3.6E−20 | 1.8E−20 | 2.0E−23 | 0.75 | 0.86 | 0.25 | 0.96 | 0.61 |
| SG21RGP28-RGPmaxgreedysearch | 3.6E−20 | 1.8E−20 | 2.0E−23 | 0.85 | 0.61 | 0.05 | 0.97 | 0.51 |

| | NPV | | | ACC | NPV | | | ACC |
|---|---|---|---|---|---|---|---|---|
| | Gneg | TNR Gneg | TPR Gneg | Gneg | Gneg | TNR Gneg | TPR Gneg | Gneg |
| | vs. | vs. Gag2 | vs. Gag2 | vs. | vs. | vs. Gag3 | vs. Gag3 | vs. |
| Vmod | Gag2 | (specificity) | (sensitivity) | Gag2 | Gag3 | (specificity) | (sensitivity) | Gag3 |
| SG43RGP46-RGPperformance | 0.75 | 0.78 | 0.75 | 0.76 | 0.80 | 0.78 | 0.81 | 0.79 |
| SG43RGP46-RGPperformance | 0.72 | 0.66 | 0.75 | 0.70 | 0.77 | 0.66 | 0.81 | 0.73 |
| SG43RGP46-RGPperformance | 0.78 | 0.54 | 0.85 | 0.69 | 0.86 | 0.54 | 0.91 | 0.73 |
| SG43RGP46-RGPperformance | 0.77 | 0.42 | 0.87 | 0.65 | 0.84 | 0.42 | 0.92 | 0.67 |
| SG43RGP46-RGPperformance | 0.80 | 0.25 | 0.94 | 0.60 | 0.91 | 0.25 | 0.97 | 0.61 |
| SG42RGP21-RGPminimalist | 0.72 | 0.71 | 0.73 | 0.72 | 0.76 | 0.71 | 0.78 | 0.75 |
| SG42RGP21-RGPminimalist | 0.77 | 0.66 | 0.80 | 0.73 | 0.85 | 0.66 | 0.88 | 0.77 |
| SG42RGP21-RGPminimalist | 0.79 | 0.54 | 0.85 | 0.70 | 0.87 | 0.54 | 0.92 | 0.73 |
| SG42RGP21-RGPminimalist | 0.80 | 0.42 | 0.89 | 0.66 | 0.87 | 0.42 | 0.94 | 0.68 |
| SG42RGP21-RGPminimalist | 0.90 | 0.25 | 0.97 | 0.61 | 1.00 | 0.25 | 1.00 | 0.63 |
| SG43RGP37-RGPconnectivity | 0.73 | 0.75 | 0.73 | 0.74 | 0.77 | 0.75 | 0.78 | 0.76 |
| SG43RGP37-RGPconnectivity | 0.76 | 0.68 | 0.79 | 0.73 | 0.84 | 0.68 | 0.87 | 0.77 |
| SG43RGP37-RGPconnectivity | 0.78 | 0.53 | 0.85 | 0.69 | 0.89 | 0.53 | 0.94 | 0.73 |
| SG43RGP37-RGPconnectivity | 0.81 | 0.46 | 0.89 | 0.67 | 0.90 | 0.46 | 0.95 | 0.70 |
| SG43RGP37-RGPconnectivity | 0.78 | 0.25 | 0.93 | 0.59 | 0.91 | 0.25 | 0.97 | 0.61 |
| SG43RGP51-PRGPminranksort | 0.77 | 0.75 | 0.77 | 0.76 | 0.82 | 0.75 | 0.83 | 0.79 |
| SG43RGP51-PRGPminranksort | 0.78 | 0.63 | 0.83 | 0.73 | 0.86 | 0.63 | 0.90 | 0.76 |
| SG43RGP51-PRGPminranksort | 0.79 | 0.51 | 0.86 | 0.69 | 0.89 | 0.51 | 0.94 | 0.72 |
| SG43RGP51-PRGPminranksort | 0.85 | 0.41 | 0.93 | 0.67 | 0.91 | 0.41 | 0.96 | 0.68 |
| SG43RGP51-PRGPminranksort | 0.79 | 0.10 | 0.97 | 0.54 | 1.00 | 0.10 | 1.00 | 0.55 |
| SG43RGP55-PRGPmedranksort | 0.75 | 0.76 | 0.75 | 0.75 | 0.80 | 0.76 | 0.81 | 0.78 |
| SG43RGP55-PRGPmedranksort | 0.75 | 0.64 | 0.79 | 0.72 | 0.82 | 0.64 | 0.86 | 0.75 |
| SG43RGP55-PRGPmedranksort | 0.78 | 0.51 | 0.85 | 0.68 | 0.87 | 0.51 | 0.92 | 0.72 |
| SG43RGP55-PRGPmedranksort | 0.79 | 0.37 | 0.90 | 0.64 | 0.88 | 0.37 | 0.95 | 0.66 |
| SG43RGP55-PRGPmedranksort | 0.81 | 0.15 | 0.96 | 0.56 | 1.00 | 0.15 | 1.00 | 0.58 |
| SG43RGP36-RGPgreedysearch | 0.79 | 0.86 | 0.77 | 0.82 | 0.84 | 0.86 | 0.83 | 0.85 |
| SG43RGP36-RGPgreedysearch | 0.84 | 0.80 | 0.85 | 0.82 | 0.92 | 0.80 | 0.94 | 0.87 |
| SG43RGP36-RGPgreedysearch | 0.83 | 0.53 | 0.89 | 0.71 | 0.93 | 0.53 | 0.96 | 0.74 |
| SG43RGP36-RGPgreedysearch | 0.85 | 0.25 | 0.95 | 0.60 | 0.91 | 0.25 | 0.97 | 0.61 |
| SG43RGP36-RGPgreedysearch | 0.85 | 0.05 | 0.99 | 0.52 | 1.00 | 0.05 | 1.00 | 0.53 |
| SG21RGP28-RGPmaxgreedysearch | 0.82 | 0.83 | 0.82 | 0.82 | 0.90 | 0.83 | 0.91 | 0.87 |
| SG21RGP28-RGPmaxgreedysearch | 0.87 | 0.83 | 0.87 | 0.85 | 0.96 | 0.83 | 0.96 | 0.90 |
| SG21RGP28-RGPmaxgreedysearch | 0.79 | 0.47 | 0.87 | 0.67 | 0.92 | 0.47 | 0.96 | 0.72 |
| SG21RGP28-RGPmaxgreedysearch | 0.85 | 0.25 | 0.95 | 0.60 | 0.91 | 0.25 | 0.97 | 0.61 |
| SG21RGP28-RGPmaxgreedysearch | 0.58 | 0.05 | 0.96 | 0.51 | 0.80 | 0.05 | 0.99 | 0.52 |

[0425] The observed and balanced (adjusted for equal proportions of real N outcomes and real P outcomes), absolute or relative (for adjusted values) “confusion matrix” counts of correctly and incorrectly classified samples (TN, FP, TP, FN; bTN, bFP, bTP, bFN), for the 5 different GNOS separatrices (0.50, 0.55, 0.65, 0.75 and 0.85) from which all of the 5 outcome predictive accuracies/proportions (NPV, TNR, PPV, TPR, ACC) were calculated, are reported in Table 21 (VmodCounts).

TABLE 21
Correct and incorrect sample classification counts and balanced
relative counts for selected 7 Vmods (“VmodCounts”)

| | GNOS | TN | FP | TP | FN | TP | FN | TP | FN | bTN |
|---|---|---|---|---|---|---|---|---|---|---|
| Vmod | threshold | Gneg | Gneg | Gpos | Gpos | Gag2 | Gag2 | Gag3 | Gag3 | Gneg |
| SG43RGP46-RGPperformance | 0.50 | 46 | 13 | 90 | 31 | 82 | 28 | 62 | 15 | 0.39 |
| SG43RGP46-RGPperformance | 0.55 | 39 | 20 | 91 | 30 | 82 | 28 | 62 | 15 | 0.33 |
| SG43RGP46-RGPperformance | 0.65 | 32 | 27 | 102 | 19 | 93 | 17 | 70 | 7 | 0.27 |
| SG43RGP46-RGPperformance | 0.75 | 25 | 34 | 106 | 15 | 96 | 14 | 71 | 6 | 0.21 |
| SG43RGP46-RGPperformance | 0.85 | 15 | 44 | 113 | 8 | 103 | 7 | 75 | 2 | 0.13 |
| SG42RGP21-RGPminimalist | 0.50 | 42 | 17 | 88 | 33 | 80 | 30 | 60 | 17 | 0.36 |
| SG42RGP21-RGPminimalist | 0.55 | 39 | 20 | 97 | 24 | 88 | 22 | 68 | 9 | 0.33 |
| SG42RGP21-RGPminimalist | 0.65 | 32 | 27 | 103 | 18 | 94 | 16 | 71 | 6 | 0.27 |
| SG42RGP21-RGPminimalist | 0.75 | 25 | 34 | 107 | 14 | 98 | 12 | 72 | 5 | 0.21 |
| SG42RGP21-RGPminimalist | 0.85 | 15 | 44 | 117 | 4 | 107 | 3 | 77 | 0 | 0.13 |
| SG43RGP37-RGPconnectivity | 0.50 | 44 | 15 | 87 | 34 | 80 | 30 | 60 | 17 | 0.37 |
| SG43RGP37-RGPconnectivity | 0.55 | 40 | 19 | 94 | 27 | 87 | 23 | 67 | 10 | 0.34 |
| SG43RGP37-RGPconnectivity | 0.65 | 31 | 28 | 103 | 18 | 94 | 16 | 72 | 5 | 0.26 |
| SG43RGP37-RGPconnectivity | 0.75 | 27 | 32 | 107 | 14 | 98 | 12 | 73 | 4 | 0.23 |
| SG43RGP37-RGPconnectivity | 0.85 | 15 | 44 | 112 | 9 | 102 | 8 | 75 | 2 | 0.13 |
| SG43RGP51-PRGPminranksort | 0.50 | 44 | 15 | 92 | 29 | 85 | 25 | 64 | 13 | 0.37 |
| SG43RGP51-PRGPminranksort | 0.55 | 37 | 22 | 98 | 23 | 91 | 19 | 69 | 8 | 0.31 |
| SG43RGP51-PRGPminranksort | 0.65 | 30 | 29 | 104 | 17 | 95 | 15 | 72 | 5 | 0.25 |
| SG43RGP51-PRGPminranksort | 0.75 | 24 | 35 | 112 | 9 | 102 | 8 | 74 | 3 | 0.20 |
| SG43RGP51-PRGPminranksort | 0.85 | 6 | 53 | 118 | 3 | 107 | 3 | 77 | 0 | 0.05 |
| SG43RGP55-PRGPmedranksort | 0.50 | 45 | 14 | 89 | 32 | 82 | 28 | 62 | 15 | 0.38 |
| SG43RGP55-PRGPmedranksort | 0.55 | 38 | 21 | 94 | 27 | 87 | 23 | 66 | 11 | 0.32 |
| SG43RGP55-PRGPmedranksort | 0.65 | 30 | 29 | 103 | 18 | 94 | 16 | 71 | 6 | 0.25 |
| SG43RGP55-PRGPmedranksort | 0.75 | 22 | 37 | 109 | 12 | 99 | 11 | 73 | 4 | 0.19 |
| SG43RGP55-PRGPmedranksort | 0.85 | 9 | 50 | 116 | 5 | 106 | 4 | 77 | 0 | 0.08 |
| SG43RGP36-RGPgreedysearch | 0.50 | 51 | 8 | 93 | 28 | 85 | 25 | 64 | 13 | 0.43 |
| SG43RGP36-RGPgreedysearch | 0.55 | 47 | 12 | 101 | 20 | 93 | 17 | 72 | 5 | 0.40 |
| SG43RGP36-RGPgreedysearch | 0.65 | 31 | 28 | 107 | 14 | 98 | 12 | 74 | 3 | 0.26 |
| SG43RGP36-RGPgreedysearch | 0.75 | 15 | 44 | 115 | 6 | 105 | 5 | 75 | 2 | 0.13 |
| SG43RGP36-RGPgreedysearch | 0.85 | 3 | 56 | 120 | 1 | 109 | 1 | 77 | 0 | 0.03 |
| SG21RGP28-RGPmaxgreedysearch | 0.50 | 49 | 10 | 97 | 24 | 90 | 20 | 70 | 7 | 0.42 |
| SG21RGP28-RGPmaxgreedysearch | 0.55 | 49 | 10 | 104 | 17 | 96 | 14 | 74 | 3 | 0.42 |
| SG21RGP28-RGPmaxgreedysearch | 0.65 | 28 | 31 | 106 | 15 | 96 | 14 | 74 | 3 | 0.24 |
| SG21RGP28-RGPmaxgreedysearch | 0.75 | 15 | 44 | 116 | 5 | 105 | 5 | 75 | 2 | 0.13 |
| SG21RGP28-RGPmaxgreedysearch | 0.85 | 3 | 56 | 117 | 4 | 106 | 4 | 76 | 1 | 0.03 |

| | bFP | bTP | bFN | bTP | bFN | bTP | bFN |
|---|---|---|---|---|---|---|---|
| Vmod | Gneg | Gpos | Gpos | Gag2 | Gag2 | Gag3 | Gag3 |
| SG43RGP46-RGPperformance | 0.11 | 0.37 | 0.13 | 0.37 | 0.13 | 0.40 | 0.10 |
| SG43RGP46-RGPperformance | 0.17 | 0.38 | 0.12 | 0.37 | 0.13 | 0.40 | 0.10 |
| SG43RGP46-RGPperformance | 0.23 | 0.42 | 0.08 | 0.42 | 0.08 | 0.45 | 0.05 |
| SG43RGP46-RGPperformance | 0.29 | 0.44 | 0.06 | 0.44 | 0.06 | 0.46 | 0.04 |
| SG43RGP46-RGPperformance | 0.37 | 0.47 | 0.03 | 0.47 | 0.03 | 0.49 | 0.01 |
| SG42RGP21-RGPminimalist | 0.14 | 0.36 | 0.14 | 0.36 | 0.14 | 0.39 | 0.11 |
| SG42RGP21-RGPminimalist | 0.17 | 0.40 | 0.10 | 0.40 | 0.10 | 0.44 | 0.06 |
| SG42RGP21-RGPminimalist | 0.23 | 0.43 | 0.07 | 0.43 | 0.07 | 0.46 | 0.04 |
| SG42RGP21-RGPminimalist | 0.29 | 0.44 | 0.06 | 0.45 | 0.05 | 0.47 | 0.03 |
| SG42RGP21-RGPminimalist | 0.37 | 0.48 | 0.02 | 0.49 | 0.01 | 0.50 | 0.00 |
| SG43RGP37-RGPconnectivity | 0.13 | 0.36 | 0.14 | 0.36 | 0.14 | 0.39 | 0.11 |
| SG43RGP37-RGPconnectivity | 0.16 | 0.39 | 0.11 | 0.40 | 0.10 | 0.44 | 0.06 |
| SG43RGP37-RGPconnectivity | 0.24 | 0.43 | 0.07 | 0.43 | 0.07 | 0.47 | 0.03 |
| SG43RGP37-RGPconnectivity | 0.27 | 0.44 | 0.06 | 0.45 | 0.05 | 0.47 | 0.03 |
| SG43RGP37-RGPconnectivity | 0.37 | 0.46 | 0.04 | 0.46 | 0.04 | 0.49 | 0.01 |
| SG43RGP51-PRGPminranksort | 0.13 | 0.38 | 0.12 | 0.39 | 0.11 | 0.42 | 0.08 |
| SG43RGP51-PRGPminranksort | 0.19 | 0.40 | 0.10 | 0.41 | 0.09 | 0.45 | 0.05 |
| SG43RGP51-PRGPminranksort | 0.25 | 0.43 | 0.07 | 0.43 | 0.07 | 0.47 | 0.03 |
| SG43RGP51-PRGPminranksort | 0.30 | 0.46 | 0.04 | 0.46 | 0.04 | 0.48 | 0.02 |
| SG43RGP51-PRGPminranksort | 0.45 | 0.49 | 0.01 | 0.49 | 0.01 | 0.50 | 0.00 |
| SG43RGP55-PRGPmedranksort | 0.12 | 0.37 | 0.13 | 0.37 | 0.13 | 0.40 | 0.10 |
| SG43RGP55-PRGPmedranksort | 0.18 | 0.39 | 0.11 | 0.40 | 0.10 | 0.43 | 0.07 |
| SG43RGP55-PRGPmedranksort | 0.25 | 0.43 | 0.07 | 0.43 | 0.07 | 0.46 | 0.04 |
| SG43RGP55-PRGPmedranksort | 0.31 | 0.45 | 0.05 | 0.45 | 0.05 | 0.47 | 0.03 |
| SG43RGP55-PRGPmedranksort | 0.42 | 0.48 | 0.02 | 0.48 | 0.02 | 0.50 | 0.00 |
| SG43RGP36-RGPgreedysearch | 0.07 | 0.38 | 0.12 | 0.39 | 0.11 | 0.42 | 0.08 |
| SG43RGP36-RGPgreedysearch | 0.10 | 0.42 | 0.08 | 0.42 | 0.08 | 0.47 | 0.03 |
| SG43RGP36-RGPgreedysearch | 0.24 | 0.44 | 0.06 | 0.45 | 0.05 | 0.48 | 0.02 |
| SG43RGP36-RGPgreedysearch | 0.37 | 0.48 | 0.02 | 0.48 | 0.02 | 0.49 | 0.01 |
| SG43RGP36-RGPgreedysearch | 0.47 | 0.50 | 0.00 | 0.50 | 0.00 | 0.50 | 0.00 |
| SG21RGP28-RGPmaxgreedysearch | 0.08 | 0.40 | 0.10 | 0.41 | 0.09 | 0.45 | 0.05 |
| SG21RGP28-RGPmaxgreedysearch | 0.08 | 0.43 | 0.07 | 0.44 | 0.06 | 0.48 | 0.02 |
| SG21RGP28-RGPmaxgreedysearch | 0.26 | 0.44 | 0.06 | 0.44 | 0.06 | 0.48 | 0.02 |
| SG21RGP28-RGPmaxgreedysearch | 0.37 | 0.48 | 0.02 | 0.48 | 0.02 | 0.49 | 0.01 |
| SG21RGP28-RGPmaxgreedysearch | 0.47 | 0.48 | 0.02 | 0.48 | 0.02 | 0.49 | 0.01 |

[0426] Projected Medical Gains when Using GVHD Outcome Prediction:

[0427] Projected medical practice and patients' morbidity and mortality gains in GVHD outcome reduction, concomitant with projected GVHD N donor capture (GVHD N donor is defined as member of set of real, observed donors in transplantations not involving GVHD, i.e. sum of true negatives and false positives), for realistic prevalence estimates of acute grade II, III or IV GVHD (35% to 55%) and acute grade III or IV GVHD (15% to 35%) for different GNOS separatrices are summarized in Tables 22 and 23, VmodMedGainGag3 and VmodMedGainGag2, respectively. The GVHD reduction projection is based on the assumption that only donors would be used in transplants that are predicted to not cause GVHD in the recipient. In other words, assuming such stringent “N” donor selection practice, the only remaining cases of grades II, III, or IV acute GVHD should be due to any remaining false negative predictions.

[0428] The projections covering various prevalence alternatives in Tables 22 and 23 (VmodMedGainGag3 and VmodMedGainGag2) are directly and completely derived from the values listed in Table 21 (VmodCounts), i.e. sample classification counts and balanced CMCVs (confusion matrix classification values), for the selected 6 Vmods, considering varying GNOS separatrices. In addition, these Tables also report the SSPCs of NPV, TNR (specificity) and TPR (sensitivity), at the respective alternative prevalences, Pₐ, and GNOS separatrices.

[0429] To determine select SSCVs for alternative (noted by subscript “a”) prevalences, Pₐ, the 4 CMCVs need to first be adjusted as described below:

TNₐ=(1−Pₐ)/(1−P₀)*TN₀ (1)

FPₐ=(1−Pₐ)/(1−P₀)*FP₀ (2)

TPₐ=Pₐ/P₀*TP₀ (3)

FNₐ=Pₐ/P₀*FN₀ (4)

[0430] Note that for converting the balanced CMCVs listed in Table 21 “VmodCounts,” P₀=P_{b}=0.50.

[0431] Given the CMCVs adjusted for Pₐ above, the following 5 SSPCs are determined as follows:
[0432] (1) NPV, negative predictive value, adjusted for alternative prevalence, Pₐ

NPV=TNₐ/(TNₐ+FNₐ)
[0433] (2) TNR, true negative rate, specificity (unaffected by prevalence)

TNR=TN(TN+FP)
[0434] (3) PPV, positive predictive value, adjusted for alternative prevalence, Pₐ

PPV=TPₐ/(TPₐ+FPₐ)
[0435] (4) TPR, true positive rate, i.e., sensitivity (unaffected by prevalence)

TPR=TP/(TP+FN)
[0436] (5) ACC, accuracy, adjusted for alternative prevalence, Pₐ

ACC=(TNₐ+TPₐ)/(TNₐ+FNₐ+TPₐ+FPₐ)

[0437] The GVHD reduction value reported in the Tables is calculated from the respective negative predictive values (NPV) and alternative prevalences (Pₐ) according to the following equation: GVHD reduction=1−(1−NPV)/Pₐ.

[0438] When the NPV is 1, i.e. when 100% of negative classifications are correct, GVHD reduction becomes 1, i.e. 100%. When the NPV is between [1−Pₐ] and 1, the GVHD reduction ranges from 0 to 1, i.e. 0% to 100%. When the NPV is between 0 and [1−Pₐ], the GVHD reduction ranges from [1−1/Pₐ] (the lower limit of GVHD reduction, which is negative when Pₐ<1), to 0. Note that the when the NPV<[1−Pₐ], the corresponding negative GVHD reduction really means there would be an increase of GVHD. Therefore, for the GVHD outcome prediction test to be effective in GVHD reduction, it is always a requirement that NPV>[1−Pₐ].

[0439] The GVHD N donor capture value reported in the Tables is the same as the TNR value, but reported as a percentage. This value emphasizes the percentage of “real” available negative donors that would be captured by the GVHD outcome prediction test.

[0440] The following observations should be noted for Table 22 (VmodMedGainGag3), at the lowest Gag3 prevalence of 15%:
[0441] (1) The projected GVHD reduction at GNOS separatrices of 0.75 or 0.85 often reaches values>=85%, however often also accompanied by GVHD N donor capture of <=25%.
[0442] (2) Note that for Vmods with 42 or 43 SGs, the Vmod SG43RGP36-RGPgreedysearch, at GNOS threshold 0.55, reaches the highest combined 91% GVHD reduction with 80% GVHD N donor capture.
[0443] (3) For the Vmod SG42RGP21-RGPminimalist, at GNOS threshold 0.85, projects 100% GVHD reduction, however with 25% GVHD N donor capture. Furthermore, the unusually high value of 100% would likely drop to somewhere in the 90% range, as more samples are tested in the future with more behavioral diversity represented by a more complex population than has been surveyed so far.
[0444] (4) SG21RGP28-RGPmaxgreedysearch shows the highest combined GVHD reduction (95%) with GVHD N donor capture (83%) compared to all other Vmods. While this Vmod could be implemented with potentially superior performance, SG21RGP28-RGPmaxgreedysearch, using less than half the SGs compared to SG43RGP36-RGPgreedysearch, may not perform as consistently or robustly as SG43RGP36-RGPgreedysearch in routine practice.

[0445] The following observations should be note for Table 23 (VmodMedGainGag2), at the lowest Gag2 prevalence of 35%:
[0446] (1) For Vmods with 42 or 43 SGs, the Vmod SG43RGP36-RGPgreedysearch, at GNOS threshold 0.55, reaches the highest combined 73% GVHD reduction with 80% GVHD N donor capture.
[0447] (2) The Vmod SG42RGP21-RGPminimalist, at GNOS threshold 0.85, projects 84% GVHD reduction, however with 25% GVHD N donor capture.
[0448] (3) SG21RGP28-RGPmaxgreedysearch shows the highest combined GVHD reduction (78%) with GVHD N donor capture (83%) compared to all other Vmods.

TABLE 22
Projected gains in GVHD outcome reduction and GVHD N donor capture for acute grades
III or IV GVHD (“VmodMedGainGag3”), assuming prevalences ranging from 15% to 35%

| | | Alternative prevalences for Gag3 | | | | | | |
|---|---|---|---|---|---|---|---|---|
| | | | 35% | 35% | | 35% | | 25% |
| | | | TNR Gneg | TPR Gneg | 35% | GVHD N | | TNR Gneg |
| | GNOS | 35% | vs. Gag3 | vs. Gag3 | GVHD | donor | 25% | vs. Gag3 |
| | thresh- | NPV Gneg | (spec- | (sensi- | reduction | capture | NPV Gneg | (spec- |
| Vmod | old | vs. Gag3 | ificity) | tivity) | for Gag3 | of Gneg | vs. Gag3 | ificity) |
| SG43RGP46-RGPperformance | 0.50 | 0.88 | 0.78 | 0.81 | 66% | 78% | 0.92 | 0.78 |
| SG43RGP46-RGPperformance | 0.55 | 0.86 | 0.66 | 0.81 | 61% | 66% | 0.91 | 0.66 |
| SG43RGP46-RGPperformance | 0.65 | 0.92 | 0.54 | 0.91 | 76% | 54% | 0.95 | 0.54 |
| SG43RGP46-RGPperformance | 0.75 | 0.91 | 0.42 | 0.92 | 74% | 42% | 0.94 | 0.42 |
| SG43RGP46-RGPperformance | 0.85 | 0.95 | 0.25 | 0.97 | 85% | 25% | 0.97 | 0.25 |
| SG42RGP21-RGPminimalist | 0.50 | 0.86 | 0.71 | 0.78 | 59% | 71% | 0.91 | 0.71 |
| SG42RGP21-RGPminimalist | 0.55 | 0.91 | 0.66 | 0.88 | 75% | 66% | 0.94 | 0.66 |
| SG42RGP21-RGPminimalist | 0.65 | 0.93 | 0.54 | 0.92 | 79% | 54% | 0.95 | 0.54 |
| SG42RGP21-RGPminimalist | 0.75 | 0.92 | 0.42 | 0.94 | 78% | 42% | 0.95 | 0.42 |
| SG42RGP21-RGPminimalist | 0.85 | 1.00 | 0.25 | 1.00 | 100% | 25% | 1.00 | 0.25 |
| SG43RGP37-RGPconnectivity | 0.50 | 0.86 | 0.75 | 0.78 | 61% | 75% | 0.91 | 0.75 |
| SG43RGP37-RGPconnectivity | 0.55 | 0.91 | 0.68 | 0.87 | 73% | 68% | 0.94 | 0.68 |
| SG43RGP37-RGPconnectivity | 0.65 | 0.94 | 0.53 | 0.94 | 82% | 53% | 0.96 | 0.53 |
| SG43RGP37-RGPconnectivity | 0.75 | 0.94 | 0.46 | 0.95 | 84% | 46% | 0.96 | 0.46 |
| SG43RGP37-RGPconnectivity | 0.85 | 0.95 | 0.25 | 0.97 | 85% | 25% | 0.97 | 0.25 |
| SG43RGP51-PRGPminranksort | 0.50 | 0.89 | 0.75 | 0.83 | 69% | 75% | 0.93 | 0.75 |
| SG43RGP51-PRGPminranksort | 0.55 | 0.92 | 0.63 | 0.90 | 77% | 63% | 0.95 | 0.63 |
| SG43RGP51-PRGPminranksort | 0.65 | 0.94 | 0.51 | 0.94 | 82% | 51% | 0.96 | 0.51 |
| SG43RGP51-PRGPminranksort | 0.75 | 0.95 | 0.41 | 0.96 | 86% | 41% | 0.97 | 0.41 |
| SG43RGP51-PRGPminranksort | 0.85 | 1.00 | 0.10 | 1.00 | 100% | 10% | 1.00 | 0.10 |
| SG43RGP55-PRGPmedranksort | 0.50 | 0.88 | 0.76 | 0.81 | 65% | 76% | 0.92 | 0.76 |
| SG43RGP55-PRGPmedranksort | 0.55 | 0.89 | 0.64 | 0.86 | 70% | 64% | 0.93 | 0.64 |
| SG43RGP55-PRGPmedranksort | 0.65 | 0.92 | 0.51 | 0.92 | 78% | 51% | 0.95 | 0.51 |
| SG43RGP55-PRGPmedranksort | 0.75 | 0.93 | 0.37 | 0.95 | 80% | 37% | 0.96 | 0.37 |
| SG43RGP55-PRGPmedranksort | 0.85 | 1.00 | 0.15 | 1.00 | 100% | 15% | 1.00 | 0.15 |
| SG43RGP36-RGPgreedysearch | 0.50 | 0.90 | 0.86 | 0.83 | 73% | 86% | 0.94 | 0.86 |
| SG43RGP36-RGPgreedysearch | 0.55 | 0.96 | 0.80 | 0.94 | 88% | 80% | 0.97 | 0.80 |
| SG43RGP36-RGPgreedysearch | 0.65 | 0.96 | 0.53 | 0.96 | 89% | 53% | 0.98 | 0.53 |
| SG43RGP36-RGPgreedysearch | 0.75 | 0.95 | 0.25 | 0.97 | 85% | 25% | 0.97 | 0.25 |
| SG43RGP36-RGPgreedysearch | 0.85 | 1.00 | 0.05 | 1.00 | 100% | 5% | 1.00 | 0.05 |
| SG21RGP28-RGPmaxgreedysearch | 0.50 | 0.94 | 0.83 | 0.91 | 84% | 83% | 0.96 | 0.83 |
| SG21RGP28-RGPmaxgreedysearch | 0.55 | 0.98 | 0.83 | 0.96 | 93% | 83% | 0.98 | 0.83 |
| SG21RGP28-RGPmaxgreedysearch | 0.65 | 0.96 | 0.47 | 0.96 | 88% | 47% | 0.97 | 0.47 |
| SG21RGP28-RGPmaxgreedysearch | 0.75 | 0.95 | 0.25 | 0.97 | 85% | 25% | 0.97 | 0.25 |
| SG21RGP28-RGPmaxgreedysearch | 0.85 | 0.88 | 0.05 | 0.99 | 65% | 5% | 0.92 | 0.05 |

| | Alternative prevalences for Gag3 | | | | | | | |
|---|---|---|---|---|---|---|---|---|
| | 25% | | 25% | | 15% | 15% | | 15% |
| | TPR Gneg | 25% | GVHD N | | TNR Gneg | TPR Gneg | 15% | GVHD N |
| | vs. Gag3 | GVHD | donor | 15% | vs. Gag3 | vs. Gag3 | GVHD | donor |
| | (sensi- | reduction | capture of | NPV Gneg | (spec- | (sensi- | reduction | capture of |
| Vmod | tivity) | for Gag3 | Gneg | vs. Gag3 | ificity) | tivity) | for Gag3 | Gneg |
| SG43RGP46-RGPperformance | 0.81 | 69% | 78% | 0.96 | 0.78 | 0.81 | 72% | 78% |
| SG43RGP46-RGPperformance | 0.81 | 64% | 66% | 0.95 | 0.66 | 0.81 | 67% | 66% |
| SG43RGP46-RGPperformance | 0.91 | 79% | 54% | 0.97 | 0.54 | 0.91 | 81% | 54% |
| SG43RGP46-RGPperformance | 0.92 | 77% | 42% | 0.97 | 0.42 | 0.92 | 79% | 42% |
| SG43RGP46-RGPperformance | 0.97 | 87% | 25% | 0.98 | 0.25 | 0.97 | 88% | 25% |
| SG42RGP21-RGPminimalist | 0.78 | 63% | 71% | 0.95 | 0.71 | 0.78 | 65% | 71% |
| SG42RGP21-RGPminimalist | 0.88 | 78% | 66% | 0.97 | 0.66 | 0.88 | 80% | 66% |
| SG42RGP21-RGPminimalist | 0.92 | 82% | 54% | 0.98 | 0.54 | 0.92 | 84% | 54% |
| SG42RGP21-RGPminimalist | 0.94 | 81% | 42% | 0.97 | 0.42 | 0.94 | 82% | 42% |
| SG42RGP21-RGPminimalist | 1.00 | 100% | 25% | 1.00 | 0.25 | 1.00 | 100% | 25% |
| SG43RGP37-RGPconnectivity | 0.78 | 64% | 75% | 0.95 | 0.75 | 0.78 | 67% | 75% |
| SG43RGP37-RGPconnectivity | 0.87 | 76% | 68% | 0.97 | 0.68 | 0.87 | 78% | 68% |
| SG43RGP37-RGPconnectivity | 0.94 | 84% | 53% | 0.98 | 0.53 | 0.94 | 86% | 53% |
| SG43RGP37-RGPconnectivity | 0.95 | 85% | 46% | 0.98 | 0.46 | 0.95 | 87% | 46% |
| SG43RGP37-RGPconnectivity | 0.97 | 87% | 25% | 0.98 | 0.25 | 0.97 | 88% | 25% |
| SG43RGP51-PRGPminranksort | 0.83 | 72% | 75% | 0.96 | 0.75 | 0.83 | 74% | 75% |
| SG43RGP51-PRGPminranksort | 0.90 | 79% | 63% | 0.97 | 0.63 | 0.90 | 81% | 63% |
| SG43RGP51-PRGPminranksort | 0.94 | 84% | 51% | 0.98 | 0.51 | 0.94 | 85% | 51% |
| SG43RGP51-PRGPminranksort | 0.96 | 88% | 41% | 0.98 | 0.41 | 0.96 | 89% | 41% |
| SG43RGP51-PRGPminranksort | 1.00 | 100% | 10% | 1.00 | 0.10 | 1.00 | 100% | 10% |
| SG43RGP55-PRGPmedranksort | 0.81 | 69% | 76% | 0.96 | 0.76 | 0.81 | 71% | 76% |
| SG43RGP55-PRGPmedranksort | 0.86 | 72% | 64% | 0.96 | 0.64 | 0.86 | 75% | 64% |
| SG43RGP55-PRGPmedranksort | 0.92 | 81% | 51% | 0.97 | 0.51 | 0.92 | 82% | 51% |
| SG43RGP55-PRGPmedranksort | 0.95 | 82% | 37% | 0.98 | 0.37 | 0.95 | 84% | 37% |
| SG43RGP55-PRGPmedranksort | 1.00 | 100% | 15% | 1.00 | 0.15 | 1.00 | 100% | 15% |
| SG43RGP36-RGPgreedysearch | 0.83 | 76% | 86% | 0.97 | 0.86 | 0.83 | 78% | 86% |
| SG43RGP36-RGPgreedysearch | 0.94 | 89% | 80% | 0.99 | 0.80 | 0.94 | 91% | 80% |
| SG43RGP36-RGPgreedysearch | 0.96 | 90% | 53% | 0.99 | 0.53 | 0.96 | 91% | 53% |
| SG43RGP36-RGPgreedysearch | 0.97 | 87% | 25% | 0.98 | 0.25 | 0.97 | 88% | 25% |
| SG43RGP36-RGPgreedysearch | 1.00 | 100% | 5% | 1.00 | 0.05 | 1.00 | 100% | 5% |
| SG21RGP28-RGPmaxgreedysearch | 0.91 | 86% | 83% | 0.98 | 0.83 | 0.91 | 87% | 83% |
| SG21RGP28-RGPmaxgreedysearch | 0.96 | 94% | 83% | 0.99 | 0.83 | 0.96 | 95% | 83% |
| SG21RGP28-RGPmaxgreedysearch | 0.96 | 89% | 47% | 0.99 | 0.47 | 0.96 | 90% | 47% |
| SG21RGP28-RGPmaxgreedysearch | 0.97 | 87% | 25% | 0.98 | 0.25 | 0.97 | 88% | 25% |
| SG21RGP28-RGPmaxgreedysearch | 0.99 | 69% | 5% | 0.96 | 0.05 | 0.99 | 71% | 5% |

TABLE 23
Projected gains in GVHD outcome reduction and GVHD N donor capture for acute grades
II, III or IV GVHD (“VmodMedGainGag2”), assuming prevalences ranging from 35% to 55%

| | | Alternative prevalences for Gag3 | | | | | | |
|---|---|---|---|---|---|---|---|---|
| | | | 55% | 55% | | 55% | | 45% |
| | | | TNR Gneg | TPR Gneg | 55% | GVHD N | | TNR Gneg |
| | GNOS | 55% | vs. Gag2 | vs. Gag2 | GVHD | donor | 45% | vs. Gag2 |
| | thresh- | NPV Gneg | (spec- | (sensi- | reduction | capture | NPV Gneg | (spec- |
| Vmod | old | vs. Gag2 | ificity) | tivity) | for Gag2 | of Gneg | vs. Gag2 | ificity) |
| SG43RGP46-RGPperformance | 0.50 | 0.71 | 0.78 | 0.75 | 48% | 78% | 0.79 | 0.78 |
| SG43RGP46-RGPperformance | 0.55 | 0.68 | 0.66 | 0.75 | 42% | 66% | 0.76 | 0.66 |
| SG43RGP46-RGPperformance | 0.65 | 0.74 | 0.54 | 0.85 | 53% | 54% | 0.81 | 0.54 |
| SG43RGP46-RGPperformance | 0.75 | 0.73 | 0.42 | 0.87 | 51% | 42% | 0.80 | 0.42 |
| SG43RGP46-RGPperformance | 0.85 | 0.77 | 0.25 | 0.94 | 57% | 25% | 0.83 | 0.25 |
| SG42RGP21-RGPminimalist | 0.50 | 0.68 | 0.71 | 0.73 | 42% | 71% | 0.76 | 0.71 |
| SG42RGP21-RGPminimalist | 0.55 | 0.73 | 0.66 | 0.80 | 51% | 66% | 0.80 | 0.66 |
| SG42RGP21-RGPminimalist | 0.65 | 0.75 | 0.54 | 0.85 | 55% | 54% | 0.82 | 0.54 |
| SG42RGP21-RGPminimalist | 0.75 | 0.76 | 0.42 | 0.89 | 56% | 42% | 0.83 | 0.42 |
| SG42RGP21-RGPminimalist | 0.85 | 0.88 | 0.25 | 0.97 | 79% | 25% | 0.92 | 0.25 |
| SG43RGP37-RGPconnectivity | 0.50 | 0.69 | 0.75 | 0.73 | 44% | 75% | 0.77 | 0.75 |
| SG43RGP37-RGPconnectivity | 0.55 | 0.73 | 0.68 | 0.79 | 50% | 68% | 0.80 | 0.68 |
| SG43RGP37-RGPconnectivity | 0.65 | 0.75 | 0.53 | 0.85 | 54% | 53% | 0.82 | 0.53 |
| SG43RGP37-RGPconnectivity | 0.75 | 0.77 | 0.46 | 0.89 | 59% | 46% | 0.84 | 0.46 |
| SG43RGP37-RGPconnectivity | 0.85 | 0.74 | 0.25 | 0.93 | 53% | 25% | 0.81 | 0.25 |
| SG43RGP51-PRGPminranksort | 0.50 | 0.73 | 0.75 | 0.77 | 51% | 75% | 0.80 | 0.75 |
| SG43RGP51-PRGPminranksort | 0.55 | 0.75 | 0.63 | 0.83 | 54% | 63% | 0.82 | 0.63 |
| SG43RGP51-PRGPminranksort | 0.65 | 0.75 | 0.51 | 0.86 | 55% | 51% | 0.82 | 0.51 |
| SG43RGP51-PRGPminranksort | 0.75 | 0.82 | 0.41 | 0.93 | 67% | 41% | 0.87 | 0.41 |
| SG43RGP51-PRGPminranksort | 0.85 | 0.75 | 0.10 | 0.97 | 55% | 10% | 0.82 | 0.10 |
| SG43RGP55-PRGPmedranksort | 0.50 | 0.71 | 0.76 | 0.75 | 47% | 76% | 0.79 | 0.76 |
| SG43RGP55-PRGPmedranksort | 0.55 | 0.72 | 0.64 | 0.79 | 48% | 64% | 0.79 | 0.64 |
| SG43RGP55-PRGPmedranksort | 0.65 | 0.74 | 0.51 | 0.85 | 53% | 51% | 0.81 | 0.51 |
| SG43RGP55-PRGPmedranksort | 0.75 | 0.75 | 0.37 | 0.90 | 55% | 37% | 0.82 | 0.37 |
| SG43RGP55-PRGPmedranksort | 0.85 | 0.77 | 0.15 | 0.96 | 59% | 15% | 0.84 | 0.15 |
| SG43RGP36-RGPgreedysearch | 0.50 | 0.76 | 0.86 | 0.77 | 56% | 86% | 0.82 | 0.86 |
| SG43RGP36-RGPgreedysearch | 0.55 | 0.81 | 0.80 | 0.85 | 65% | 80% | 0.86 | 0.80 |
| SG43RGP36-RGPgreedysearch | 0.65 | 0.80 | 0.53 | 0.89 | 63% | 53% | 0.85 | 0.53 |
| SG43RGP36-RGPgreedysearch | 0.75 | 0.82 | 0.25 | 0.95 | 67% | 25% | 0.87 | 0.25 |
| SG43RGP36-RGPgreedysearch | 0.85 | 0.82 | 0.05 | 0.99 | 67% | 5% | 0.87 | 0.05 |
| SG21RGP28-RGPmaxgreedysearch | 0.50 | 0.79 | 0.83 | 0.82 | 62% | 83% | 0.85 | 0.83 |
| SG21RGP28-RGPmaxgreedysearch | 0.55 | 0.84 | 0.83 | 0.87 | 71% | 83% | 0.89 | 0.83 |
| SG21RGP28-RGPmaxgreedysearch | 0.65 | 0.75 | 0.47 | 0.87 | 55% | 47% | 0.82 | 0.47 |
| SG21RGP28-RGPmaxgreedysearch | 0.75 | 0.82 | 0.25 | 0.95 | 67% | 25% | 0.87 | 0.25 |
| SG21RGP28-RGPmaxgreedysearch | 0.85 | 0.53 | 0.05 | 0.96 | 15% | 5% | 0.63 | 0.05 |

| | Alternative prevalences for Gag3 | | | | | | | |
|---|---|---|---|---|---|---|---|---|
| | 45% | | 45% | | 35% | 35% | | 35% |
| | TPR Gneg | 45% | GVHD N | | TNR Gneg | TPR Gneg | 35% | GVHD N |
| | vs. Gag2 | GVHD | donor | 35% | vs. Gag2 | vs. Gag2 | GVHD | donor |
| | (sensi- | reduction | capture | NPV Gneg | (spec- | (sensi- | reduction | capture |
| Vmod | tivity) | for Gag2 | of Gneg | vs. Gag2 | ificity) | tivity) | for Gag2 | of Gneg |
| SG43RGP46-RGPperformance | 0.75 | 53% | 78% | 0.85 | 0.78 | 0.75 | 57% | 78% |
| SG43RGP46-RGPperformance | 0.75 | 47% | 66% | 0.83 | 0.66 | 0.75 | 51% | 66% |
| SG43RGP46-RGPperformance | 0.85 | 58% | 54% | 0.87 | 0.54 | 0.85 | 62% | 54% |
| SG43RGP46-RGPperformance | 0.87 | 56% | 42% | 0.86 | 0.42 | 0.87 | 60% | 42% |
| SG43RGP46-RGPperformance | 0.94 | 62% | 25% | 0.88 | 0.25 | 0.94 | 66% | 25% |
| SG42RGP21-RGPminimalist | 0.73 | 47% | 71% | 0.83 | 0.71 | 0.73 | 51% | 71% |
| SG42RGP21-RGPminimalist | 0.80 | 56% | 66% | 0.86 | 0.66 | 0.80 | 60% | 66% |
| SG42RGP21-RGPminimalist | 0.85 | 60% | 54% | 0.87 | 0.54 | 0.85 | 64% | 54% |
| SG42RGP21-RGPminimalist | 0.89 | 61% | 42% | 0.88 | 0.42 | 0.89 | 65% | 42% |
| SG42RGP21-RGPminimalist | 0.97 | 82% | 25% | 0.95 | 0.25 | 0.97 | 84% | 25% |
| SG43RGP37-RGPconnectivity | 0.73 | 49% | 75% | 0.84 | 0.75 | 0.73 | 53% | 75% |
| SG43RGP37-RGPconnectivity | 0.79 | 55% | 68% | 0.86 | 0.68 | 0.79 | 59% | 68% |
| SG43RGP37-RGPconnectivity | 0.85 | 59% | 53% | 0.87 | 0.53 | 0.85 | 63% | 53% |
| SG43RGP37-RGPconnectivity | 0.89 | 64% | 46% | 0.89 | 0.46 | 0.89 | 67% | 46% |
| SG43RGP37-RGPconnectivity | 0.93 | 58% | 25% | 0.87 | 0.25 | 0.93 | 62% | 25% |
| SG43RGP51-PRGPminranksort | 0.77 | 56% | 75% | 0.86 | 0.75 | 0.77 | 60% | 75% |
| SG43RGP51-PRGPminranksort | 0.83 | 59% | 63% | 0.87 | 0.63 | 0.83 | 63% | 63% |
| SG43RGP51-PRGPminranksort | 0.86 | 60% | 51% | 0.87 | 0.51 | 0.86 | 64% | 51% |
| SG43RGP51-PRGPminranksort | 0.93 | 72% | 41% | 0.91 | 0.41 | 0.93 | 75% | 41% |
| SG43RGP51-PRGPminranksort | 0.97 | 60% | 10% | 0.87 | 0.10 | 0.97 | 64% | 10% |
| SG43RGP55-PRGPmedranksort | 0.75 | 52% | 76% | 0.85 | 0.76 | 0.75 | 56% | 76% |
| SG43RGP55-PRGPmedranksort | 0.79 | 53% | 64% | 0.85 | 0.64 | 0.79 | 57% | 64% |
| SG43RGP55-PRGPmedranksort | 0.85 | 58% | 51% | 0.87 | 0.51 | 0.85 | 62% | 51% |
| SG43RGP55-PRGPmedranksort | 0.90 | 60% | 37% | 0.87 | 0.37 | 0.90 | 64% | 37% |
| SG43RGP55-PRGPmedranksort | 0.96 | 64% | 15% | 0.89 | 0.15 | 0.96 | 67% | 15% |
| SG43RGP36-RGPgreedysearch | 0.77 | 61% | 86% | 0.88 | 0.86 | 0.77 | 65% | 86% |
| SG43RGP36-RGPgreedysearch | 0.85 | 70% | 80% | 0.91 | 0.80 | 0.85 | 73% | 80% |
| SG43RGP36-RGPgreedysearch | 0.89 | 68% | 53% | 0.90 | 0.53 | 0.89 | 71% | 53% |
| SG43RGP36-RGPgreedysearch | 0.95 | 72% | 25% | 0.91 | 0.25 | 0.95 | 75% | 25% |
| SG43RGP36-RGPgreedysearch | 0.99 | 72% | 5% | 0.91 | 0.05 | 0.99 | 75% | 5% |
| SG21RGP28-RGPmaxgreedysearch | 0.82 | 66% | 83% | 0.89 | 0.83 | 0.82 | 70% | 83% |
| SG21RGP28-RGPmaxgreedysearch | 0.87 | 75% | 83% | 0.92 | 0.83 | 0.87 | 78% | 83% |
| SG21RGP28-RGPmaxgreedysearch | 0.87 | 60% | 47% | 0.87 | 0.47 | 0.87 | 64% | 47% |
| SG21RGP28-RGPmaxgreedysearch | 0.95 | 72% | 25% | 0.91 | 0.25 | 0.95 | 75% | 25% |
| SG21RGP28-RGPmaxgreedysearch | 0.96 | 18% | 5% | 0.72 | 0.05 | 0.96 | 21% | 5% |

[0449] Details of Outcome Predictive Performance Determination for Vmod SG43RGP36-RGPgreedysearch:

[0450] Tables 24 and 25, SG43RGP36exampleGneg and SG43RGP36exampleGag3, respectively, illustrate for Vmod SG43RGP36-RGPgreedysearch, for all Gneg and Gag3 samples and 36 RGPs the individual RGP votes for GVHD N outcomes, the GNOS value for each sample, and the final GVHD N outcome prediction for GNOS>=0.55.

[0451] As shown in Table 24 (SG43RGP36exampleGneg), a total of 47 of the 59 Gneg samples are classified correctly, i.e., are classified as true-negatives (TNs). Thus, the specificity or true negative rate, TN/(TN+FP), is 0.80 (0.7966). As shown in Table 25 (SG43RGP36exampleGag3), a total of 72 of the 77 Gag3 samples were classified correctly, i.e., classified as TPs. Thus, the sensitivity or true positive rate, TP/(TP+FN), is 0.94 (0.9350).

[0452] Assuming a prevalence of 25% for Gag3 (midpoint between the commonly accepted estimates of 15% to 35%) and given
[0453] (1) the specificity (TNR) above, the overall fraction of TNs would be 59.8% (0.7966*75%), the fraction of FPs would be 15.2% (75%−59.8%), and
[0454] (2) the sensitivity (TPR) above, the overall fraction of TPs would be 23.4% (0.9350*25%), and the fraction of FNs would be 1.6% (25%−23.4%), and
[0455] (3) therefore the negative predictive value, TN/(TN+FN), would be 0.97 (0.974; i.e., 0.598/(0.598+0.016)).

[0456] As a result of using the GVHD outcome prediction test, if only GVHD N classified donors were to be used for transplantation, 97% of transplantations would not experience acute grade III or IV GVHD, compared to 75% without using the predictive analysis. Conversely, without using the GVHD outcome prediction test, 25% of transplantations would be expected to result in acute grade III or IV GVHD, compared to 3% when using the test to select GVHD N donors. In other words, 12% of acute grade III or IV GVHD outcomes would likely still be remaining after using the GVHD outcome prediction test, but usage of the test for GVHD N donor selection would be expected to reduce GVHD by 89% (see Table 22, VmodMedGainGag3, for overview and details).

[0457] Note that in both Tables 24 and 25, SG43RGP36exampleGneg and SG43RGP36exampleGag3, samples from transplantations using

[0458] (1) bone marrow (BM) and peripheral blood stem cell (PBSC) stem cell sources are represented, and

[0459] (2) HLA 9/10 and HLA 10/10 matched donor recipient pairs are represented.

[0460] Also note that BM, PBSC, HLA 9/10 and HLA 10/10 samples, by visual inspection, are essentially evenly distributed over all the samples, whether classified as GVHD N (negative) or not, or whether classified correctly or not. In other words, the GVHD outcome prediction test correctly predicts GVHD N (negative) donors in a vast majority of cases, independently of whether the stem cell source is BM or PBSC, and irrespective of whether transplantations involve HLA 9/10 or HLA10/10 matched donor recipient pairs.

TABLE 24
Illustration for all 59 Gneg samples of Vmod SG43RGP36-RGPgreedysearch individual RGP votes, resultant
GNOS values, and final GVHD N outcome prediction for GNOS >= 0.55 (“SG43RGP36exampleGneg”)

| | | aGVHD | | | | | | | | | |
|---|---|---|---|---|---|---|---|---|---|---|---|
| Graft | HLA | outcome | cGVHD | PDCD6IP- | RPL37- | TMEM8B- | ANAPC11- | TMEM49- | MRPL42- | GINS1- | NR2F6- |
| type | match | grade | outcome | LYRM5 | GINS1 | SIPA1L2 | GINS1 | FLT3LG | GINS1 | MT1H | PRKAR1B |
| BM | 10 | 0 | 0 | 1 | 1 | 1 | 1 | 1 | 1 | 1 | 1 |
| BM | 9 | 0 | 0 | 1 | 1 | 1 | 1 | 1 | 1 | 1 | 1 |
| BM | 10 | 0 | 0 | 1 | 0 | 1 | 1 | 1 | 0 | 1 | 1 |
| BM | 10 | 0 | 0 | 1 | 1 | 1 | 1 | 1 | 1 | 1 | 1 |
| BM | 10 | 0 | 0 | 1 | 1 | 0 | 1 | 1 | 1 | 1 | 1 |
| PBSC | 10 | 0 | 0 | 0 | 1 | 1 | 0 | 1 | 1 | 1 | 1 |
| BM | 10 | 0 | 0 | 1 | 1 | 1 | 1 | 1 | 1 | 1 | 1 |
| BM | 10 | 0 | 0 | 1 | 1 | 1 | 1 | 1 | 1 | 1 | 1 |
| BM | 10 | 0 | 0 | 1 | 0 | 1 | 0 | 1 | 0 | 1 | 1 |
| BM | 10 | 0 | 0 | 1 | 1 | 1 | 1 | 1 | 1 | 1 | 1 |
| BM | 10 | 0 | 0 | 1 | 0 | 0 | 1 | 1 | 0 | 0 | 1 |
| BM | 10 | 0 | 0 | 1 | 0 | 1 | 0 | 1 | 0 | 1 | 1 |
| BM | 9 | 0 | 0 | 1 | 0 | 1 | 0 | 0 | 0 | 1 | 1 |
| BM | 10 | 0 | 0 | 1 | 1 | 1 | 1 | 0 | 1 | 1 | 1 |
| BM | 9 | 0 | 0 | 1 | 0 | 1 | 0 | 1 | 0 | 1 | 1 |
| BM | 10 | 0 | 0 | 1 | 0 | 1 | 0 | 1 | 0 | 1 | 1 |
| BM | 10 | 0 | 0 | 1 | 1 | 1 | 0 | 1 | 1 | 1 | 1 |
| BM | 10 | 0 | 0 | 1 | 1 | 1 | 0 | 1 | 1 | 0 | 1 |
| BM | 10 | 0 | 0 | 1 | 0 | 1 | 1 | 1 | 0 | 0 | 1 |
| BM | 9 | 0 | 0 | 1 | 1 | 0 | 1 | 1 | 1 | 0 | 0 |
| BM | 9 | 0 | 0 | 1 | 1 | 1 | 1 | 1 | 1 | 0 | 1 |
| BM | 10 | 0 | 0 | 0 | 1 | 0 | 1 | 0 | 1 | 1 | 1 |
| BM | 10 | 0 | 0 | 1 | 1 | 1 | 1 | 1 | 0 | 1 | 0 |
| BM | 10 | 0 | 0 | 1 | 0 | 0 | 0 | 1 | 0 | 0 | 1 |
| PBSC | 9 | 0 | 0 | 1 | 1 | 1 | 1 | 1 | 1 | 1 | 0 |
| PBSC | 10 | 0 | 0 | 0 | 0 | 1 | 0 | 1 | 0 | 1 | 1 |
| PBSC | 10 | 0 | 0 | 0 | 1 | 1 | 1 | 0 | 1 | 1 | 1 |
| BM | 9 | 0 | 0 | 0 | 1 | 0 | 1 | 1 | 1 | 0 | 1 |
| BM | 9 | 0 | 0 | 0 | 1 | 1 | 1 | 1 | 1 | 1 | 0 |
| BM | 9 | 0 | 0 | 1 | 1 | 1 | 1 | 0 | 1 | 0 | 1 |
| BM | 10 | 0 | 0 | 1 | 1 | 1 | 1 | 1 | 1 | 0 | 1 |
| BM | 10 | 0 | 0 | 1 | 0 | 0 | 0 | 1 | 0 | 0 | 1 |
| BM | 10 | 0 | 0 | 1 | 1 | 0 | 1 | 1 | 0 | 0 | 1 |
| BM | 10 | 0 | 0 | 1 | 0 | 1 | 1 | 0 | 0 | 0 | 0 |
| BM | 10 | 0 | 0 | 1 | 1 | 1 | 0 | 1 | 1 | 0 | 1 |
| BM | 9 | 0 | 0 | 0 | 1 | 1 | 1 | 1 | 1 | 1 | 1 |
| BM | 10 | 0 | 0 | 0 | 1 | 0 | 1 | 1 | 0 | 1 | 0 |
| BM | 9 | 0 | 0 | 0 | 0 | 0 | 1 | 1 | 1 | 1 | 1 |
| PBSC | 10 | 0 | 0 | 0 | 1 | 1 | 1 | 0 | 1 | 1 | 0 |
| BM | 10 | 0 | 0 | 1 | 1 | 1 | 0 | 0 | 1 | 1 | 0 |
| BM | 10 | 0 | 0 | 1 | 0 | 1 | 0 | 0 | 1 | 0 | 1 |
| BM | 9 | 0 | 0 | 0 | 1 | 0 | 1 | 0 | 1 | 0 | 1 |
| BM | 10 | 0 | 0 | 1 | 1 | 1 | 1 | 0 | 1 | 1 | 1 |
| BM | 10 | 0 | 0 | 0 | 0 | 1 | 1 | 1 | 0 | 1 | 1 |
| BM | 10 | 0 | 0 | 1 | 1 | 1 | 0 | 0 | 1 | 1 | 0 |
| BM | 10 | 0 | 0 | 0 | 1 | 0 | 1 | 1 | 1 | 1 | 1 |
| BM | 9 | 0 | 0 | 1 | 1 | 0 | 1 | 1 | 1 | 1 | 0 |
| BM | 9 | 0 | 0 | 0 | 0 | 1 | 0 | 1 | 0 | 0 | 0 |
| BM | 10 | 0 | 0 | 1 | 1 | 1 | 1 | 0 | 1 | 1 | 1 |
| BM | 9 | 0 | 0 | 0 | 0 | 0 | 1 | 1 | 0 | 0 | 0 |
| PBSC | 9 | 0 | 0 | 1 | 1 | 1 | 1 | 0 | 1 | 1 | 0 |
| BM | 10 | 0 | 0 | 0 | 1 | 0 | 1 | 1 | 1 | 0 | 0 |
| BM | 10 | 0 | 0 | 0 | 1 | 0 | 1 | 1 | 1 | 1 | 0 |
| BM | 10 | 0 | 0 | 1 | 1 | 1 | 0 | 0 | 1 | 1 | 1 |
| BM | 9 | 0 | 0 | 0 | 1 | 1 | 1 | 0 | 1 | 1 | 0 |
| BM | 10 | 0 | 0 | 1 | 1 | 0 | 1 | 0 | 1 | 1 | 0 |
| BM | 10 | 0 | 0 | 1 | 1 | 1 | 0 | 0 | 1 | 1 | 1 |
| BM | 10 | 0 | 0 | 1 | 0 | 1 | 0 | 0 | 0 | 0 | 0 |
| BM | 9 | 0 | 0 | 1 | 1 | 0 | 1 | 1 | 1 | 1 | 0 |

| Graft | MT1E- | VAMP2- | CALM3- | VAMP2- | AEBP1- | MPP5- | TMEM49- | PLAC8- | PDCD6IP- | VAMP2- | XRCC1- |
|---|---|---|---|---|---|---|---|---|---|---|---|
| type | GINS1 | TMEM5 | HEATR3 | SERPINB9 | NCDN | SEC14L1 | MRPL42 | SEC14L1 | TATDN1 | FOXN2 | SNX27 |
| BM | 1 | 0 | 1 | 1 | 1 | 1 | 1 | 1 | 1 | 0 | 1 |
| BM | 1 | 1 | 1 | 1 | 1 | 0 | 1 | 1 | 1 | 1 | 1 |
| BM | 1 | 1 | 1 | 1 | 1 | 1 | 0 | 1 | 1 | 1 | 0 |
| BM | 1 | 1 | 1 | 0 | 1 | 1 | 1 | 1 | 1 | 0 | 1 |
| BM | 1 | 0 | 0 | 1 | 1 | 1 | 1 | 1 | 1 | 1 | 1 |
| PBSC | 1 | 0 | 1 | 1 | 1 | 1 | 1 | 1 | 0 | 1 | 1 |
| BM | 0 | 1 | 1 | 1 | 1 | 1 | 1 | 1 | 1 | 0 | 1 |
| BM | 1 | 0 | 1 | 1 | 0 | 1 | 1 | 1 | 1 | 1 | 1 |
| BM | 0 | 0 | 1 | 1 | 0 | 1 | 1 | 1 | 1 | 1 | 1 |
| BM | 1 | 1 | 1 | 0 | 1 | 1 | 1 | 0 | 1 | 1 | 1 |
| BM | 1 | 1 | 1 | 1 | 0 | 1 | 1 | 1 | 1 | 1 | 1 |
| BM | 1 | 1 | 0 | 1 | 0 | 1 | 1 | 1 | 1 | 1 | 1 |
| BM | 0 | 0 | 1 | 1 | 1 | 0 | 1 | 1 | 1 | 1 | 1 |
| BM | 0 | 1 | 1 | 1 | 1 | 1 | 0 | 1 | 1 | 1 | 0 |
| BM | 1 | 1 | 1 | 1 | 1 | 1 | 1 | 1 | 0 | 1 | 1 |
| BM | 1 | 1 | 0 | 1 | 1 | 1 | 1 | 1 | 0 | 1 | 1 |
| BM | 1 | 0 | 0 | 0 | 1 | 1 | 1 | 1 | 0 | 1 | 1 |
| BM | 0 | 0 | 1 | 0 | 1 | 1 | 1 | 1 | 1 | 0 | 1 |
| BM | 1 | 1 | 1 | 1 | 0 | 1 | 1 | 1 | 1 | 1 | 1 |
| BM | 1 | 1 | 1 | 1 | 1 | 1 | 1 | 1 | 1 | 1 | 0 |
| BM | 0 | 1 | 0 | 0 | 1 | 1 | 1 | 0 | 1 | 0 | 1 |
| BM | 1 | 1 | 1 | 1 | 0 | 1 | 1 | 1 | 1 | 1 | 0 |
| BM | 1 | 1 | 1 | 1 | 0 | 0 | 1 | 0 | 1 | 1 | 1 |
| BM | 1 | 1 | 0 | 1 | 1 | 1 | 1 | 1 | 1 | 1 | 1 |
| PBSC | 1 | 1 | 1 | 1 | 1 | 0 | 0 | 0 | 0 | 1 | 1 |
| PBSC | 1 | 1 | 0 | 1 | 1 | 1 | 0 | 1 | 0 | 1 | 1 |
| PBSC | 1 | 1 | 1 | 1 | 1 | 1 | 0 | 1 | 1 | 1 | 0 |
| BM | 0 | 0 | 1 | 0 | 1 | 1 | 0 | 1 | 0 | 1 | 0 |
| BM | 0 | 1 | 1 | 1 | 1 | 1 | 0 | 0 | 0 | 1 | 1 |
| BM | 1 | 1 | 0 | 0 | 1 | 1 | 1 | 0 | 1 | 0 | 0 |
| BM | 0 | 1 | 1 | 1 | 0 | 1 | 1 | 1 | 1 | 0 | 0 |
| BM | 0 | 1 | 1 | 1 | 1 | 1 | 1 | 1 | 1 | 0 | 1 |
| BM | 0 | 0 | 1 | 1 | 1 | 1 | 1 | 1 | 1 | 1 | 0 |
| BM | 1 | 1 | 0 | 1 | 0 | 0 | 0 | 1 | 1 | 1 | 0 |
| BM | 0 | 0 | 1 | 0 | 1 | 1 | 1 | 1 | 1 | 0 | 1 |
| BM | 1 | 0 | 1 | 1 | 0 | 0 | 1 | 0 | 1 | 0 | 1 |
| BM | 1 | 0 | 0 | 1 | 1 | 1 | 0 | 1 | 1 | 1 | 1 |
| BM | 1 | 1 | 1 | 1 | 0 | 0 | 1 | 0 | 0 | 1 | 1 |
| PBSC | 1 | 1 | 1 | 1 | 0 | 0 | 0 | 0 | 0 | 1 | 1 |
| BM | 1 | 1 | 0 | 0 | 1 | 0 | 0 | 0 | 1 | 0 | 1 |
| BM | 0 | 0 | 1 | 1 | 1 | 1 | 1 | 1 | 1 | 0 | 0 |
| BM | 0 | 0 | 0 | 1 | 0 | 1 | 1 | 1 | 1 | 0 | 1 |
| BM | 1 | 1 | 0 | 1 | 0 | 1 | 1 | 1 | 0 | 1 | 0 |
| BM | 1 | 0 | 1 | 1 | 0 | 0 | 1 | 1 | 0 | 1 | 1 |
| BM | 1 | 1 | 1 | 1 | 1 | 0 | 0 | 0 | 0 | 1 | 0 |
| BM | 1 | 1 | 1 | 0 | 0 | 1 | 1 | 1 | 0 | 1 | 0 |
| BM | 1 | 1 | 1 | 1 | 1 | 0 | 0 | 0 | 0 | 1 | 1 |
| BM | 0 | 1 | 1 | 0 | 1 | 1 | 1 | 1 | 1 | 0 | 1 |
| BM | 1 | 1 | 0 | 0 | 0 | 1 | 0 | 1 | 1 | 1 | 0 |
| BM | 0 | 1 | 0 | 1 | 1 | 0 | 0 | 0 | 0 | 1 | 0 |
| PBSC | 1 | 1 | 0 | 0 | 1 | 0 | 0 | 0 | 1 | 1 | 1 |
| BM | 0 | 1 | 1 | 0 | 0 | 0 | 1 | 0 | 0 | 1 | 1 |
| BM | 1 | 0 | 0 | 1 | 0 | 0 | 1 | 0 | 1 | 0 | 0 |
| BM | 1 | 1 | 1 | 0 | 0 | 0 | 0 | 0 | 0 | 0 | 0 |
| BM | 0 | 1 | 0 | 0 | 1 | 0 | 0 | 1 | 0 | 0 | 1 |
| BM | 1 | 1 | 1 | 0 | 1 | 1 | 0 | 0 | 1 | 0 | 0 |
| BM | 0 | 0 | 1 | 0 | 1 | 0 | 1 | 0 | 0 | 0 | 1 |
| BM | 0 | 0 | 0 | 0 | 1 | 0 | 0 | 0 | 0 | 0 | 0 |
| BM | 1 | 0 | 0 | 0 | 0 | 0 | 0 | 0 | 1 | 0 | 0 |

| Graft | TMEM49- | ADRB2- | NCOA4- | FOXN2- | AEBP1- | PREX1- | AEBP1- | ABHD12- | AEBP1- | TMEM49- |
|---|---|---|---|---|---|---|---|---|---|---|
| type | CALM3 | MT1E | PAIP2 | SNURF | RPUSD1 | SMARCB1 | SARM1 | CALM3 | ZFAND5 | TATDN1 |
| BM | 1 | 1 | 1 | 1 | 1 | 1 | 1 | 1 | 1 | 1 |
| BM | 1 | 1 | 1 | 1 | 1 | 0 | 1 | 0 | 1 | 1 |
| BM | 1 | 1 | 1 | 1 | 1 | 1 | 1 | 1 | 1 | 1 |
| BM | 0 | 1 | 0 | 0 | 1 | 1 | 1 | 1 | 1 | 1 |
| BM | 0 | 0 | 1 | 1 | 1 | 1 | 1 | 1 | 1 | 1 |
| PBSC | 1 | 1 | 1 | 1 | 1 | 1 | 1 | 1 | 1 | 1 |
| BM | 0 | 0 | 0 | 1 | 1 | 1 | 0 | 0 | 1 | 1 |
| BM | 0 | 1 | 1 | 1 | 0 | 1 | 1 | 1 | 0 | 1 |
| BM | 0 | 1 | 1 | 1 | 1 | 1 | 1 | 1 | 1 | 1 |
| BM | 0 | 1 | 1 | 1 | 1 | 1 | 0 | 0 | 0 | 1 |
| BM | 1 | 1 | 1 | 1 | 0 | 1 | 1 | 1 | 0 | 1 |
| BM | 1 | 1 | 1 | 1 | 1 | 1 | 1 | 1 | 1 | 1 |
| BM | 1 | 1 | 0 | 1 | 1 | 1 | 1 | 1 | 1 | 1 |
| BM | 0 | 0 | 1 | 1 | 1 | 0 | 1 | 1 | 1 | 1 |
| BM | 1 | 1 | 1 | 1 | 1 | 1 | 1 | 1 | 1 | 0 |
| BM | 0 | 1 | 1 | 1 | 1 | 1 | 1 | 1 | 1 | 0 |
| BM | 1 | 1 | 1 | 1 | 1 | 0 | 0 | 1 | 1 | 1 |
| BM | 1 | 0 | 1 | 1 | 1 | 0 | 1 | 1 | 1 | 1 |
| BM | 1 | 1 | 1 | 1 | 0 | 1 | 1 | 1 | 0 | 1 |
| BM | 0 | 1 | 1 | 0 | 1 | 1 | 1 | 0 | 0 | 1 |
| BM | 1 | 0 | 1 | 0 | 1 | 1 | 1 | 0 | 1 | 1 |
| BM | 0 | 1 | 0 | 0 | 1 | 0 | 0 | 1 | 1 | 1 |
| BM | 1 | 1 | 1 | 1 | 0 | 0 | 0 | 1 | 0 | 1 |
| BM | 1 | 1 | 1 | 1 | 1 | 1 | 1 | 1 | 1 | 1 |
| PBSC | 1 | 1 | 1 | 0 | 1 | 0 | 1 | 1 | 1 | 0 |
| PBSC | 0 | 1 | 0 | 1 | 1 | 0 | 1 | 1 | 1 | 0 |
| PBSC | 1 | 1 | 0 | 0 | 1 | 0 | 1 | 1 | 1 | 1 |
| BM | 1 | 0 | 1 | 1 | 1 | 1 | 1 | 1 | 1 | 0 |
| BM | 1 | 0 | 1 | 1 | 1 | 1 | 1 | 1 | 1 | 0 |
| BM | 1 | 1 | 1 | 1 | 1 | 0 | 0 | 0 | 1 | 1 |
| BM | 1 | 0 | 1 | 0 | 0 | 1 | 0 | 1 | 0 | 1 |
| BM | 0 | 0 | 0 | 1 | 1 | 1 | 1 | 1 | 1 | 1 |
| BM | 0 | 0 | 1 | 1 | 0 | 1 | 1 | 0 | 1 | 0 |
| BM | 1 | 1 | 0 | 1 | 0 | 0 | 0 | 1 | 1 | 1 |
| BM | 1 | 0 | 1 | 0 | 1 | 1 | 1 | 0 | 1 | 1 |
| BM | 1 | 1 | 1 | 0 | 0 | 1 | 0 | 1 | 0 | 1 |
| BM | 1 | 0 | 1 | 1 | 1 | 1 | 0 | 1 | 0 | 1 |
| BM | 1 | 0 | 0 | 1 | 1 | 1 | 0 | 1 | 0 | 0 |
| PBSC | 0 | 1 | 1 | 1 | 0 | 0 | 0 | 1 | 0 | 0 |
| BM | 1 | 1 | 1 | 0 | 1 | 0 | 1 | 0 | 1 | 0 |
| BM | 0 | 0 | 0 | 1 | 0 | 1 | 1 | 0 | 1 | 1 |
| BM | 1 | 0 | 0 | 0 | 0 | 1 | 1 | 1 | 1 | 1 |
| BM | 0 | 1 | 1 | 0 | 0 | 1 | 0 | 0 | 0 | 1 |
| BM | 1 | 1 | 1 | 1 | 0 | 1 | 0 | 1 | 0 | 0 |
| BM | 0 | 1 | 1 | 1 | 0 | 1 | 1 | 0 | 0 | 0 |
| BM | 1 | 1 | 0 | 1 | 0 | 0 | 0 | 1 | 0 | 0 |
| BM | 1 | 1 | 1 | 0 | 0 | 0 | 1 | 0 | 0 | 0 |
| BM | 1 | 1 | 0 | 0 | 1 | 1 | 1 | 0 | 1 | 1 |
| BM | 0 | 1 | 0 | 0 | 0 | 1 | 0 | 0 | 0 | 0 |
| BM | 1 | 0 | 0 | 1 | 1 | 0 | 1 | 1 | 1 | 1 |
| PBSC | 0 | 1 | 0 | 0 | 1 | 1 | 1 | 0 | 0 | 0 |
| BM | 1 | 0 | 1 | 0 | 1 | 1 | 1 | 1 | 0 | 0 |
| BM | 1 | 0 | 0 | 0 | 0 | 1 | 0 | 0 | 1 | 1 |
| BM | 0 | 1 | 0 | 0 | 0 | 0 | 0 | 0 | 0 | 0 |
| BM | 0 | 0 | 0 | 0 | 0 | 0 | 0 | 0 | 0 | 0 |
| BM | 0 | 0 | 0 | 0 | 1 | 0 | 0 | 0 | 0 | 0 |
| BM | 1 | 0 | 0 | 0 | 0 | 0 | 0 | 0 | 0 | 0 |
| BM | 0 | 0 | 1 | 1 | 1 | 0 | 0 | 0 | 1 | 0 |
| BM | 0 | 1 | 0 | 0 | 0 | 0 | 0 | 0 | 0 | 0 |

| | | | | | | | | | GVHD N |
|---|---|---|---|---|---|---|---|---|---|
| Graft | TMEM8B- | TMEM8B- | MRPL42- | TMEM8B- | TMEM8B- | MRPL42- | AEBP1- | | vote for |
| type | C5orf62 | C16orf53 | CCDC6 | TM9SF1 | NSUN5 | FOXN2 | SEC14L1 | GNOS | GNOS >= 0.55 |
| BM | 1 | 1 | 1 | 1 | 1 | 1 | 1 | 0.94 | 1 |
| BM | 1 | 1 | 1 | 1 | 1 | 0 | 1 | 0.89 | 1 |
| BM | 1 | 1 | 1 | 1 | 1 | 0 | 1 | 0.86 | 1 |
| BM | 1 | 1 | 1 | 1 | 1 | 0 | 1 | 0.83 | 1 |
| BM | 1 | 1 | 1 | 1 | 0 | 1 | 1 | 0.83 | 1 |
| PBSC | 1 | 0 | 1 | 0 | 1 | 1 | 1 | 0.83 | 1 |
| BM | 1 | 1 | 1 | 1 | 1 | 1 | 1 | 0.81 | 1 |
| BM | 1 | 0 | 1 | 0 | 1 | 1 | 1 | 0.81 | 1 |
| BM | 1 | 1 | 1 | 1 | 1 | 1 | 1 | 0.81 | 1 |
| BM | 1 | 1 | 1 | 1 | 1 | 1 | 0 | 0.81 | 1 |
| BM | 1 | 1 | 1 | 1 | 1 | 1 | 1 | 0.81 | 1 |
| BM | 1 | 0 | 1 | 0 | 0 | 1 | 1 | 0.78 | 1 |
| BM | 0 | 1 | 1 | 1 | 1 | 1 | 1 | 0.75 | 1 |
| BM | 1 | 1 | 0 | 1 | 1 | 0 | 1 | 0.75 | 1 |
| BM | 0 | 1 | 0 | 0 | 0 | 1 | 1 | 0.75 | 1 |
| BM | 1 | 0 | 1 | 0 | 0 | 1 | 1 | 0.72 | 1 |
| BM | 1 | 0 | 1 | 0 | 0 | 1 | 1 | 0.72 | 1 |
| BM | 1 | 0 | 1 | 1 | 0 | 1 | 1 | 0.72 | 1 |
| BM | 0 | 1 | 1 | 0 | 0 | 1 | 0 | 0.72 | 1 |
| BM | 0 | 1 | 1 | 1 | 0 | 1 | 1 | 0.72 | 1 |
| BM | 1 | 1 | 0 | 1 | 1 | 0 | 1 | 0.69 | 1 |
| BM | 1 | 1 | 1 | 1 | 0 | 1 | 1 | 0.69 | 1 |
| BM | 1 | 1 | 0 | 1 | 1 | 1 | 0 | 0.69 | 1 |
| BM | 0 | 0 | 0 | 0 | 0 | 1 | 1 | 0.69 | 1 |
| PBSC | 1 | 1 | 0 | 0 | 1 | 0 | 1 | 0.69 | 1 |
| PBSC | 1 | 1 | 1 | 0 | 1 | 1 | 1 | 0.67 | 1 |
| PBSC | 0 | 0 | 0 | 1 | 0 | 0 | 1 | 0.67 | 1 |
| BM | 1 | 0 | 1 | 1 | 1 | 1 | 1 | 0.67 | 1 |
| BM | 0 | 0 | 0 | 1 | 0 | 1 | 1 | 0.67 | 1 |
| BM | 1 | 1 | 0 | 1 | 1 | 0 | 1 | 0.67 | 1 |
| BM | 1 | 1 | 1 | 1 | 0 | 1 | 0 | 0.67 | 1 |
| BM | 1 | 0 | 1 | 0 | 0 | 1 | 1 | 0.64 | 1 |
| BM | 0 | 0 | 1 | 1 | 1 | 1 | 1 | 0.64 | 1 |
| BM | 1 | 1 | 1 | 1 | 1 | 1 | 1 | 0.61 | 1 |
| BM | 0 | 0 | 1 | 0 | 0 | 0 | 1 | 0.61 | 1 |
| BM | 1 | 1 | 0 | 0 | 0 | 0 | 1 | 0.61 | 1 |
| BM | 0 | 1 | 0 | 1 | 0 | 0 | 1 | 0.61 | 1 |
| BM | 1 | 1 | 1 | 0 | 1 | 1 | 0 | 0.61 | 1 |
| PBSC | 1 | 1 | 1 | 1 | 1 | 1 | 0 | 0.58 | 1 |
| BM | 1 | 1 | 0 | 1 | 1 | 0 | 0 | 0.56 | 1 |
| BM | 1 | 0 | 1 | 0 | 1 | 1 | 0 | 0.56 | 1 |
| BM | 1 | 0 | 1 | 0 | 0 | 1 | 1 | 0.56 | 1 |
| BM | 0 | 0 | 0 | 0 | 1 | 1 | 0 | 0.56 | 1 |
| BM | 0 | 0 | 1 | 0 | 0 | 1 | 0 | 0.56 | 1 |
| BM | 1 | 1 | 0 | 1 | 1 | 0 | 0 | 0.56 | 1 |
| BM | 1 | 0 | 1 | 0 | 0 | 1 | 0 | 0.56 | 1 |
| BM | 0 | 1 | 0 | 1 | 1 | 0 | 0 | 0.56 | 1 |
| BM | 0 | 1 | 0 | 0 | 0 | 0 | 1 | 0.53 | 0 |
| BM | 0 | 1 | 1 | 1 | 1 | 0 | 0 | 0.53 | 0 |
| BM | 0 | 1 | 0 | 1 | 1 | 1 | 1 | 0.50 | 0 |
| PBSC | 0 | 0 | 1 | 0 | 1 | 0 | 0 | 0.50 | 0 |
| BM | 0 | 0 | 0 | 0 | 0 | 0 | 0 | 0.42 | 0 |
| BM | 0 | 0 | 0 | 0 | 0 | 0 | 0 | 0.36 | 0 |
| BM | 0 | 1 | 0 | 1 | 1 | 0 | 0 | 0.36 | 0 |
| BM | 1 | 1 | 0 | 1 | 0 | 0 | 1 | 0.36 | 0 |
| BM | 0 | 0 | 0 | 0 | 0 | 0 | 0 | 0.33 | 0 |
| BM | 0 | 0 | 0 | 0 | 0 | 0 | 0 | 0.31 | 0 |
| BM | 1 | 0 | 0 | 1 | 0 | 0 | 0 | 0.25 | 0 |
| BM | 0 | 0 | 0 | 0 | 0 | 0 | 0 | 0.25 | 0 |

TABLE 25
Illustration for all 77 Gag3 samples of Vmod SG43RGP36-RGPgreedysearch individual RGP votes, resultant
GNOS values, and final GVHD N outcome prediction for GNOS >= 0.55 (“SG43RGP36exampleGag3”)

| | | aGVHD | | | | | | | | | |
|---|---|---|---|---|---|---|---|---|---|---|---|
| Graft | HLA | outcome | cGVHD | PDCD6IP- | RPL37- | TMEM8B- | ANAPC11- | TMEM49- | MRPL42- | GINS1- | NR2F6- |
| type | match | grade | outcome | LYRM5 | GINS1 | SIPA1L2 | GINS1 | FLT3LG | GINS1 | MT1H | PRKAR1B |
| BM | 9 | 4 | 0 | 1 | 1 | 1 | 1 | 1 | 1 | 1 | 0 |
| BM | 9 | 3 | 1 | 1 | 0 | 0 | 0 | 1 | 0 | 0 | 1 |
| BM | 10 | 3 | 1 | 1 | 1 | 1 | 1 | 0 | 1 | 1 | 1 |
| BM | 10 | 3 | 0 | 1 | 1 | 1 | 1 | 1 | 1 | 1 | 0 |
| PBSC | 10 | 4 | 0 | 1 | 1 | 1 | 0 | 1 | 1 | 1 | 1 |
| PBSC | 10 | 3 | 0 | 1 | 1 | 0 | 1 | 1 | 1 | 1 | 0 |
| PBSC | 9 | 3 | 0 | 0 | 1 | 0 | 1 | 0 | 1 | 1 | 1 |
| BM | 10 | 3 | 1 | 1 | 0 | 0 | 1 | 1 | 0 | 1 | 0 |
| BM | 9 | 3 | 1 | 0 | 1 | 1 | 1 | 1 | 1 | 1 | 0 |
| PBSC | 10 | 3 | 1 | 0 | 1 | 0 | 1 | 0 | 1 | 1 | 1 |
| PBSC | 10 | 4 | 0 | 1 | 1 | 1 | 0 | 1 | 0 | 1 | 0 |
| PBSC | 10 | 3 | 1 | 0 | 1 | 0 | 1 | 1 | 1 | 1 | 0 |
| BM | 10 | 4 | 1 | 0 | 1 | 0 | 0 | 1 | 1 | 0 | 1 |
| BM | 9 | 4 | 1 | 0 | 0 | 1 | 0 | 1 | 0 | 0 | 0 |
| BM | 10 | 3 | 1 | 0 | 1 | 0 | 1 | 1 | 0 | 0 | 0 |
| BM | 10 | 4 | 1 | 0 | 0 | 1 | 0 | 0 | 0 | 1 | 0 |
| PBSC | 9 | 3 | 0 | 0 | 0 | 0 | 1 | 1 | 1 | 0 | 0 |
| BM | 9 | 3 | 1 | 0 | 0 | 0 | 0 | 0 | 0 | 0 | 1 |
| BM | 10 | 3 | 0 | 0 | 1 | 0 | 1 | 0 | 1 | 1 | 1 |
| PBSC | 10 | 3 | 1 | 0 | 0 | 0 | 0 | 1 | 0 | 0 | 1 |
| BM | 9 | 3 | 1 | 0 | 0 | 1 | 0 | 0 | 0 | 0 | 1 |
| BM | 10 | 4 | 0 | 1 | 1 | 1 | 1 | 1 | 1 | 0 | 0 |
| BM | 9 | 4 | 0 | 0 | 0 | 1 | 0 | 0 | 1 | 1 | 1 |
| BM | 10 | 3 | 1 | 1 | 1 | 1 | 1 | 0 | 1 | 1 | 1 |
| BM | 10 | 3 | 1 | 0 | 1 | 1 | 1 | 1 | 1 | 1 | 1 |
| BM | 10 | 3 | 1 | 1 | 1 | 1 | 1 | 0 | 1 | 1 | 1 |
| BM | 10 | 3 | 1 | 0 | 0 | 0 | 0 | 0 | 0 | 1 | 0 |
| BM | 10 | 3 | 0 | 0 | 0 | 1 | 0 | 1 | 0 | 0 | 0 |
| BM | 9 | 3 | 0 | 0 | 1 | 1 | 0 | 1 | 0 | 0 | 0 |
| BM | 10 | 3 | 1 | 0 | 1 | 1 | 1 | 0 | 1 | 0 | 1 |
| BM | 10 | 3 | 1 | 0 | 1 | 0 | 0 | 0 | 1 | 0 | 1 |
| BM | 9 | 4 | 0 | 0 | 0 | 0 | 0 | 1 | 0 | 0 | 0 |
| PBSC | 10 | 3 | 0 | 0 | 0 | 1 | 0 | 0 | 0 | 0 | 1 |
| BM | 10 | 3 | 0 | 0 | 1 | 0 | 1 | 0 | 1 | 0 | 1 |
| BM | 10 | 3 | 0 | 1 | 0 | 1 | 0 | 1 | 0 | 0 | 0 |
| BM | 10 | 3 | 1 | 0 | 0 | 0 | 0 | 0 | 0 | 0 | 0 |
| BM | 10 | 3 | 1 | 1 | 0 | 0 | 0 | 1 | 0 | 1 | 0 |
| BM | 10 | 3 | 1 | 1 | 1 | 1 | 1 | 0 | 1 | 0 | 0 |
| PBSC | 10 | 4 | 1 | 0 | 1 | 0 | 0 | 1 | 1 | 0 | 0 |
| BM | 9 | 3 | 0 | 0 | 0 | 0 | 1 | 1 | 1 | 0 | 0 |
| BM | 10 | 3 | 1 | 1 | 0 | 0 | 0 | 0 | 0 | 1 | 0 |
| BM | 9 | 3 | 1 | 0 | 0 | 0 | 0 | 0 | 0 | 1 | 1 |
| BM | 9 | 3 | 1 | 1 | 1 | 0 | 1 | 0 | 1 | 1 | 0 |
| BM | 9 | 4 | 1 | 0 | 0 | 0 | 0 | 0 | 0 | 0 | 0 |
| BM | 10 | 4 | 1 | 0 | 0 | 1 | 1 | 0 | 1 | 0 | 0 |
| BM | 10 | 4 | 1 | 0 | 1 | 1 | 1 | 0 | 1 | 0 | 0 |
| BM | 10 | 3 | 0 | 0 | 0 | 0 | 0 | 1 | 0 | 0 | 1 |
| BM | 10 | 3 | 0 | 0 | 0 | 0 | 0 | 0 | 0 | 0 | 0 |
| BM | 9 | 3 | 1 | 0 | 0 | 0 | 0 | 0 | 0 | 0 | 1 |
| PBSC | 10 | 3 | 1 | 0 | 0 | 0 | 1 | 0 | 1 | 1 | 0 |
| BM | 9 | 3 | 1 | 0 | 0 | 1 | 0 | 0 | 0 | 0 | 0 |
| BM | 9 | 4 | 1 | 1 | 0 | 0 | 0 | 1 | 0 | 0 | 0 |
| BM | 10 | 3 | 0 | 1 | 1 | 0 | 1 | 0 | 1 | 0 | 1 |
| BM | 10 | 3 | 0 | 0 | 0 | 1 | 0 | 0 | 0 | 0 | 1 |
| BM | 9 | 3 | 0 | 1 | 0 | 0 | 0 | 0 | 0 | 0 | 0 |
| BM | 9 | 3 | 0 | 1 | 1 | 1 | 0 | 0 | 0 | 0 | 0 |
| BM | 10 | 3 | 1 | 1 | 0 | 0 | 1 | 0 | 0 | 0 | 0 |
| BM | 10 | 3 | 1 | 0 | 0 | 0 | 1 | 0 | 1 | 0 | 0 |
| BM | 9 | 4 | 1 | 0 | 1 | 1 | 1 | 0 | 1 | 1 | 0 |
| BM | 10 | 4 | 1 | 0 | 0 | 0 | 1 | 0 | 1 | 0 | 0 |
| BM | 10 | 3 | 0 | 1 | 0 | 0 | 0 | 0 | 0 | 0 | 0 |
| BM | 9 | 4 | 0 | 0 | 0 | 0 | 0 | 0 | 0 | 0 | 1 |
| BM | 10 | 3 | 0 | 1 | 0 | 0 | 0 | 0 | 0 | 1 | 1 |
| BM | 10 | 3 | 0 | 0 | 1 | 1 | 0 | 1 | 0 | 1 | 0 |
| BM | 10 | 3 | 0 | 0 | 0 | 0 | 0 | 1 | 0 | 0 | 0 |
| BM | 10 | 3 | 1 | 0 | 0 | 0 | 0 | 0 | 0 | 0 | 0 |
| PBSC | 10 | 3 | 1 | 0 | 1 | 1 | 0 | 0 | 0 | 1 | 0 |
| BM | 10 | 3 | 1 | 0 | 0 | 0 | 0 | 0 | 0 | 1 | 0 |
| BM | 9 | 4 | 0 | 0 | 0 | 0 | 0 | 0 | 0 | 0 | 1 |
| BM | 9 | 3 | 0 | 0 | 1 | 1 | 0 | 0 | 0 | 0 | 1 |
| BM | 9 | 3 | 1 | 1 | 0 | 1 | 0 | 0 | 0 | 0 | 0 |
| BM | 10 | 4 | 1 | 0 | 0 | 0 | 0 | 0 | 0 | 1 | 0 |
| BM | 10 | 3 | 0 | 1 | 1 | 0 | 0 | 0 | 0 | 0 | 1 |
| BM | 10 | 3 | 0 | 1 | 0 | 0 | 0 | 0 | 0 | 0 | 0 |
| BM | 10 | 3 | 1 | 0 | 0 | 0 | 0 | 0 | 0 | 0 | 0 |
| BM | 10 | 3 | 1 | 0 | 0 | 0 | 0 | 0 | 0 | 0 | 0 |
| BM | 10 | 3 | 1 | 0 | 0 | 0 | 0 | 0 | 0 | 0 | 0 |

| Graft | MT1E- | VAMP2- | CALM3- | VAMP2- | AEBP1- | MPP5- | TMEM49- | PLAC8- | PDCD6IP- | VAMP2- | XRCC1- |
|---|---|---|---|---|---|---|---|---|---|---|---|
| type | GINS1 | TMEM5 | HEATR3 | SERPINB9 | NCDN | SEC14L1 | MRPL42 | SEC14L1 | TATDN1 | FOXN2 | SNX27 |
| BM | 1 | 1 | 1 | 1 | 0 | 1 | 1 | 1 | 1 | 1 | 1 |
| BM | 1 | 1 | 1 | 1 | 1 | 1 | 1 | 1 | 1 | 1 | 1 |
| BM | 1 | 1 | 1 | 0 | 1 | 1 | 0 | 1 | 1 | 1 | 0 |
| BM | 0 | 1 | 1 | 0 | 1 | 0 | 1 | 0 | 1 | 0 | 1 |
| PBSC | 1 | 1 | 1 | 1 | 1 | 0 | 1 | 0 | 0 | 1 | 1 |
| PBSC | 1 | 0 | 0 | 1 | 0 | 1 | 1 | 0 | 0 | 1 | 1 |
| PBSC | 1 | 1 | 0 | 1 | 0 | 0 | 0 | 1 | 1 | 1 | 1 |
| BM | 1 | 0 | 1 | 1 | 0 | 0 | 0 | 1 | 1 | 1 | 1 |
| BM | 1 | 0 | 1 | 0 | 1 | 1 | 0 | 0 | 0 | 1 | 0 |
| PBSC | 1 | 1 | 0 | 1 | 0 | 1 | 0 | 1 | 1 | 1 | 1 |
| PBSC | 1 | 0 | 0 | 1 | 1 | 0 | 0 | 0 | 0 | 1 | 1 |
| PBSC | 1 | 0 | 1 | 1 | 0 | 0 | 0 | 0 | 0 | 1 | 1 |
| BM | 0 | 0 | 1 | 1 | 0 | 1 | 1 | 1 | 0 | 0 | 1 |
| BM | 0 | 1 | 0 | 0 | 1 | 0 | 0 | 0 | 1 | 1 | 0 |
| BM | 0 | 0 | 0 | 1 | 0 | 1 | 0 | 1 | 1 | 1 | 1 |
| BM | 1 | 1 | 0 | 0 | 1 | 0 | 0 | 0 | 0 | 1 | 0 |
| PBSC | 0 | 1 | 1 | 1 | 0 | 0 | 1 | 1 | 1 | 1 | 0 |
| BM | 0 | 0 | 0 | 1 | 1 | 1 | 1 | 1 | 0 | 0 | 0 |
| BM | 1 | 0 | 0 | 0 | 0 | 0 | 0 | 0 | 0 | 0 | 0 |
| PBSC | 0 | 0 | 0 | 1 | 0 | 0 | 1 | 1 | 0 | 1 | 1 |
| BM | 0 | 0 | 1 | 0 | 1 | 0 | 0 | 1 | 0 | 1 | 0 |
| BM | 0 | 1 | 0 | 0 | 1 | 1 | 0 | 0 | 0 | 1 | 0 |
| BM | 1 | 1 | 0 | 1 | 1 | 0 | 1 | 0 | 0 | 0 | 0 |
| BM | 0 | 1 | 1 | 0 | 1 | 0 | 1 | 0 | 1 | 0 | 0 |
| BM | 1 | 0 | 1 | 0 | 0 | 0 | 0 | 0 | 0 | 0 | 0 |
| BM | 1 | 0 | 0 | 0 | 0 | 0 | 0 | 0 | 0 | 1 | 1 |
| BM | 1 | 1 | 0 | 0 | 0 | 1 | 1 | 0 | 0 | 0 | 0 |
| BM | 0 | 1 | 1 | 0 | 1 | 0 | 0 | 0 | 0 | 1 | 0 |
| BM | 0 | 1 | 1 | 0 | 1 | 0 | 0 | 0 | 0 | 1 | 1 |
| BM | 0 | 0 | 1 | 0 | 0 | 1 | 1 | 0 | 0 | 0 | 1 |
| BM | 1 | 0 | 0 | 1 | 1 | 0 | 0 | 1 | 0 | 0 | 0 |
| BM | 0 | 1 | 1 | 1 | 0 | 0 | 0 | 0 | 0 | 1 | 1 |
| PBSC | 1 | 1 | 0 | 1 | 0 | 1 | 0 | 0 | 0 | 0 | 0 |
| BM | 0 | 0 | 0 | 0 | 0 | 0 | 0 | 1 | 1 | 0 | 0 |
| BM | 1 | 0 | 0 | 0 | 0 | 1 | 1 | 0 | 0 | 0 | 0 |
| BM | 0 | 0 | 1 | 0 | 1 | 0 | 0 | 0 | 1 | 0 | 1 |
| BM | 0 | 1 | 0 | 0 | 0 | 0 | 1 | 0 | 0 | 0 | 0 |
| BM | 0 | 0 | 0 | 0 | 0 | 1 | 1 | 1 | 0 | 0 | 0 |
| PBSC | 0 | 0 | 0 | 1 | 0 | 0 | 1 | 0 | 0 | 1 | 1 |
| BM | 0 | 0 | 0 | 1 | 0 | 0 | 1 | 0 | 0 | 0 | 1 |
| BM | 1 | 0 | 0 | 0 | 0 | 0 | 0 | 0 | 1 | 0 | 1 |
| BM | 1 | 0 | 1 | 1 | 0 | 1 | 0 | 0 | 0 | 1 | 0 |
| BM | 1 | 0 | 0 | 0 | 0 | 0 | 0 | 0 | 0 | 0 | 0 |
| BM | 0 | 0 | 1 | 1 | 0 | 0 | 1 | 0 | 1 | 0 | 1 |
| BM | 0 | 0 | 0 | 0 | 0 | 1 | 0 | 1 | 0 | 0 | 0 |
| BM | 0 | 0 | 0 | 0 | 0 | 0 | 1 | 0 | 1 | 0 | 0 |
| BM | 0 | 0 | 1 | 0 | 0 | 0 | 0 | 0 | 0 | 0 | 0 |
| BM | 0 | 0 | 0 | 0 | 1 | 0 | 1 | 0 | 0 | 0 | 0 |
| BM | 0 | 0 | 1 | 1 | 0 | 0 | 0 | 1 | 1 | 0 | 0 |
| PBSC | 1 | 0 | 0 | 0 | 0 | 1 | 0 | 1 | 0 | 0 | 0 |
| BM | 0 | 0 | 0 | 0 | 0 | 0 | 0 | 0 | 0 | 0 | 0 |
| BM | 0 | 0 | 1 | 1 | 1 | 1 | 1 | 0 | 1 | 0 | 0 |
| BM | 0 | 1 | 0 | 0 | 1 | 0 | 0 | 0 | 0 | 0 | 1 |
| BM | 0 | 0 | 0 | 0 | 0 | 0 | 0 | 0 | 0 | 0 | 0 |
| BM | 1 | 1 | 1 | 0 | 0 | 0 | 0 | 0 | 1 | 0 | 0 |
| BM | 0 | 1 | 0 | 0 | 1 | 0 | 0 | 0 | 0 | 0 | 1 |
| BM | 0 | 0 | 0 | 1 | 0 | 0 | 1 | 0 | 0 | 0 | 0 |
| BM | 0 | 0 | 0 | 0 | 0 | 0 | 1 | 0 | 0 | 1 | 0 |
| BM | 0 | 1 | 0 | 0 | 0 | 0 | 0 | 0 | 1 | 0 | 0 |
| BM | 0 | 0 | 0 | 0 | 0 | 0 | 0 | 0 | 0 | 0 | 1 |
| BM | 1 | 1 | 0 | 0 | 0 | 0 | 1 | 0 | 0 | 0 | 1 |
| BM | 0 | 1 | 1 | 1 | 0 | 0 | 0 | 0 | 1 | 0 | 1 |
| BM | 0 | 0 | 0 | 0 | 1 | 0 | 0 | 0 | 1 | 0 | 0 |
| BM | 0 | 0 | 1 | 1 | 0 | 0 | 0 | 0 | 0 | 0 | 0 |
| BM | 0 | 0 | 0 | 0 | 0 | 0 | 0 | 0 | 0 | 1 | 0 |
| BM | 0 | 1 | 0 | 1 | 0 | 0 | 0 | 0 | 1 | 0 | 1 |
| PBSC | 1 | 0 | 1 | 0 | 0 | 0 | 0 | 0 | 0 | 0 | 0 |
| BM | 1 | 0 | 1 | 0 | 0 | 1 | 0 | 1 | 0 | 0 | 0 |
| BM | 0 | 0 | 0 | 0 | 0 | 0 | 1 | 0 | 0 | 0 | 0 |
| BM | 0 | 0 | 0 | 0 | 1 | 0 | 0 | 0 | 0 | 0 | 0 |
| BM | 0 | 0 | 0 | 0 | 0 | 0 | 0 | 0 | 0 | 0 | 0 |
| BM | 0 | 0 | 0 | 0 | 0 | 0 | 0 | 0 | 0 | 0 | 0 |
| BM | 0 | 0 | 0 | 0 | 0 | 0 | 0 | 0 | 1 | 0 | 0 |
| BM | 0 | 0 | 0 | 0 | 1 | 0 | 0 | 0 | 1 | 0 | 0 |
| BM | 0 | 0 | 0 | 0 | 0 | 0 | 0 | 0 | 0 | 0 | 1 |
| BM | 0 | 0 | 0 | 0 | 0 | 1 | 0 | 1 | 0 | 0 | 0 |
| BM | 0 | 0 | 0 | 0 | 0 | 0 | 0 | 0 | 0 | 0 | 0 |

| Graft | TMEM49- | ADRB2- | NCOA4- | FOXN2- | AEBP1- | PREX1- | AEBP1- | ABHD12- | AEBP1- | TMEM49- |
|---|---|---|---|---|---|---|---|---|---|---|
| type | CALM3 | MT1E | PAIP2 | SNURF | RPUSD1 | SMARCB1 | SARM1 | CALM3 | ZFAND5 | TATDN1 |
| BM | 1 | 1 | 1 | 0 | 0 | 1 | 0 | 1 | 1 | 1 |
| BM | 1 | 1 | 1 | 0 | 1 | 1 | 1 | 0 | 1 | 1 |
| BM | 0 | 1 | 1 | 1 | 1 | 1 | 1 | 0 | 1 | 0 |
| BM | 1 | 0 | 1 | 1 | 1 | 0 | 0 | 0 | 0 | 1 |
| PBSC | 0 | 1 | 0 | 0 | 1 | 0 | 1 | 0 | 1 | 0 |
| PBSC | 1 | 1 | 1 | 1 | 1 | 0 | 0 | 1 | 0 | 0 |
| PBSC | 0 | 1 | 0 | 0 | 0 | 1 | 0 | 1 | 0 | 1 |
| BM | 1 | 1 | 1 | 1 | 0 | 1 | 0 | 1 | 0 | 1 |
| BM | 0 | 1 | 1 | 1 | 1 | 0 | 1 | 0 | 1 | 0 |
| PBSC | 0 | 1 | 0 | 0 | 0 | 1 | 0 | 0 | 1 | 0 |
| PBSC | 0 | 1 | 1 | 1 | 1 | 0 | 1 | 0 | 0 | 1 |
| PBSC | 1 | 0 | 1 | 1 | 0 | 0 | 0 | 1 | 0 | 0 |
| BM | 1 | 0 | 1 | 0 | 1 | 0 | 1 | 0 | 1 | 0 |
| BM | 1 | 1 | 0 | 1 | 1 | 0 | 1 | 1 | 1 | 0 |
| BM | 1 | 0 | 1 | 0 | 0 | 0 | 0 | 1 | 0 | 1 |
| BM | 0 | 1 | 0 | 1 | 1 | 0 | 0 | 0 | 0 | 1 |
| PBSC | 0 | 0 | 0 | 0 | 0 | 1 | 0 | 1 | 0 | 1 |
| BM | 1 | 0 | 0 | 0 | 0 | 1 | 1 | 1 | 1 | 0 |
| BM | 0 | 1 | 1 | 1 | 0 | 1 | 0 | 1 | 0 | 0 |
| PBSC | 1 | 1 | 1 | 0 | 0 | 0 | 0 | 1 | 0 | 1 |
| BM | 0 | 0 | 0 | 0 | 1 | 1 | 1 | 1 | 1 | 0 |
| BM | 0 | 0 | 1 | 1 | 0 | 0 | 0 | 0 | 1 | 1 |
| BM | 1 | 1 | 0 | 0 | 1 | 0 | 0 | 0 | 0 | 0 |
| BM | 0 | 0 | 0 | 0 | 1 | 0 | 0 | 0 | 0 | 0 |
| BM | 1 | 0 | 1 | 1 | 0 | 0 | 0 | 1 | 0 | 0 |
| BM | 0 | 0 | 0 | 1 | 0 | 0 | 0 | 0 | 0 | 0 |
| BM | 1 | 0 | 1 | 1 | 0 | 0 | 0 | 0 | 0 | 0 |
| BM | 0 | 0 | 1 | 1 | 0 | 0 | 1 | 0 | 0 | 1 |
| BM | 1 | 0 | 0 | 0 | 0 | 0 | 1 | 0 | 0 | 0 |
| BM | 0 | 0 | 1 | 0 | 0 | 0 | 0 | 0 | 0 | 1 |
| BM | 0 | 0 | 0 | 0 | 1 | 0 | 1 | 0 | 1 | 0 |
| BM | 1 | 0 | 0 | 0 | 1 | 0 | 1 | 1 | 1 | 0 |
| PBSC | 0 | 1 | 0 | 1 | 0 | 0 | 0 | 1 | 0 | 0 |
| BM | 0 | 0 | 0 | 0 | 1 | 0 | 0 | 0 | 1 | 1 |
| BM | 0 | 1 | 1 | 1 | 0 | 0 | 0 | 0 | 0 | 1 |
| BM | 1 | 0 | 0 | 0 | 1 | 1 | 1 | 1 | 1 | 0 |
| BM | 1 | 0 | 1 | 0 | 1 | 0 | 1 | 0 | 0 | 0 |
| BM | 0 | 0 | 1 | 0 | 0 | 1 | 0 | 0 | 0 | 0 |
| PBSC | 1 | 0 | 1 | 0 | 0 | 0 | 0 | 0 | 0 | 0 |
| BM | 1 | 0 | 0 | 0 | 0 | 1 | 0 | 1 | 0 | 0 |
| BM | 0 | 1 | 0 | 0 | 1 | 1 | 1 | 1 | 0 | 0 |
| BM | 0 | 1 | 0 | 1 | 0 | 0 | 0 | 0 | 1 | 0 |
| BM | 0 | 1 | 0 | 0 | 0 | 0 | 0 | 0 | 0 | 0 |
| BM | 1 | 1 | 0 | 0 | 0 | 0 | 0 | 0 | 0 | 1 |
| BM | 0 | 0 | 0 | 0 | 0 | 0 | 0 | 0 | 0 | 0 |
| BM | 0 | 0 | 0 | 0 | 0 | 1 | 0 | 0 | 0 | 1 |
| BM | 0 | 0 | 0 | 1 | 0 | 0 | 0 | 1 | 0 | 0 |
| BM | 1 | 0 | 0 | 1 | 0 | 1 | 0 | 1 | 1 | 0 |
| BM | 0 | 1 | 0 | 0 | 0 | 1 | 1 | 0 | 0 | 1 |
| PBSC | 0 | 1 | 0 | 0 | 0 | 1 | 0 | 0 | 0 | 0 |
| BM | 0 | 0 | 0 | 0 | 1 | 0 | 1 | 1 | 0 | 0 |
| BM | 0 | 0 | 0 | 0 | 0 | 0 | 0 | 0 | 0 | 1 |
| BM | 0 | 0 | 0 | 0 | 0 | 0 | 0 | 0 | 0 | 0 |
| BM | 0 | 0 | 0 | 0 | 0 | 0 | 0 | 0 | 1 | 0 |
| BM | 0 | 1 | 0 | 0 | 0 | 0 | 0 | 0 | 0 | 0 |
| BM | 0 | 0 | 1 | 0 | 0 | 0 | 0 | 0 | 0 | 0 |
| BM | 1 | 0 | 0 | 1 | 0 | 1 | 1 | 0 | 0 | 0 |
| BM | 0 | 0 | 0 | 1 | 0 | 0 | 1 | 0 | 1 | 0 |
| BM | 0 | 0 | 1 | 0 | 0 | 0 | 0 | 0 | 0 | 0 |
| BM | 0 | 0 | 0 | 1 | 1 | 0 | 1 | 0 | 1 | 0 |
| BM | 0 | 1 | 0 | 0 | 0 | 0 | 0 | 0 | 0 | 0 |
| BM | 1 | 0 | 0 | 0 | 0 | 0 | 0 | 0 | 0 | 0 |
| BM | 0 | 0 | 0 | 0 | 1 | 0 | 0 | 0 | 0 | 0 |
| BM | 0 | 0 | 0 | 0 | 0 | 0 | 0 | 0 | 0 | 0 |
| BM | 1 | 0 | 0 | 1 | 0 | 1 | 0 | 1 | 0 | 0 |
| BM | 0 | 0 | 0 | 0 | 0 | 1 | 0 | 0 | 0 | 0 |
| PBSC | 0 | 1 | 0 | 0 | 0 | 0 | 0 | 0 | 0 | 0 |
| BM | 0 | 0 | 0 | 0 | 0 | 0 | 0 | 0 | 0 | 0 |
| BM | 1 | 0 | 0 | 0 | 0 | 1 | 0 | 0 | 0 | 0 |
| BM | 0 | 0 | 0 | 0 | 0 | 0 | 1 | 0 | 0 | 0 |
| BM | 0 | 0 | 1 | 1 | 0 | 0 | 0 | 1 | 0 | 0 |
| BM | 1 | 0 | 0 | 0 | 1 | 0 | 0 | 0 | 0 | 0 |
| BM | 0 | 0 | 0 | 0 | 0 | 0 | 0 | 0 | 0 | 0 |
| BM | 0 | 0 | 0 | 0 | 0 | 0 | 0 | 0 | 0 | 1 |
| BM | 0 | 0 | 0 | 0 | 1 | 1 | 0 | 0 | 1 | 0 |
| BM | 0 | 0 | 0 | 0 | 0 | 0 | 1 | 0 | 1 | 0 |
| BM | 0 | 0 | 0 | 0 | 0 | 0 | 0 | 0 | 0 | 0 |

| | | | | | | | | | GVHD N |
|---|---|---|---|---|---|---|---|---|---|
| Graft | TMEM8B- | TMEM8B- | MRPL42- | TMEM8B- | TMEM8B- | MRPL42- | AEBP1- | | vote for |
| type | C5orf62 | C16orf53 | CCDC6 | TM9SF1 | NSUN5 | FOXN2 | SEC14L1 | GNOS | GNOS >= 0.55 |
| BM | 1 | 1 | 1 | 1 | 0 | 1 | 1 | 0.83 | 1 |
| BM | 1 | 1 | 1 | 1 | 1 | 0 | 1 | 0.78 | 1 |
| BM | 0 | 0 | 0 | 1 | 1 | 0 | 1 | 0.69 | 1 |
| BM | 0 | 0 | 0 | 1 | 1 | 0 | 0 | 0.56 | 1 |
| PBSC | 0 | 0 | 0 | 0 | 0 | 0 | 1 | 0.56 | 1 |
| PBSC | 0 | 0 | 0 | 1 | 0 | 0 | 0 | 0.53 | 0 |
| PBSC | 0 | 1 | 1 | 0 | 0 | 1 | 0 | 0.53 | 0 |
| BM | 0 | 0 | 0 | 0 | 0 | 1 | 0 | 0.53 | 0 |
| BM | 1 | 0 | 0 | 0 | 0 | 0 | 1 | 0.53 | 0 |
| PBSC | 1 | 0 | 1 | 0 | 0 | 0 | 1 | 0.53 | 0 |
| PBSC | 0 | 0 | 0 | 1 | 1 | 1 | 0 | 0.53 | 0 |
| PBSC | 1 | 1 | 0 | 1 | 1 | 0 | 0 | 0.50 | 0 |
| BM | 1 | 0 | 1 | 0 | 0 | 0 | 1 | 0.50 | 0 |
| BM | 0 | 1 | 0 | 1 | 1 | 0 | 1 | 0.47 | 0 |
| BM | 0 | 0 | 1 | 1 | 0 | 1 | 0 | 0.44 | 0 |
| BM | 1 | 1 | 1 | 1 | 1 | 1 | 0 | 0.44 | 0 |
| PBSC | 0 | 0 | 1 | 0 | 0 | 1 | 0 | 0.42 | 0 |
| BM | 1 | 0 | 1 | 0 | 0 | 1 | 1 | 0.42 | 0 |
| BM | 1 | 1 | 0 | 0 | 0 | 1 | 0 | 0.39 | 0 |
| PBSC | 0 | 0 | 1 | 0 | 0 | 1 | 0 | 0.39 | 0 |
| BM | 1 | 0 | 0 | 1 | 0 | 0 | 1 | 0.39 | 0 |
| BM | 0 | 0 | 0 | 0 | 0 | 0 | 0 | 0.39 | 0 |
| BM | 0 | 1 | 0 | 0 | 1 | 0 | 0 | 0.39 | 0 |
| BM | 0 | 0 | 0 | 0 | 0 | 0 | 0 | 0.36 | 0 |
| BM | 0 | 0 | 0 | 0 | 0 | 0 | 0 | 0.36 | 0 |
| BM | 1 | 0 | 0 | 1 | 0 | 0 | 0 | 0.36 | 0 |
| BM | 1 | 1 | 0 | 1 | 1 | 1 | 0 | 0.36 | 0 |
| BM | 0 | 1 | 0 | 1 | 0 | 0 | 0 | 0.33 | 0 |
| BM | 1 | 0 | 0 | 0 | 1 | 0 | 0 | 0.33 | 0 |
| BM | 0 | 0 | 0 | 0 | 1 | 0 | 0 | 0.33 | 0 |
| BM | 0 | 0 | 1 | 0 | 0 | 0 | 1 | 0.33 | 0 |
| BM | 0 | 0 | 0 | 0 | 0 | 0 | 1 | 0.33 | 0 |
| PBSC | 1 | 0 | 0 | 0 | 0 | 1 | 0 | 0.31 | 0 |
| BM | 0 | 0 | 1 | 0 | 0 | 0 | 1 | 0.31 | 0 |
| BM | 0 | 0 | 1 | 0 | 0 | 0 | 0 | 0.31 | 0 |
| BM | 0 | 0 | 0 | 0 | 0 | 0 | 1 | 0.31 | 0 |
| BM | 0 | 0 | 1 | 0 | 0 | 1 | 0 | 0.31 | 0 |
| BM | 0 | 0 | 1 | 0 | 0 | 0 | 0 | 0.31 | 0 |
| PBSC | 0 | 1 | 0 | 0 | 0 | 1 | 0 | 0.31 | 0 |
| BM | 0 | 0 | 0 | 0 | 0 | 1 | 0 | 0.28 | 0 |
| BM | 0 | 0 | 0 | 0 | 0 | 0 | 0 | 0.28 | 0 |
| BM | 0 | 0 | 0 | 0 | 0 | 0 | 0 | 0.28 | 0 |
| BM | 0 | 1 | 0 | 1 | 1 | 0 | 0 | 0.28 | 0 |
| BM | 0 | 1 | 0 | 0 | 1 | 0 | 0 | 0.28 | 0 |
| BM | 1 | 1 | 1 | 1 | 1 | 0 | 0 | 0.28 | 0 |
| BM | 0 | 1 | 0 | 1 | 0 | 0 | 0 | 0.28 | 0 |
| BM | 1 | 1 | 0 | 1 | 1 | 0 | 0 | 0.25 | 0 |
| BM | 0 | 0 | 1 | 0 | 0 | 1 | 0 | 0.25 | 0 |
| BM | 0 | 0 | 0 | 0 | 0 | 0 | 0 | 0.25 | 0 |
| PBSC | 0 | 0 | 1 | 0 | 0 | 0 | 0 | 0.25 | 0 |
| BM | 1 | 1 | 0 | 1 | 1 | 0 | 1 | 0.25 | 0 |
| BM | 0 | 0 | 0 | 0 | 0 | 0 | 0 | 0.25 | 0 |
| BM | 0 | 0 | 0 | 0 | 0 | 0 | 0 | 0.22 | 0 |
| BM | 1 | 1 | 1 | 1 | 1 | 0 | 0 | 0.22 | 0 |
| BM | 0 | 1 | 0 | 0 | 1 | 0 | 0 | 0.22 | 0 |
| BM | 0 | 0 | 0 | 0 | 1 | 0 | 0 | 0.22 | 0 |
| BM | 0 | 0 | 0 | 0 | 0 | 0 | 0 | 0.22 | 0 |
| BM | 0 | 0 | 0 | 0 | 0 | 1 | 0 | 0.22 | 0 |
| BM | 0 | 0 | 0 | 0 | 0 | 0 | 0 | 0.22 | 0 |
| BM | 0 | 0 | 0 | 0 | 0 | 0 | 1 | 0.22 | 0 |
| BM | 0 | 0 | 0 | 0 | 1 | 0 | 0 | 0.19 | 0 |
| BM | 0 | 0 | 0 | 0 | 0 | 0 | 0 | 0.19 | 0 |
| BM | 0 | 0 | 0 | 0 | 0 | 0 | 0 | 0.17 | 0 |
| BM | 0 | 0 | 0 | 0 | 0 | 0 | 0 | 0.17 | 0 |
| BM | 0 | 0 | 0 | 0 | 0 | 0 | 0 | 0.17 | 0 |
| BM | 0 | 1 | 0 | 0 | 0 | 0 | 0 | 0.17 | 0 |
| PBSC | 0 | 0 | 0 | 0 | 0 | 0 | 0 | 0.17 | 0 |
| BM | 1 | 0 | 0 | 0 | 0 | 0 | 0 | 0.17 | 0 |
| BM | 0 | 0 | 1 | 0 | 0 | 1 | 0 | 0.17 | 0 |
| BM | 0 | 0 | 0 | 0 | 0 | 0 | 0 | 0.14 | 0 |
| BM | 0 | 0 | 0 | 0 | 0 | 0 | 0 | 0.14 | 0 |
| BM | 1 | 0 | 0 | 0 | 0 | 0 | 1 | 0.14 | 0 |
| BM | 0 | 0 | 0 | 0 | 0 | 0 | 0 | 0.11 | 0 |
| BM | 0 | 0 | 0 | 0 | 0 | 0 | 0 | 0.11 | 0 |
| BM | 0 | 0 | 0 | 0 | 0 | 0 | 0 | 0.11 | 0 |
| BM | 0 | 0 | 0 | 0 | 0 | 0 | 0 | 0.11 | 0 |
| BM | 0 | 0 | 0 | 0 | 0 | 0 | 0 | 0.00 | 0 |

### Example 14

[0461] This example includes a description of improved RGP Vmod performance compared to SG (single gene) Vmod performance for GVHD outcome prediction.

[0462] Ratiometric gene pairs (RGPs) provide for additional outcome predictive robustness through (1) self-calibration by dividing-out background variation, and (2) capturing potential competitive pathway interaction effects between genes at the expression level. Therefore, when evaluating the performance of a GVHD outcome prediction gene set, one would expect the RGP voting model implementation to provide superior performance compared to a simple SG voting model implementation.

[0463] Comparison of SG and RGP Vmod Alternatives for SG43RGP36-RGPgreedysearch:

[0464] For example, referring to Table 26, SG43RGP36compSGRGP for Gneg vs. Gag3 outcome predictive performance, the best performing 48 gene GVHD outcome prediction implementation shown above, SG43RGP36-RGPgreedysearch, uses
[0465] (1) in simple 43 SG Vmod configuration, 43 predictive genes as individual voters and contributors to the GNOS value, and
[0466] (2) in superior 36 RGP Vmod configuration, 43 predictive genes in 36 different pair-wise RGP combinations as individual voters and contributors to the GNOS value (see above for detailed listings, and RGP Vmod performance details).

[0467] Note that the 36 RGP Vmod implementation (Table 26, SG43RGP36compSGRGP) outperforms the 43 SG Vmod implementation in every performance category. Beginning with the T-test, 36 RGP p-values are 10 orders of magnitude lower (better) than compared to the 43 SG p-values. GVHD reduction and GVHD N donor capture, at 5 different GNOS threshold levels, is 10%-20% better for the 36 RGP model compared to the 43 SG implementation.

TABLE 26
Comparison of SG43 voting model and RGP36 voting model implementations of Vmod SG43RGP36-RGPgreedysearch,
for the Gneg vs. Gag3 division, at prevalence P = 0.25 (“SG43RGP36compSGRGP”)

| | | | | | | | GVHD N |
|---|---|---|---|---|---|---|---|
| | Gneg vs. | | | TNR Gneg | TPR Gneg | GVHD | donor |
| | Gag3 T-test | GNOS | NPV Gneg | vs. Gag3 | vs. Gag3 | reduction | capture of |
| Vmod | p-value | threshold | vs. Gag3 | (specificity) | (sensitivity) | for Gag3 | Gneg |
| 43 SG Vmod from SG43RGP36-RGPgreedysearch | 2.4E−11 | 0.50 | 0.90 | 0.76 | 0.75 | 61% | 76% |
| 43 SG Vmod from SG43RGP36-RGPgreedysearch | 2.4E−11 | 0.55 | 0.93 | 0.64 | 0.84 | 70% | 64% |
| 43 SG Vmod from SG43RGP36-RGPgreedysearch | 2.4E−11 | 0.65 | 0.96 | 0.37 | 0.95 | 82% | 37% |
| 43 SG Vmod from SG43RGP36-RGPgreedysearch | 2.4E−11 | 0.75 | 1.00 | 0.03 | 1.00 | 100% | 3% |
| 43 SG Vmod from SG43RGP36-RGPgreedysearch | 2.4E−11 | 0.85 | — | 0.00 | 1.00 | — | 0% |
| 36 RGP Vmod from SG43RGP36-RGPgreedysearch | 3.3E−21 | 0.50 | 0.94 | 0.86 | 0.83 | 76% | 86% |
| 36 RGP Vmod from SG43RGP36-RGPgreedysearch | 3.3E−21 | 0.55 | 0.97 | 0.80 | 0.94 | 89% | 80% |
| 36 RGP Vmod from SG43RGP36-RGPgreedysearch | 3.3E−21 | 0.65 | 0.98 | 0.53 | 0.96 | 90% | 53% |
| 36 RGP Vmod from SG43RGP36-RGPgreedysearch | 3.3E−21 | 0.75 | 0.97 | 0.25 | 0.97 | 87% | 25% |
| 36 RGP Vmod from SG43RGP36-RGPgreedysearch | 3.3E−21 | 0.85 | 1.00 | 0.05 | 1.00 | 100% | 5% |

### Example 15

[0468] This example includes a description of robust statistical RGP Vmod performance for GVHD outcome prediction when the Vmods were subject to rigorous, state of the art bootstrapped cross-validation.

[0469] Bootstrapped cross-validation was applied as a computationally-intensive approach to assess the outcome predictive performance of ratiometric gene pair voting models (RGP Vmods). Bootstrapped cross-validation is more sophisticated technically and more robust in model performance estimation than is conventional cross-validation. (Bradley Efron & Robert J. Tibshirani, An Introduction to the Bootstrap, Chapman & Hall/CRC, Boca Raton, Fla., 1998, esp. pp, 247-255; A. C. Davison & D V Hinkley, Bootstrap Methods and Their Applications, Cambridge University Press, Cambridge, UK, 1997, esp. pp. 292-298.) Bootstrapped cross-validation has inherent advantages over conventional cross-validation, which include: (i) When a bootstrap sampling of the data is drawn for training a model, again and again for nB numbers of independent bootstrap samples on the order of 1000 or more (each independent bootstrap sample comprising the conventional numbers of negative and positive samples in training a model, e.g., 59 Gneg and 121 Gpos for the RRCF data), the resulting empirical distribution of samples used for training much better approximates the underlying distribution of the state-of-nature represented by the data than does any single set of data (this phenomenon is inherent to bootstrap sampling); (ii) also inherent to bootstrap sampling (which is a sampling with replacement), approximately 37% of the data is not selected by any given bootstrap sampling of the data (because by probability theory the fraction of data not selected by a given bootstrap sampling is (1−1/nB)̂nB approx.=0.367, for nB>100; Efron & Tibshirani, pp. 281-282; Davison & Hinkley, p. 114), thereby, inherently providing a corresponding complementary set of data as a test set of samples to be used in the cross-validation phase that was not used in the given bootstrap sample of data used for training the model; and (iii) statistical confidence intervals determined empirically from bootstrap sampling involving nB>1000 are reliable and easy to obtain. In each case analyzed, we applied bootstrapped cross-validation involving nB=10,000 independent bootstrap samplings of the data; hence, a corresponding ensemble of nB=10,000 test sets are generated.

[0470] The results of bootstrapped cross-validation on two different RGP Vmods based on RRCF or RL2F RT-PCR data (SG43RGP46-performance and SG43RGP36-RGPgreedysearch) are shown below, each using the GNOS voting threshold=0.5, and for the reasonable and highly likely situation of 30% disease prevalence of grades III or IV acute GVDH (Gag3). Empirically-derived 90-percent confidence intervals around any given performance measure is shown within parentheses.

[0471] Vmod SG43RGP46-performance: 0.79 mean sensitivity (0.67,0.90), 0.75 mean specificity (0.58,0.90), 0.76 mean accuracy (0.65,0.86), 0.59 mean positive predictive value (0.45,0.75), and 0.89 mean negative predictive value (0.84,0.94).

[0472] Vmod SG43RGP36-RGPgreedysearch: 0.84 mean sensitivity (0.73,0.94), 0.84 mean specificity (0.71,0.95), 0.84 mean accuracy (0.75,0.92), 0.71 mean positive predictive value (0.56,0.88), and 0.93 mean negative predictive value (0.88,0.97).

[0473] Thus, these two Vmods are computationally bootstrap cross-validated very successfully to high practical levels of performance, especially in negative predictive value which is particularly important in the medical context of the rate at which, when scored donors are predicted to not induce aGVHD, is a correct prediction of GVHD outcome.

### Example 16

[0474] This example includes a description of consistent and robust RGP Vmod performance for GVHD outcome prediction examples with respect to (a) gene expression data measurements originating from different assay platforms, and (b) altered input data modified with noise to reflect potentially confounding measurement and sample behavior variation.

[0475] In addition to harnessing the combined ratiometric GVHD outcome predictive and self-calibrating properties of RGPs, further accuracy and robustness in GVHD outcome prediction is expected to be achieved by averaging out errors contributed by individual RGP voters through the use of multi-RGP voting models (Vmods). The combined stabilizing, error-compensating and error-diluting features of multi-gene, multi-RGP voting models would then be expected to provide overall robust outcome prediction, even when:
[0476] (1) gene expression is measured using a microarray platform as opposed to the RT-PCR platform, i.e.
   [0477] 1. using a different method altogether, compared to the measurement method that provided the data on which the training and original performance evaluation was carried out for the RGP Vmods,
   [0478] 2. using a different method that is commonly accepted to be less accurate and sensitive (microarray gene expression assays are considered potentially noisy and more useful as survey tools, whereas RT-PCR is considered the gold standard for quantitative gene expression analysis, especially with respect to human medical diagnostics), and
[0479] (2) gene expression data, originating from different platforms (e.g. microarray and RT-PCR) is distorted and corrupted by various sources of variation due to sample handling, laboratory processing, instrument noise, biological variability, etc. (which can be simulated through the addition of light to extreme levels of computationally generated random noise to existing measurement data).

[0480] GVHD outcome predictive performance was determined for 3 different RGP Vmods, based on TaqMan real-time RT-PCR measurements for all 180 samples (RRCF or RL2F data, as described above), and also based on Illumina HT12 v3.0 microarray measurements for exactly the same genes as in RT-PCR assay, for 163 of the 180 samples (VQLS, as described above). Note that the RGP separatrices were determined separately for the RT-PCR and microarray datasets, since the data are on different scales for the RGPs. GNOS values and GNOS thresholds were determined the same way for both datasets.

[0481] Robustness of Vmod GVHD Outcome Prediction from RT-PCR and Microarray Measurement Data in the Presence of Noise:

[0482] For the RT-PCR and microarray measurement data of the same genes, noise (computationally generated independent random perturbations) was added to the measurement values. Uniform random noise ranging from multiples of +/−0.1× to +/−10× of the SG standard deviation, was added to each SG value for each sample, before calculating the corresponding RGP value. SG standard deviations were specifically determined for each SG over all 180 RT-PCR and 163 microarray measurements. Note that this estimate of the SG standard deviation is designed to err on the high side, because the assessed variation comprises biological variation due to sample class differences, as well as non-specific biological and measurement assay variation. Simulated random noise was sampled from a computational random number generator, and added to the SG measurement values 1,000 different times, and, for each iteration, the RGP and corresponding GNOS values for each Vmod were reported. For each set of GNOS values for each noise sampling, the 5 SSPCs (standard specifications for outcome prediction) were determined. For each of the 7 different levels of noise, the average and standard deviations for the SSPCs were determined for the 3 different divisions, for different GNOS thresholds and GVHD prevalences.

[0483] Examples of GVHD outcome predictive performance, based on SG inputs corrupted by 0.1× to 10× standard deviations of noise added to either the RT-PCR or microarray measurement data, are reported below, for 3 GVHD outcome prediction test alternatives, for the Gneg vs. Gag3 division, at GNOS threshold of 0.55 and Gag3 prevalence of 25% (midpoint between the commonly accepted range of 15% to 35%).

[0484] Table 27 (SG43RGP36noisecompRRCFVQLS) shows a comparison of how robust GVHD outcome prediction is with respect to corruption by noise, for RT-PCR and microarray data, for the so far best performing 48 gene GVHD outcome prediction implementation, SG43RGP36-RGPgreedysearch. At 0.1×s.d. of noise, the RT-PCR compared to the microarray derived Vmod results show lower (better) log 10 p-values (by ˜4 orders of magnitude) and higher (better) GVHD reduction (by ˜10%), and GVHD reduction and GVHD N donor capture of ˜75% or more. However, at 1.0×s.d. and higher of noise, all of the SSPCs are virtually indistinguishable between the RT-PCR and microarray derived Vmods (with respect to both, average and s.d. of SSPCs). Note that even at 2×s.d. of noise, GVHD reduction and GVHD N donor capture are ˜45% or higher for the RT-PCR and microarray alternatives.

[0485] In summary, these results validate the expected robustness inherent to the RGP Vmods, with respect to alternative measurement platforms (e.g., microarray, RT-PCR) and high levels of input data corruption. An at least ˜50% GVHD reduction and GVHD N donor capture should be achievable by the SG43RGP36-RGPgreedysearch GVHD outcome prediction implementation, even under exacerbating circumstances that would lead to such severe input data corruption.

[0486] Table 28 (3VmodnoisecompRRCF) shows a comparison for RT-PCR data of how robust GVHD outcome prediction is with respect to corruption by noise for 3 alternative Vmod GVHD outcome prediction implementations, SG43RGP46-RGPperformance, SG43RGP36-RGPgreedysearch, and SG21RGP28-RGPmaxgreedysearch. Note that at 0.1×s.d. of noise, SG21RGP28-RGPmaxgreedysearch shows the best overall performance, followed by SG43RGP36-RGPgreedysearch. However, at 1×s.d. of noise, the SSPCs from SG21RGP28-RGPmaxgreedysearch become virtually indistinguishable from those of SG43RGP46-RGPperformance, while the best performing Vmod is represented by SG43RGP36-RGPgreedysearch. In summary, while SG21RGP28-RGPmaxgreedysearch shows the best performance at low levels of noise, SG43RGP36-RGPgreedysearch is more robust, and the better performer in the presence of corrupting noise, when using RT-PCR data as input to GVHD outcome prediction.

[0487] Table 29 (3VmodnoisecompVQLS) shows a comparison for microarray data of how robust GVHD outcome prediction is with respect to corruption by noise for 3 alternative Vmod GVHD outcome prediction implementations, SG43RGP46-RGPperformance, SG43RGP36-RGPgreedysearch, and SG21RGP28-RGPmaxgreedysearch. Note that at all levels of noise, the SSPCs from SG21RGP28-RGPmaxgreedysearch are virtually indistinguishable from those of SG43RGP46-RGPperformance, while the best performing Vmod is represented by SG43RGP36-RGPgreedysearch. In summary, SG43RGP36-RGPgreedysearch is the most robust and best performer in the presence of corrupting noise, compared to SG21RGP28-RGPmaxgreedysearch and SG43RGP46-RGPperformance, when using microarray data as input for GVHD outcome prediction.

[0488] FIG. 20 (3VmodnoisecompTtest) shows a comparison of how robust GVHD outcome predictive p-values are with respect to corruption by noise, for RT-PCR and microarray data, for the 3 alternative Vmod GVHD outcome prediction implementations, SG43RGP46-RGPperformance, SG43RGP36-RGPgreedysearch, and SG21RGP28-RGPmaxgreedysearch. The lowest p-values, as observed for SG43RGP36-RGPgreedysearch and SG21RGP28-RGPmaxgreedysearch, are only observed when RT-PCR and not microarray measurements are used. Also, the p-values for all of the models, whether using RT-PCR or microarray data, are essentially robust to perturbations with up to 0.5×s.d. of noise added, and still in the very low ˜10⁻⁶ to ˜10⁻⁸ range at 1×s.d. of noise added. However, p-values become noticeably corrupted at 2×s.d. of noise added, though still in a potentially useful range for a GVHD outcome prediction test. At >=5×s.d. of noise added (which is very large amount of noise), the outcome predictive p-values are essentially completely corrupted. Also, at 1×s.d. of noise added, the Vmod SG43RGP36-RGPgreedysearch shows the lowest p-values, i.e. <10⁻⁸, compared to all other Vmods, whether using RT-PCR or microarray data, and demonstrates better robustness to corruption by noise compared to the more “highly tuned” SG21RGP28-RGPmaxgreedysearch.

[0489] FIG. 21 (3VmodnoisecompGVHDred) shows a comparison of how robust projected GVHD reduction is with respect to corruption by noise, for RT-PCR and microarray data, for the 3 alternative Vmod GVHD outcome prediction implementations, SG43RGP46-RGPperformance, SG43RGP36-RGPgreedysearch, and SG21RGP28-RGPmaxgreedysearch. The highest projected GVHD reduction, in the 80% to 90% range, observed for SG43RGP36-RGPgreedysearch and SG21RGP28-RGPmaxgreedysearch, is only seen when RT-PCR and not microarray measurements are used, and is robust to corruption by 0.1× to 0.2×s.d. noise added. At 0.5× to 1×s.d. of noise added, all Vmods consistently show GVHD reduction in the 50% to 75% range. Even at 2×s.d. of noise added, GVHD reduction is still projected in the 35% to 50% range. At >=5×s.d. of noise added (which is a substantial amount of noise added), the projected GVHD reductions are virtually completely corrupted.

[0490] Interestingly, projected GHVD reduction at more than 0.5×s.d. of noise added for all Vmods is higher when using microarray compared to RT-PCR data, even though RT-PCR data was used for selecting the RGPs and designing the Vmods. Also, at 1×s.d. of noise added, of all the Vmods, SG43RGP36-RGPgreedysearch shows the highest, i.e. ˜65% projected GVHD reduction for the RT-PCR as well as microarray data versions.

[0491] Conclusion and Prioritization for Clinical Implementation:

[0492] Overall, SG43RGP36-RGPgreedysearch performs most robustly, with the best SSPCs, for RT-PCR as well as microarray data, in the presence of medium levels of noise (up to 1×s.d. of noise), compared to SG21RGP28-RGPmaxgreedysearch and SG43RGP46-RGPperformance. However, at low levels of noise when using RT-PCR data, SG21RGP28-RGPmaxgreedysearch shows the best SSPCs. Moreover, the differences between the 3 GVHD outcome prediction Vmod alternatives are more pronounced when using RT-PCR compared to microarray data. This may be due to the expected higher fidelity and accuracy of the RT-PCR data compared to microarray data. Thus, GVHD outcome prediction implementations using the microarray and RT-PCR data are both plausible, but RT-PCR offers the highest fidelity for overall superior GVHD outcome prediction performance.

[0493] For practical clinical applications of GVHD outcome prediction, there may be advantages to using SG43RGP36-RGPgreedysearch in terms of combined excellent GVHD N outcome predictive performance and robustness. Because all the SGs and RGPs of the (potentially superior, at low noise) SG21RGP28-RGPmaxgreedysearch Vmod are also contained in SG43RGP36-RGPgreedysearch, the outputs for SG21RGP28-RGPmaxgreedysearch can be determined from the same measurements as SG43RGP36-RGPgreedysearch. Therefore, while GVHD N outcome prediction using SG43RGP36-RGPgreedysearch would currently be considered most reliable, parallel investigational evaluation of SG21RGP28-RGPmaxgreedysearch will determine the benefits and application of this Vmod from the processing of the pertinent subset of the same measurement data used for GVHD outcome prediction with Vmod SG43RGP36-RGPgreedysearch.

TABLE 27
Comparison of SG43RGP36-RGPgreedysearch performance for RT-PCR and microarray gene expression, in the presence of noise,
ranging from 0.1x to 10x of SG standard deviation, for the Gneg vs. Gag3 division (“SG43RGP36noisecompRRCFVQLS”),
at a GNOS threshold of 0.55 and prevalence P = 0.25 (average and s.d. of performance values over 1,000 iterations of noise)

| | | | | | AVG | AVG | AVG | AVG | AVG |
|---|---|---|---|---|---|---|---|---|---|
| | | | Preva- | Noise | NPV | TNR | TPR | ACC | GVHD |
| | | GNOS | lence | s.d. | Gneg | (specificity) | (sensitivity) | (accuracy) | reduc- |
| | Gene expression | thresh- | for | scaling | vs. | Gneg vs. | Gneg vs. | Gneg vs. | tion |
| Vmod | measurement platform | old | Gag3 | factor | Gag3 | Gag3 | Gag3 | Gag3 | for Gag3 |
| SG43RGP36-RGPgreedysearch | TaqMan real-time RT-PCR | 0.55 | 25% | 0.1 | 0.96 | 0.74 | 0.91 | 0.78 | 84% |
| SG43RGP36-RGPgreedysearch | TaqMan real-time RT-PCR | 0.55 | 25% | 0.2 | 0.95 | 0.71 | 0.90 | 0.76 | 82% |
| SG43RGP36-RGPgreedysearch | TaqMan real-time RT-PCR | 0.55 | 25% | 0.5 | 0.94 | 0.66 | 0.87 | 0.71 | 76% |
| SG43RGP36-RGPgreedysearch | TaqMan real-time RT-PCR | 0.55 | 25% | 1.0 | 0.91 | 0.59 | 0.83 | 0.65 | 64% |
| SG43RGP36-RGPgreedysearch | TaqMan real-time RT-PCR | 0.55 | 25% | 2.0 | 0.86 | 0.50 | 0.76 | 0.57 | 45% |
| SG43RGP36-RGPgreedysearch | TaqMan real-time RT-PCR | 0.55 | 25% | 5.0 | 0.80 | 0.42 | 0.69 | 0.49 | 21% |
| SG43RGP36-RGPgreedysearch | TaqMan real-time RT-PCR | 0.55 | 25% | 10.0 | 0.78 | 0.40 | 0.66 | 0.47 | 11% |
| SG43RGP36-RGPgreedysearch | Illumina HT12 microarray | 0.55 | 25% | 0.1 | 0.94 | 0.75 | 0.85 | 0.77 | 75% |
| SG43RGP36-RGPgreedysearch | Illumina HT12 microarray | 0.55 | 25% | 0.2 | 0.94 | 0.73 | 0.86 | 0.76 | 75% |
| SG43RGP36-RGPgreedysearch | Illumina HT12 microarray | 0.55 | 25% | 0.5 | 0.94 | 0.68 | 0.86 | 0.73 | 74% |
| SG43RGP36-RGPgreedysearch | Illumina HT12 microarray | 0.55 | 25% | 1.0 | 0.92 | 0.62 | 0.83 | 0.67 | 66% |
| SG43RGP36-RGPgreedysearch | Illumina HT12 microarray | 0.55 | 25% | 2.0 | 0.87 | 0.52 | 0.77 | 0.58 | 48% |
| SG43RGP36-RGPgreedysearch | Illumina HT12 microarray | 0.55 | 25% | 5.0 | 0.81 | 0.43 | 0.70 | 0.50 | 23% |
| SG43RGP36-RGPgreedysearch | Illumina HT12 microarray | 0.55 | 25% | 10.0 | 0.78 | 0.40 | 0.67 | 0.47 | 12% |

| | AVG | AVG | | | | | | | SDV |
|---|---|---|---|---|---|---|---|---|---|
| | GVHD N | Gneg vs. | | SDV | SDV | | | SDV | Gneg vs. |
| | donor | Gag3 T-test | | TNR | TPR | SDV | SDV | GVHD N | Gag3 T-test |
| | capture of | log10 | SDV | (spec- | (sensi- | ACC | GVHD | donor | log10 |
| Vmod | Gneg | p-value | NPV | ificity) | tivity) | (accuracy) | reduction | capture | p-value |
| SG43RGP36-RGPgreedysearch | 74% | −18.03 | 0.01 | 0.03 | 0.02 | 0.02 | 3% | 3% | 0.69 |
| SG43RGP36-RGPgreedysearch | 71% | −16.19 | 0.01 | 0.03 | 0.02 | 0.02 | 4% | 3% | 1.00 |
| SG43RGP36-RGPgreedysearch | 66% | −12.55 | 0.01 | 0.04 | 0.03 | 0.03 | 5% | 4% | 1.47 |
| SG43RGP36-RGPgreedysearch | 59% | −8.32 | 0.02 | 0.05 | 0.04 | 0.04 | 8% | 5% | 1.76 |
| SG43RGP36-RGPgreedysearch | 50% | −4.05 | 0.03 | 0.06 | 0.05 | 0.05 | 11% | 6% | 1.52 |
| SG43RGP36-RGPgreedysearch | 42% | −1.24 | 0.04 | 0.06 | 0.05 | 0.05 | 15% | 6% | 0.96 |
| SG43RGP36-RGPgreedysearch | 40% | −0.70 | 0.04 | 0.06 | 0.05 | 0.05 | 16% | 6% | 0.67 |
| SG43RGP36-RGPgreedysearch | 75% | −13.85 | 0.01 | 0.02 | 0.02 | 0.02 | 3% | 2% | 0.60 |
| SG43RGP36-RGPgreedysearch | 73% | −13.21 | 0.01 | 0.03 | 0.03 | 0.02 | 4% | 3% | 0.81 |
| SG43RGP36-RGPgreedysearch | 68% | −11.50 | 0.01 | 0.04 | 0.03 | 0.03 | 6% | 4% | 1.31 |
| SG43RGP36-RGPgreedysearch | 62% | −8.56 | 0.02 | 0.06 | 0.04 | 0.04 | 8% | 6% | 1.69 |
| SG43RGP36-RGPgreedysearch | 52% | −4.32 | 0.03 | 0.06 | 0.05 | 0.05 | 11% | 6% | 1.50 |
| SG43RGP36-RGPgreedysearch | 43% | −1.35 | 0.04 | 0.06 | 0.05 | 0.05 | 15% | 6% | 0.93 |
| SG43RGP36-RGPgreedysearch | 40% | −0.65 | 0.04 | 0.07 | 0.06 | 0.05 | 17% | 7% | 0.64 |

TABLE 28
Comparison of Vmod performance in the presence of noise, ranging from 0.1x to 10x of SG
measurement standard deviation, for the Gneg vs. Gag3 division, (“3VmodnoisecompRRCF”) at a GNOS
threshold of 0.55 and prevalence P = 0.25 (average and s.d. of performance values over 1,000 iterations of noise)

| | | | | | | AVG | AVG | AVG | AVG | AVG |
|---|---|---|---|---|---|---|---|---|---|---|
| | Gene | | | Noise | AVG | TNR | TPR | ACC | GVHD | GVHD |
| | expression | | | s.d. | NPV | (specificity) | (sensitivity) | (accuracy) | reduction | N donor |
| | measurement | GNOS | Prevalence | scaling | Gneg vs. | Gneg vs. | Gneg vs. | Gneg vs. | for | capture |
| Vmod | platform | threshold | for Gag3 | factor | Gag3 | Gag3 | Gag3 | Gag3 | Gag3 | of Gneg |
| SG43RGP46- | TaqMan real-time | 0.55 | 25% | 0.1 | 0.94 | 0.73 | 0.85 | 0.76 | 75% | 73% |
| RGPperformance | RT-PCR | | | | | | | | | |
| SG43RGP46- | TaqMan real-time | 0.55 | 25% | 0.2 | 0.92 | 0.70 | 0.83 | 0.74 | 70% | 70% |
| RGPperformance | RT-PCR | | | | | | | | | |
| SG43RGP46- | TaqMan real-time | 0.55 | 25% | 0.5 | 0.91 | 0.67 | 0.79 | 0.70 | 62% | 67% |
| RGPperformance | RT-PCR | | | | | | | | | |
| SG43RGP46- | TaqMan real-time | 0.55 | 25% | 1.0 | 0.88 | 0.61 | 0.74 | 0.64 | 50% | 61% |
| RGPperformance | RT-PCR | | | | | | | | | |
| SG43RGP46- | TaqMan real-time | 0.55 | 25% | 2.0 | 0.83 | 0.55 | 0.68 | 0.58 | 34% | 55% |
| RGPperformance | RT-PCR | | | | | | | | | |
| SG43RGP46- | TaqMan real-time | 0.55 | 25% | 5.0 | 0.79 | 0.49 | 0.61 | 0.52 | 15% | 49% |
| RGPperformance | RT-PCR | | | | | | | | | |
| SG43RGP46- | TaqMan real-time | 0.55 | 25% | 10.0 | 0.77 | 0.47 | 0.59 | 0.50 | 8% | 47% |
| RGPperformance | RT-PCR | | | | | | | | | |
| SG43RGP36- | TaqMan real-time | 0.55 | 25% | 0.1 | 0.96 | 0.74 | 0.91 | 0.78 | 84% | 74% |
| RGPgreedysearch | RT-PCR | | | | | | | | | |
| SG43RGP36- | TaqMan real-time | 0.55 | 25% | 0.2 | 0.95 | 0.71 | 0.90 | 0.76 | 82% | 71% |
| RGPgreedysearch | RT-PCR | | | | | | | | | |
| SG43RGP36- | TaqMan real-time | 0.55 | 25% | 0.5 | 0.94 | 0.66 | 0.87 | 0.71 | 76% | 66% |
| RGPgreedysearch | RT-PCR | | | | | | | | | |
| SG43RGP36- | TaqMan real-time | 0.55 | 25% | 1.0 | 0.91 | 0.59 | 0.83 | 0.65 | 64% | 59% |
| RGPgreedysearch | RT-PCR | | | | | | | | | |
| SG43RGP36- | TaqMan real-time | 0.55 | 25% | 2.0 | 0.86 | 0.50 | 0.76 | 0.57 | 45% | 50% |
| RGPgreedysearch | RT-PCR | | | | | | | | | |
| SG43RGP36- | TaqMan real-time | 0.55 | 25% | 5.0 | 0.80 | 0.42 | 0.69 | 0.49 | 21% | 42% |
| RGPgreedysearch | RT-PCR | | | | | | | | | |
| SG43RGP36- | TaqMan real-time | 0.55 | 25% | 10.0 | 0.78 | 0.40 | 0.66 | 0.47 | 11% | 40% |
| RGPgreedysearch | RT-PCR | | | | | | | | | |
| SG21RGP28- | TaqMan real-time | 0.55 | 25% | 0.1 | 0.97 | 0.75 | 0.93 | 0.79 | 88% | 75% |
| RGPmaxgreedysearch | RT-PCR | | | | | | | | | |
| SG21RGP28- | TaqMan real-time | 0.55 | 25% | 0.2 | 0.96 | 0.71 | 0.92 | 0.76 | 85% | 71% |
| RGPmaxgreedysearch | RT-PCR | | | | | | | | | |
| SG21RGP28- | TaqMan real-time | 0.55 | 25% | 0.5 | 0.94 | 0.63 | 0.87 | 0.69 | 75% | 63% |
| RGPmaxgreedysearch | RT-PCR | | | | | | | | | |
| SG21RGP28- | TaqMan real-time | 0.55 | 25% | 1.0 | 0.90 | 0.56 | 0.81 | 0.62 | 59% | 56% |
| RGPmaxgreedysearch | RT-PCR | | | | | | | | | |
| SG21RGP28- | TaqMan real-time | 0.55 | 25% | 2.0 | 0.85 | 0.48 | 0.74 | 0.55 | 38% | 48% |
| RGPmaxgreedysearch | RT-PCR | | | | | | | | | |
| SG21RGP28- | TaqMan real-time | 0.55 | 25% | 5.0 | 0.79 | 0.42 | 0.67 | 0.48 | 17% | 42% |
| RGPmaxgreedysearch | RT-PCR | | | | | | | | | |
| SG21RGP28- | TaqMan real-time | 0.55 | 25% | 10.0 | 0.77 | 0.40 | 0.65 | 0.46 | 9% | 40% |
| RGPmaxgreedysearch | RT-PCR | | | | | | | | | |

| | | AVG | | | | | | | SDV |
|---|---|---|---|---|---|---|---|---|---|
| | Gene | Gneg vs. | | | | | | SDV | Gneg vs. |
| | expression | Gag3 | | SDV | SDV | SDV | SDV | GVHD | Gag3 |
| | measurement | T-test log10 | SDV | TNR | TPR | ACC | GVHD | N donor | T-test log10 |
| Vmod | platform | p-value | NPV | (specificity) | (sensitivity) | (accuracy) | reduction | capture | p-value |
| SG43RGP46- | TaqMan real-time | −14.44 | 0.01 | 0.03 | 0.02 | 0.02 | 3% | 3% | 0.72 |
| RGPperformance | RT-PCR | | | | | | | | |
| SG43RGP46- | TaqMan real-time | −12.65 | 0.01 | 0.03 | 0.02 | 0.02 | 4% | 3% | 0.98 |
| RGPperformance | RT-PCR | | | | | | | | |
| SG43RGP46- | TaqMan real-time | −9.55 | 0.01 | 0.04 | 0.03 | 0.03 | 5% | 4% | 1.39 |
| RGPperformance | RT-PCR | | | | | | | | |
| SG43RGP46- | TaqMan real-time | -6.16 | 0.02 | 0.05 | 0.04 | 0.04 | 8% | 5% | 1.58 |
| RGPperformance | RT-PCR | | | | | | | | |
| SG43RGP46- | TaqMan real-time | −3.01 | 0.03 | 0.06 | 0.05 | 0.05 | 11% | 6% | 1.37 |
| RGPperformance | RT-PCR | | | | | | | | |
| SG43RGP46- | TaqMan real-time | −0.97 | 0.03 | 0.06 | 0.06 | 0.05 | 13% | 6% | 0.80 |
| RGPperformance | RT-PCR | | | | | | | | |
| SG43RGP46- | TaqMan real-time | −0.61 | 0.04 | 0.06 | 0.06 | 0.05 | 15% | 6% | 0.62 |
| RGPperformance | RT-PCR | | | | | | | | |
| SG43RGP36- | TaqMan real-time | −18.03 | 0.01 | 0.03 | 0.02 | 0.02 | 3% | 3% | 0.69 |
| RGPgreedysearch | RT-PCR | | | | | | | | |
| SG43RGP36- | TaqMan real-time | −16.19 | 0.01 | 0.03 | 0.02 | 0.02 | 4% | 3% | 1.00 |
| RGPgreedysearch | RT-PCR | | | | | | | | |
| SG43RGP36- | TaqMan real-time | −12.55 | 0.01 | 0.04 | 0.03 | 0.03 | 5% | 4% | 1.47 |
| RGPgreedysearch | RT-PCR | | | | | | | | |
| SG43RGP36- | TaqMan real-time | −8.32 | 0.02 | 0.05 | 0.04 | 0.04 | 8% | 5% | 1.76 |
| RGPgreedysearch | RT-PCR | | | | | | | | |
| SG43RGP36- | TaqMan real-time | −4.05 | 0.03 | 0.06 | 0.05 | 0.05 | 11% | 6% | 1.52 |
| RGPgreedysearch | RT-PCR | | | | | | | | |
| SG43RGP36- | TaqMan real-time | −1.24 | 0.04 | 0.06 | 0.05 | 0.05 | 15% | 6% | 0.96 |
| RGPgreedysearch | RT-PCR | | | | | | | | |
| SG43RGP36- | TaqMan real-time | −0.70 | 0.04 | 0.06 | 0.05 | 0.05 | 16% | 6% | 0.67 |
| RGPgreedysearch | RT-PCR | | | | | | | | |
| SG21RGP28- | TaqMan real-time | −19.33 | 0.01 | 0.03 | 0.01 | 0.02 | 2% | 3% | 0.93 |
| RGPmaxgreedysearch | RT-PCR | | | | | | | | |
| SG21RGP28- | TaqMan real-time | −17.09 | 0.01 | 0.03 | 0.02 | 0.03 | 3% | 3% | 1.29 |
| RGPmaxgreedysearch | RT-PCR | | | | | | | | |
| SG21RGP28- | TaqMan real-time | −12.23 | 0.01 | 0.05 | 0.03 | 0.04 | 6% | 5% | 1.77 |
| RGPmaxgreedysearch | RT-PCR | | | | | | | | |
| SG21RGP28- | TaqMan real-time | −7.05 | 0.02 | 0.06 | 0.04 | 0.04 | 9% | 6% | 1.80 |
| RGPmaxgreedysearch | RT-PCR | | | | | | | | |
| SG21RGP28- | TaqMan real-time | −3.11 | 0.03 | 0.06 | 0.05 | 0.05 | 12% | 6% | 1.39 |
| RGPmaxgreedysearch | RT-PCR | | | | | | | | |
| SG21RGP28- | TaqMan real-time | −1.00 | 0.04 | 0.06 | 0.05 | 0.05 | 15% | 6% | 0.83 |
| RGPmaxgreedysearch | RT-PCR | | | | | | | | |
| SG21RGP28- | TaqMan real-time | −0.63 | 0.04 | 0.06 | 0.06 | 0.05 | 16% | 6% | 0.60 |
| RGPmaxgreedysearch | RT-PCR | | | | | | | | |

TABLE 29
Comparison of Vmod performance in the presence of noise, ranging from 0.1x to 10x of SG
measurement standard deviation, for the Gneg vs. Gag3 division (“3VmodnoisecompVQLS”), at a GNOS
threshold of 0.55 and prevalence P = 0.25 (average and s.d. of performance values over 1,000 iterations of noise)

| | | | | | | AVG | AVG | AVG | AVG | AVG |
|---|---|---|---|---|---|---|---|---|---|---|
| | Gene | | | | AVG | TNR | TPR | ACC | GVHD | GVHD |
| | expression | | | Noise s.d. | NPV | (specificity) | (sensitivity) | (accuracy) | reduction | N donor |
| | measurement | GNOS | Prevalence | scaling | Gneg vs. | Gneg vs. | Gneg vs. | Gneg vs. | for | capture |
| Vmod | platform | threshold | for Gag3 | factor | Gag3 | Gag3 | Gag3 | Gag3 | Gag3 | of Gneg |
| SG43RGP46- | Illumina HT12 | 0.55 | 25% | 0.1 | 0.91 | 0.75 | 0.78 | 0.76 | 65% | 75% |
| RGPperformance | microarray | | | | | | | | | |
| SG43RGP46- | Illumina HT12 | 0.55 | 25% | 0.2 | 0.91 | 0.75 | 0.78 | 0.76 | 65% | 75% |
| RGPperformance | microarray | | | | | | | | | |
| SG43RGP46- | Illumina HT12 | 0.55 | 25% | 0.5 | 0.91 | 0.72 | 0.78 | 0.73 | 62% | 72% |
| RGPperformance | microarray | | | | | | | | | |
| SG43RGP46- | Illumina HT12 | 0.55 | 25% | 1.0 | 0.89 | 0.65 | 0.75 | 0.68 | 54% | 65% |
| RGPperformance | microarray | | | | | | | | | |
| SG43RGP46- | Illumina HT12 | 0.55 | 25% | 2.0 | 0.85 | 0.58 | 0.69 | 0.60 | 38% | 58% |
| RGPperformance | microarray | | | | | | | | | |
| SG43RGP46- | Illumina HT12 | 0.55 | 25% | 5.0 | 0.80 | 0.49 | 0.63 | 0.53 | 19% | 49% |
| RGPperformance | microarray | | | | | | | | | |
| SG43RGP46- | Illumina HT12 | 0.55 | 25% | 10.0 | 0.77 | 0.46 | 0.59 | 0.50 | 9% | 46% |
| RGPperformance | microarray | | | | | | | | | |
| SG43RGP36- | Illumina HT12 | 0.55 | 25% | 0.1 | 0.94 | 0.75 | 0.85 | 0.77 | 75% | 75% |
| RGPgreedysearch | microarray | | | | | | | | | |
| SG43RGP36- | Illumina HT12 | 0.55 | 25% | 0.2 | 0.94 | 0.73 | 0.86 | 0.76 | 75% | 73% |
| RGPgreedysearch | microarray | | | | | | | | | |
| SG43RGP36- | Illumina HT12 | 0.55 | 25% | 0.5 | 0.94 | 0.68 | 0.86 | 0.73 | 74% | 68% |
| RGPgreedysearch | microarray | | | | | | | | | |
| SG43RGP36- | Illumina HT12 | 0.55 | 25% | 1.0 | 0.92 | 0.62 | 0.83 | 0.67 | 66% | 62% |
| RGPgreedysearch | microarray | | | | | | | | | |
| SG43RGP36- | Illumina HT12 | 0.55 | 25% | 2.0 | 0.87 | 0.52 | 0.77 | 0.58 | 48% | 52% |
| RGPgreedysearch | microarray | | | | | | | | | |
| SG43RGP36- | Illumina HT12 | 0.55 | 25% | 5.0 | 0.81 | 0.43 | 0.70 | 0.50 | 23% | 43% |
| RGPgreedysearch | microarray | | | | | | | | | |
| SG43RGP36- | Illumina HT12 | 0.55 | 25% | 10.0 | 0.78 | 0.40 | 0.67 | 0.47 | 12% | 40% |
| RGPgreedysearch | microarray | | | | | | | | | |
| SG21RGP28- | Illumina HT12 | 0.55 | 25% | 0.1 | 0.94 | 0.68 | 0.87 | 0.73 | 76% | 68% |
| RGPmaxgreedysearch | microarray | | | | | | | | | |
| SG21RGP28- | Illumina HT12 | 0.55 | 25% | 0.2 | 0.94 | 0.68 | 0.87 | 0.73 | 76% | 68% |
| RGPmaxgreedysearch | microarray | | | | | | | | | |
| SG21RGP28- | Illumina HT12 | 0.55 | 25% | 0.5 | 0.93 | 0.63 | 0.86 | 0.69 | 73% | 63% |
| RGPmaxgreedysearch | microarray | | | | | | | | | |
| SG21RGP28- | Illumina HT12 | 0.55 | 25% | 1.0 | 0.90 | 0.57 | 0.81 | 0.63 | 60% | 57% |
| RGPmaxgreedysearch | microarray | | | | | | | | | |
| SG21RGP28- | Illumina HT12 | 0.55 | 25% | 2.0 | 0.85 | 0.49 | 0.74 | 0.56 | 40% | 49% |
| RGPmaxgreedysearch | microarray | | | | | | | | | |
| SG21RGP28- | Illumina HT12 | 0.55 | 25% | 5.0 | 0.80 | 0.42 | 0.68 | 0.49 | 18% | 42% |
| RGPmaxgreedysearch | microarray | | | | | | | | | |
| SG21RGP28- | Illumina HT12 | 0.55 | 25% | 10.0 | 0.77 | 0.40 | 0.65 | 0.46 | 8% | 40% |
| RGPmaxgreedysearch | microarray | | | | | | | | | |

| | | AVG | | | | | | | SDV |
|---|---|---|---|---|---|---|---|---|---|
| | Gene | Gneg vs. | | | | | | SDV | Gneg vs. |
| | expression | Gag3 | | SDV | SDV | SDV | SDV | GVHD | Gag3 |
| | measurement | T-test log10 | SDV | TNR | TPR | ACC | GVHD | N donor | T-test log10 |
| Vmod | platform | p-value | NPV | (specificity) | (sensitivity) | (accuracy) | reduction | capture | p-value |
| SG43RGP46- | Illumina HT12 | −11.36 | 0.01 | 0.02 | 0.02 | 0.02 | 3% | 2% | 0.57 |
| RGPperformance | microarray | | | | | | | | |
| SG43RGP46- | Illumina HT12 | −11.00 | 0.01 | 0.03 | 0.03 | 0.02 | 4% | 3% | 0.79 |
| RGPperformance | microarray | | | | | | | | |
| SG43RGP46- | Illumina HT12 | −9.45 | 0.01 | 0.04 | 0.03 | 0.03 | 6% | 4% | 1.26 |
| RGPperformance | microarray | | | | | | | | |
| SG43RGP46- | Illumina HT12 | −6.82 | 0.02 | 0.05 | 0.04 | 0.04 | 8% | 5% | 1.58 |
| RGPperformance | microarray | | | | | | | | |
| SG43RGP46- | Illumina HT12 | −3.49 | 0.03 | 0.06 | 0.05 | 0.05 | 10% | 6% | 1.34 |
| RGPperformance | microarray | | | | | | | | |
| SG43RGP46- | Illumina HT12 | −1.17 | 0.03 | 0.07 | 0.06 | 0.05 | 14% | 7% | 0.87 |
| RGPperformance | microarray | | | | | | | | |
| SG43RGP46- | Illumina HT12 | −0.60 | 0.04 | 0.07 | 0.06 | 0.05 | 15% | 7% | 0.61 |
| RGPperformance | microarray | | | | | | | | |
| SG43RGP36- | Illumina HT12 | −13.85 | 0.01 | 0.02 | 0.02 | 0.02 | 3% | 2% | 0.60 |
| RGPgreedysearch | microarray | | | | | | | | |
| SG43RGP36- | Illumina HT12 | −13.21 | 0.01 | 0.03 | 0.03 | 0.02 | 4% | 3% | 0.81 |
| RGPgreedysearch | microarray | | | | | | | | |
| SG43RGP36- | Illumina HT12 | −11.50 | 0.01 | 0.04 | 0.03 | 0.03 | 6% | 4% | 1.31 |
| RGPgreedysearch | microarray | | | | | | | | |
| SG43RGP36- | Illumina HT12 | −8.56 | 0.02 | 0.06 | 0.04 | 0.04 | 8% | 6% | 1.69 |
| RGPgreedysearch | microarray | | | | | | | | |
| SG43RGP36- | Illumina HT12 | −4.32 | 0.03 | 0.06 | 0.05 | 0.05 | 11% | 6% | 1.50 |
| RGPgreedysearch | microarray | | | | | | | | |
| SG43RGP36- | Illumina HT12 | −1.35 | 0.04 | 0.06 | 0.05 | 0.05 | 15% | 6% | 0.93 |
| RGPgreedysearch | microarray | | | | | | | | |
| SG43RGP36- | Illumina HT12 | −0.65 | 0.04 | 0.07 | 0.06 | 0.05 | 17% | 7% | 0.64 |
| RGPgreedysearch | microarray | | | | | | | | |
| SG21RGP28- | Illumina HT12 | −11.27 | 0.01 | 0.03 | 0.02 | 0.02 | 4% | 3% | 0.63 |
| RGPmaxgreedysearch | microarray | | | | | | | | |
| SG21RGP28- | Illumina HT12 | −10.84 | 0.01 | 0.04 | 0.03 | 0.03 | 5% | 4% | 0.86 |
| RGPmaxgreedysearch | microarray | | | | | | | | |
| SG21RGP28- | Illumina HT12 | −9.29 | 0.02 | 0.05 | 0.03 | 0.04 | 6% | 5% | 1.36 |
| RGPmaxgreedysearch | microarray | | | | | | | | |
| SG21RGP28- | Illumina HT12 | −6.41 | 0.02 | 0.06 | 0.04 | 0.04 | 9% | 6% | 1.64 |
| RGPmaxgreedysearch | microarray | | | | | | | | |
| SG21RGP28- | Illumina HT12 | −3.00 | 0.03 | 0.06 | 0.05 | 0.05 | 12% | 6% | 1.27 |
| RGPmaxgreedysearch | microarray | | | | | | | | |
| SG21RGP28- | Illumina HT12 | −1.00 | 0.04 | 0.07 | 0.06 | 0.05 | 16% | 7% | 0.77 |
| RGPmaxgreedysearch | microarray | | | | | | | | |
| SG21RGP28- | Illumina HT12 | −0.56 | 0.04 | 0.07 | 0.06 | 0.05 | 17% | 7% | 0.57 |
| RGPmaxgreedysearch | microarray | | | | | | | | |

### Example 17

[0494] This example includes a discussion of additional evidence related to the biological basis of GVHD outcome prediction, and GVHD outcome predictive analysis, by comparison of absolute to relative RT-PCR gene expression data.

[0495] Absolute gene expression is assessed directly from the output of the RT-PCR measurement instrumentation, as described above for RL2F (including outlier and non-detectable value replacement; see above, “Implemented RT-PCR data pre-processing in 4 steps to arrive at RRCF values,” on which GVHD outcome prediction determinations are based). As such, absolute gene expression assays are subject to many sources of fluctuations (variations in starting material, sample handling and processing, cell metabolic state, instrumentation calibration) that can be compensated for by relative quantitation procedures, such as carried out for RRCF and RGPs (see above: “Implemented RT-PCR data pre-processing in 4 steps to arrive at RRCF values,” on which GVHD outcome prediction determinations are based; and, “Determination of RGPs”).

[0496] Consequently, absolute gene expression is generally not used for human diagnostic applications. However, given statistical/numerical safeguards and additional QC checkpoints, absolute gene expression could be applied to dependable human diagnostic applications.

[0497] Note: For application to the RGPs that are used in the GVHD outcome prediction test, it is inconsequential whether relative RRCF or absolute RL2F data are used as input to the GVHD outcome prediction test (see above, “Determination of RGPs”)

[0498] GVHD Outcome Prediction from RL2F Data:

[0499] When evaluating GVHD outcome prediction based on RL2F data (absolute RT-PCR quantition), it is observed that there are ˜2 times as many of the 175 selected genes with p-values<=0.05 (see Table 30, RL2FRRCFSGcomp). The geometric mean of the T-test p-values for Gneg vs. Gag2 is 0.0458, much lower compared to the corresponding RRCF values. (Note: geometric mean is the traditional recommended method for averaging statistical p-values. E.g., the geometric mean of p1=0.00001 and p2=0.1 is p=0.001; whereas, the arithmetic mean would be a misleading p=0.05.)

[0500] Remarkably, 95% or the RL2F genes (from the set of 175, see Table 13, SG175) are P-directional, meaning that the average gene expression levels of Gpos, Gag2 or Gag3 samples are higher than in Gneg samples. In comparison, P-directional genes only represent 49% of the RRCF dataset.

[0501] This observation implies that there is an underlying biological feature of CD4+ T cells from donors associated with GVHD positive outcomes, i.e., that gene expression levels are generally substantially higher for the vast majority of genes in CD4+ T cells from donors that cause GVHD, compared to donors associated with GVHD negative outcomes. This may be potentially due to elevated metabolic and transcriptional activity in more alloreactive CD4+ T cells; however, in-depth studies of such differences in metabolic activity do not appear in the scientific literature.

[0502] Given how well SGs from RL2F data perform on the individual SG level with respect to GVHD outcome prediction, they may also perform well in the types of SG Vmods examined above. However, as observed in Table 31 (RL2FRRCFSGVmodcomp), RL2F data perform very poorly compared to RRCF data for the 43 SG implementation of Vmod SG43RGP36-RGPgreedysearch.

[0503] Clearly, on the SG level, RL2F data should not be substituted for RRCF data in the Vmods selected above for GVHD outcome prediction applications, as suggested in Table 31 for the 43 SG implementation of Vmod SG43RGP36-RGPgreedysearch. However, given SG prioritizations especially selected for RL2F data (other than involving ratiometric or other self-calibrating methods as used above), it is conceivable that RL2F SG Vmods could be designed with higher GVHD outcome predictive performance than the currently examined version of an RL2F SG Vmod. Given the drawbacks inherent to laboratory measurement reliability of difficult to calibrate absolute RL2F RT-PCR data, designing a GVHD outcome prediction test based on RL2F data, while possible in-principle, may be risky with respect to reliability, and therefore although not further pursued, may become a priority for development.

TABLE 30
Comparison of GVHD outcome predictive performance for SGs based on RL2F (absolute quantitation)
and RRCF (relative quantitation) RT-PCR data (“RL2FRRCFSGcomp”).

| | | Gneg vs. Gpos | Gneg vs. Gag2 | Gneg vs. Gag3 | SG % | SG % |
|---|---|---|---|---|---|---|
| Data type | Performance variable | T-test p-value | T-test p-value | T-test p-value | P-directional | N-directional |
| RL2F (absolute gene expression) | SG min | 0.0004 | 0.0001 | 0.0013 | 97% | 3% |
| RL2F (absolute gene expression) | SG max | 0.9346 | 0.9923 | 0.9308 | | |
| RL2F (absolute gene | SG geometric mean | 0.0830 | 0.0458 | 0.1165 | | |
| expression) | | | | | | |
| RL2F (absolute gene | SG p-value % <=0.05 | 61 | 88 | 45 | | |
| expression) | | | | | | |
| RRCF (relative gene expression) | SG minimum | 0.0002 | 0.0001 | 0.0001 | 49% | 51% |
| RRCF (relative gene expression) | SG maximum | 0.9877 | 0.9997 | 0.9881 | | |
| RRCF (relative gene expression) | SG geometric mean | 0.1827 | 0.1787 | 0.1641 | | |
| RRCF (relative gene expression) | SG p-value % <=0.05 | 32 | 32 | 32 | | |

TABLE 31
Comparison of GVHD outcome predictive performance for SG Vmods based on RL2F (absolute
quantitation) and RRCF (relative quantitation) RT-PCR data (“RL2FRRCFSGVmodcomp”).

| | | Gneg vs. | | NPV | TNR Gneg | TPR Gneg | | GVHD |
|---|---|---|---|---|---|---|---|---|
| | | Gpos T-test | GNOS | Gneg vs. | vs. Gag3 | vs. Gag3 | GVHD | N donor |
| Data type | Vmod | p-value | threshold | Gag3 | (specificity) | (sensitivity) | reduction | capture |
| RL2F (relative | 43 SG Vmod from | 1.12E−02 | 0.50 | 0.82 | 0.53 | 0.66 | 29% | 53% |
| gene expression) | SG43RGP36- | | | | | | | |
| | RGPgreedysearch | | | | | | | |
| RL2F (relative | 43 SG Vmod from | 1.12E−02 | 0.55 | 0.82 | 0.51 | 0.66 | 28% | 51% |
| gene expression) | SG43RGP36- | | | | | | | |
| | RGPgreedysearch | | | | | | | |
| RL2F (relative | 43 SG Vmod from | 1.12E−02 | 0.65 | 0.83 | 0.47 | 0.70 | 31% | 47% |
| gene expression) | SG43RGP36- | | | | | | | |
| | RGPgreedysearch | | | | | | | |
| RL2F (relative | 43 SG Vmod from | 1.12E−02 | 0.75 | 0.82 | 0.36 | 0.77 | 28% | 36% |
| gene expression) | SG43RGP36- | | | | | | | |
| | RGPgreedysearch | | | | | | | |
| RL2F (relative | 43 SG Vmod from | 1.12E−02 | 0.85 | 0.86 | 0.29 | 0.86 | 43% | 29% |
| gene expression) | SG43RGP36- | | | | | | | |
| | RGPgreedysearch | | | | | | | |
| RRCF (relative | 43 SG Vmod from | 3.80E−10 | 0.50 | 0.90 | 0.76 | 0.75 | 61% | 76% |
| gene expression) | SG43RGP36- | | | | | | | |
| | RGPgreedysearch | | | | | | | |
| RRCF (relative | 43 SG Vmod from | 3.80E−10 | 0.55 | 0.93 | 0.64 | 0.84 | 70% | 64% |
| gene expression) | SG43RGP36- | | | | | | | |
| | RGPgreedysearch | | | | | | | |
| RRCF (relative | 43 SG Vmod from | 3.80E−10 | 0.65 | 0.96 | 0.37 | 0.95 | 82% | 37% |
| gene expression) | SG43RGP36- | | | | | | | |
| | RGPgreedysearch | | | | | | | |
| RRCF (relative | 43 SG Vmod from | 3.80E−10 | 0.75 | 1.00 | 0.03 | 1.00 | 100% | 3% |
| gene expression) | SG43RGP36- | | | | | | | |
| | RGPgreedysearch | | | | | | | |
| RRCF (relative | 43 SG Vmod from | 3.80E−10 | 0.85 | — | 0.00 | 1.00 | — | 0% |
| gene expression) | SG43RGP36- | | | | | | | |
| | RGPgreedysearch | | | | | | | |

### Example 18

[0504] This example includes a discussion of the rank order of GNOS values in GVHD outcome predictive groups reflecting increasing severity of GVHD.

[0505] The GVHD groups analyzed here reflect varying intensities of GVHD, from Gneg, i.e. no GVHD, to Gag3, i.e., severe and often fatal acute grades III or IV GVHD, and various disease intensity gradations in-between. Specifically, the GVHD outcome classes cover 6 different groups (not to be confused with the Groups listed above), in a medically-accepted order of GVHD severity, as follows:

[0506] (1) Gneg (no acute nor chronic GVHD),

[0507] (2) cG only (chronic GVHD without acute GHVHD),

[0508] (3) ag2 (acute grade II GVHD, without acute grade III or IV GVHD, with or without chronic GVHD)

[0509] (4) Gpos (any kind of GVHD, including chronic and acute grades II, III or IV GVHD)

[0510] (5) Gag2 (acute grade II, III or IV GVHD, with or without chronic GVHD), and

[0511] (6) Gag3 (acute grade III or IV GVHD, with or without chronic GVHD).

[0512] For the samples within each of these 6 groups, the GNOS values were averaged for three different Vmods, from data in the presence of varying amounts of added numerical noise (see above, “Robustness of Vmod outcome prediction from RT-PCR and microarray RGP data in the presence of noise”). From these GNOS averages, ranks were determined in descending order, i.e., the highest GNOS average is ranked as 1.0, and the lowest GNOS average is ranked as 6.0.

[0513] Significantly, in Table 32 (GNOSrankorder), for the best performing Vmods SG43RGP36-RGPgreedysearch and SG21RGP28-RGPmaxgreedysearch, and in close approximation for Vmod SG43RGP46-RGPperformance, we consistently observe the same rank order of GNOS averages as we do for the medically-accepted order of disease severity listed above. This consistently applies to the RT-PCR and to the microarray data used as inputs for these Vmods. Even in the presence of up to 2×s.d. of noise added to the data, the Gneg and Gag3 groups consistently reflect the extreme ranks, and the other groups generally fall in-between in the order listed above.

[0514] In conclusion, the GNOS values, as reflected in the ranks of the 6 GVHD group averages, therefore very highly likely reflects an inherent, integrated genuine biological signal that varies in direct proportion to the severity of GVHD, as also indicated in the medically-accepted order of GVHD severity listed above. This reflection of an integrated underlying biological signal is robust with respect to whether different Vmods were used, whether RT-PCR or microarray data were used, and whether slight to extreme levels of numerical random noise were added to the measurement data. Thus, outcome prediction of recipient GVHD from donor CD4+ cell gene expression profiles is fundamentally due to complex biological patterns of gene activation and repression in these cells, which vary in direction proportion to the severity of recipient GVHD, and are informationally captured in the exemplified voting models of ratiometric gene pairs disclosed herein.

TABLE 32
Comparison of rank order of average GNOS values for 6 different GVHD outcome groups, using RT-
PCR and microarray data, in the presence of various levels of noise (“GNOSrankorder”).

| | | Vmod | | | | | |
|---|---|---|---|---|---|---|---|
| | | SG43RGP46- | SG43RGP46- | SG43RGP46- | SG43RGP46- | SG43RGP46- | SG43RGP46- |
| | Noise s.d. | RGPperformance | RGPperformance | RGPperformance | RGPperformance | RGPperformance | RGPperformance |
| | scaling | Rank Gneg | Rank Gpos | Rank Gag2 | Rank Gag3 | Rank cG only | Rank aGg2 |
| Data type | factor | average | average | average | average | (no aG) average | (no aGg34) average |
| RRCF (RT-PCR) | 0.1 | 1.0 | 4.0 | 5.0 | 6.0 | 2.1 | 2.9 |
| RRCF (RT-PCR) | 0.2 | 1.0 | 4.0 | 5.0 | 6.0 | 2.3 | 2.7 |
| RRCF (RT-PCR) | 0.5 | 1.0 | 4.0 | 5.0 | 6.0 | 2.3 | 2.7 |
| RRCF (RT-PCR) | 1.0 | 1.0 | 4.0 | 4.8 | 6.0 | 2.6 | 2.6 |
| RRCF (RT-PCR) | 2.0 | 1.0 | 4.0 | 4.5 | 5.6 | 3.2 | 2.8 |
| RRCF (RT-PCR) | 5.0 | 1.4 | 3.9 | 4.1 | 4.7 | 3.6 | 3.3 |
| RRCF (RT-PCR) | 10.0 | 2.1 | 3.8 | 3.9 | 4.2 | 3.6 | 3.3 |
| VQLS (microarray) | 0.1 | 1.0 | 4.0 | 3.6 | 5.5 | 4.8 | 2.0 |
| VQLS (microarray) | 0.2 | 1.0 | 4.0 | 3.7 | 5.4 | 4.8 | 2.2 |
| VQLS (microarray) | 0.5 | 1.0 | 4.1 | 3.6 | 4.9 | 4.8 | 2.6 |
| VQLS (microarray) | 1.0 | 1.0 | 4.1 | 3.7 | 4.3 | 4.5 | 3.3 |
| VQLS (microarray) | 2.0 | 1.0 | 4.0 | 3.9 | 4.1 | 4.2 | 3.8 |
| VQLS (microarray) | 5.0 | 1.2 | 4.0 | 3.9 | 4.0 | 4.1 | 3.8 |
| VQLS (microarray) | 10.0 | 1.9 | 3.9 | 3.8 | 3.9 | 3.8 | 3.7 |
| | | Vmod | | | | | |
| | | SG43RGP36- | SG43RGP36- | SG43RGP36- | SG43RGP36- | SG43RGP36- | SG43RGP36- |
| | Noise s.d. | RGPgreedysearch | RGPgreedysearch | RGPgreedysearch | RGPgreedysearch | RGPgreedysearch | RGPgreedysearch |
| | scaling | Rank Gneg | Rank Gpos | Rank Gag2 | Rank Gag3 | Rank cG only | Rank aGg2 |
| Data type | factor | average | average | average | average | (no aG) average | (no aGg34) average |
| RRCF (RT-PCR) | 0.1 | 1.0 | 4.0 | 5.0 | 6.0 | 2.0 | 3.0 |
| RRCF (RT-PCR) | 0.2 | 1.0 | 4.0 | 5.0 | 6.0 | 2.1 | 2.9 |
| RRCF (RT-PCR) | 0.5 | 1.0 | 4.0 | 5.0 | 6.0 | 2.4 | 2.7 |
| RRCF (RT-PCR) | 1.0 | 1.0 | 4.0 | 4.7 | 5.8 | 2.8 | 2.7 |
| RRCF (RT-PCR) | 2.0 | 1.0 | 4.0 | 4.3 | 5.1 | 3.4 | 3.2 |
| RRCF (RT-PCR) | 5.0 | 1.5 | 3.9 | 4.1 | 4.5 | 3.4 | 3.5 |
| RRCF (RT-PCR) | 10.0 | 2.2 | 3.8 | 3.9 | 4.1 | 3.5 | 3.5 |
| VQLS (microarray) | 0.1 | 1.0 | 3.9 | 5.0 | 6.0 | 2.0 | 3.1 |
| VQLS (microarray) | 0.2 | 1.0 | 3.9 | 5.0 | 5.9 | 2.0 | 3.2 |
| VQLS (microarray) | 0.5 | 1.0 | 3.9 | 4.9 | 5.7 | 2.4 | 3.2 |
| VQLS (microarray) | 1.0 | 1.0 | 3.9 | 4.5 | 5.2 | 3.1 | 3.3 |
| VQLS (microarray) | 2.0 | 1.0 | 3.9 | 4.3 | 4.6 | 3.5 | 3.7 |
| VQLS (microarray) | 5.0 | 1.4 | 4.0 | 4.0 | 4.2 | 3.7 | 3.7 |
| VQLS (microarray) | 10.0 | 2.1 | 3.8 | 3.9 | 4.0 | 3.6 | 3.6 |

| | | Vmod | | | | |
|---|---|---|---|---|---|---|
| | Noise | SG21RGP28- | SG21RGP28- | SG21RGP28- | SG21RGP28- | SG21RGP28- |
| | s.d. | RGPmaxgreedysearch | RGPmaxgreedysearch | RGPmaxgreedysearch | RGPmaxgreedysearch | RGPmaxgreedysearch |
| | scaling | Rank Gneg | Rank Gpos | Rank Gag2 | Rank Gag3 | Rank cG only |
| Data type | factor | average | average | average | average | (no aG) average |
| RRCF (RT-PCR) | 0.1 | 1.0 | 4.0 | 5.0 | 6.0 | 2.0 |
| RRCF (RT-PCR) | 0.2 | 1.0 | 4.0 | 5.0 | 6.0 | 2.0 |
| RRCF (RT-PCR) | 0.5 | 1.0 | 4.0 | 5.0 | 6.0 | 2.3 |
| RRCF (RT-PCR) | 1.0 | 1.0 | 3.9 | 4.7 | 5.7 | 2.7 |
| RRCF (RT-PCR) | 2.0 | 1.1 | 3.9 | 4.4 | 5.0 | 3.2 |
| RRCF (RT-PCR) | 5.0 | 1.7 | 3.9 | 4.1 | 4.4 | 3.4 |
| RRCF (RT-PCR) | 10.0 | 2.4 | 3.8 | 3.8 | 3.9 | 3.5 |
| VQLS (microarray) | 0.1 | 1.0 | 4.0 | 5.0 | 6.0 | 2.0 |
| VQLS (microarray) | 0.2 | 1.0 | 3.9 | 5.0 | 6.0 | 2.0 |
| VQLS (microarray) | 0.5 | 1.0 | 3.9 | 4.8 | 5.8 | 2.5 |
| VQLS (microarray) | 1.0 | 1.0 | 3.9 | 4.4 | 5.3 | 3.3 |
| VQLS (microarray) | 2.0 | 1.1 | 4.0 | 4.2 | 4.7 | 3.7 |
| VQLS (microarray) | 5.0 | 1.6 | 3.9 | 4.0 | 4.3 | 3.7 |
| VQLS (microarray) | 10.0 | 2.5 | 3.7 | 3.8 | 4.0 | 3.6 |

| | | Vmod |
|---|---|---|
| | | SG21RGP28-RGPmaxgreedysearch |
| Data type | Noise s.d. scaling factor | Rank aGg2 (no aGg34) average |
| RRCF (RT-PCR) | 0.1 | 3.0 |
| RRCF (RT-PCR) | 0.2 | 3.0 |
| RRCF (RT-PCR) | 0.5 | 2.8 |
| RRCF (RT-PCR) | 1.0 | 3.0 |
| RRCF (RT-PCR) | 2.0 | 3.4 |
| RRCF (RT-PCR) | 5.0 | 3.6 |
| RRCF (RT-PCR) | 10.0 | 3.5 |
| VQLS (microarray) | 0.1 | 3.0 |
| VQLS (microarray) | 0.2 | 3.1 |
| VQLS (microarray) | 0.5 | 3.0 |
| VQLS (microarray) | 1.0 | 3.1 |
| VQLS (microarray) | 2.0 | 3.4 |
| VQLS (microarray) | 5.0 | 3.5 |
| VQLS (microarray) | 10.0 | 3.5 |

### Example 19

[0515] This example includes a discussion of considering multiple options of gene and voting model selection with potential for high outcome predictive performance and high likelihood of validation.

[0516] Any GVHD outcome predictive single classifier or voter, independent of how the gene expression data, RT-PCR or microarray based, was processed at the single gene, gene pair, or integrated voting model level (e.g., RL2F, RRCF, VQLS, SG, RGP, GNOS, etc.) results in a continuous classifier level (CL), for each sample to be classified. When the CL average for the Gneg samples is higher than for the Gpos samples, the classifier is considered N-directional, or N_{d} (N for GVHD negative). When the CL average for the Gpos samples is higher than for the Gneg samples, the classifier is considered P-directional, or P_{d} (P for GVHD positive). The midpoint between the respective CL averages for the Gneg samples and Gpos samples is defined as the separatrix for each CL. For N_{d} classifiers, when the CL is higher than or equal to the separatrix, a GVHD N vote is cast, represented by the value 1; otherwise the vote value is set to 0. For P_{d} classifiers, when the CL is lower than the separatrix, a GVHD N vote is cast, represented by the value 1; otherwise the vote value is set to 0.

[0517] The GVHD N outcome votes of any set of classifiers, from very many potential combinations of the classifiers listed above, can be integrated into a voting model (Vmod). The voting models, as described herein, simply form the average of the GVHD N votes, which is called the GNOS (GVHD Negative Outcome Score). However, voters and classifiers can be integrated using other approaches that would lead to dependable GVHD outcome prediction (see below, “Alternatives for multivariate outcome predictive models”). Because the GNOS is defined herein solely on “GVHD N” votes being set to 1, and “not-GVHD N” votes being set to 0, the GNOS-based classifiers are always N-directional. Also, when determining the final GVHD outcome classification of a sample according to its GNOS, often an N-voting threshold (e.g., 55% for the best-performing SG43RGP36-RGPgreedysearch), other than the separatrix, is selectively imposed according to desired GVHD outcome prediction performance goals.

[0518] Directionalities of GVHD Outcome Predictive Classifiers:

[0519] In general, using the genes in Table 13 (RNA175), or from Table 2B (RNA192 list) (note that all the Table 13 RNA175 genes are also listed in the Table 2B RNA192 list), or from the RNA1546 or RNA1538 lists (note that not all the RNA175 genes in Table 13 are listed in the RNA1546 or RNA1538 lists), multiple, almost unlimited (based on different combinatorial subsets of ratiometric gene pairs as shown above and in general, or gene pairs in general, or directly using SGs as classifiers, as reflected in, e.g., RL2F, RRCF, VQLS, SG, RGP, etc. data), Vmods for successful GVHD outcome prediction may be generated, and many validated, freely allowing for different combinations of N_{d} and P_{d} classifiers, i.e.,

[0520] (1) mixed N_{d} and P_{d} classifiers, with varying relative representations of N_{d} and P_{d} classifiers, or

[0521] (2) only using P_{d} classifiers, or

[0522] (3) only using N_{d} classifiers.

[0523] With respect to RGP Vmods, i.e., ratiometric gene pair voting models, based on relative SG measurements (whether using RT-PCR or microarray data), for the outcome predictive signal (X/Y or equivalent log [X/Y] or log X−log Y) to be usefully assayed in-lab at the gene pair level (in addition to the inherent self-calibrating properties of RGPs), in a vast majority of cases the directionality of the RGP member genes should be opposite, i.e., when gene X is N_{d}, then gene Y should be P_{d}, and when gene X is P_{d}, then gene Y should be N_{d}. This follows the interpretative biological reasoning that only when the “activator pathway” activity of gene X is higher relative to the “inhibitor pathway” activity of gene Y (and vice-versa), the biological response (e.g., due to relative pathway activation being sufficient) occurs.

[0524] In addition, there may be cases of layered competitive pathways, e.g., pathways X and Y may both be elevated in the absolute sense for the biological response, but, nevertheless, pathway X must be more elevated relative to pathway Y for the full biological response to take place. Thus, occasionally, for RGP-based outcome prediction, gene X-Y, P_{d}-P_{d} or N_{d}-N_{d} pairs may occur, i.e., when P_{d} and N_{d} directionality is defined at the SG level for relative quantitation RTPCR or microarray data. However, overall, the RGPs contributing to RGP voting models should be fairly evenly balanced with respect to numbers of SGs having P_{d} or N_{d} status at the SG level (for relatively quantified gene expression data).

[0525] However, with respect to RGP Vmods based on RL2F absolute SG measurements, because the vast majority of RL2F genes are biased toward P-directionality (see above), mostly RGP X-Y, P_{d}-P_{d} pairs would be used as outcome predictive classifiers to go into the Vmods. Again, effective RGP values as such are not dependent, though, on whether RRCF or RL2F data are used as input.

[0526] With respect to Vmods using SGs as constituent classifiers, according to basic principles, no favored SG P- or N-directionalities are required for Vmods to be effective, especially when using relative quantitation of gene expression data, e.g., in the form of RRCF. Also note that the SGs in Table 13 (RNA175; as determined from RRCF and VQLS data are relatively evenly balanced with respect to directionality (see also Table 30).

[0527] However, as discussed above, when using absolute as opposed to relative RT-PCR quantitation RL2F data for GVHD outcome prediction, there is a dominating natural inherent bias towards prevalence of P-directional genes in SG ability for GVHD outcome prediction (according to the biological trends displayed in the data). Thus, at the level of absolute quantitation, RL2F-based GVHD outcome prediction, any potential well-performing voting models (which have not been explicitly listed), would most likely be based on a vast majority of P-directional SGs at the RL2F level. Such integrated P_{d} directional SG Vmods based on absolute RT-PCR quantitation might be very effective at GVHD outcome prediction, and possibly developed as a GVHD outcome prediction test. However, given the current practice in diagnostic applications of RT-PCR, in which absolute quantitation is not considered today to be a dependable assay for human diagnostics, SG Vmods based on absolute RT-PCR quantitation are not a present priority for development. However, such models may become a priority for development in the future.

### Example 20

[0528] This example includes a discussion of alternatives to the exemplified Vmods disclosed herein for multivariate outcome predictive models.

[0529] Note that aggregating and averaging a select set of individual RGP votes into a GNOS value is one of the most straightforward ways to efficiently, pragmatically, robustly, and transparently use the information in individual mRNA measurement levels of multiple genes to provide a GVHD N outcome score. However, many alternative methods (generally referred to as classifiers) exist to generate multivariate predictive models, in addition to multi-RGP Vmods. Such alternative classifiers (Richard O. Duda, Peter E. Hart, & David G. Stork, Pattern Classification, Second Edition, John Wiley & Sons, Inc, NY, 2001) include those built on weighted averages of individual variables, weighted averages of pair-wise combinations of variables, or weighted averages of multivariate combinations of variables, linear or non-linear, such as could be implemented in LDA (linear discriminant analysis), QDA (quadratic linear discriminant analysis), Decision Trees, SVMs (support vector machines), k-nearest neighbors, Neural Networks, etc., or various implementations of generalized multivariate linear and nonlinear models, with varying degrees of freedom, coupled with judicious search and optimization algorithms (e.g., classical optimization algorithms or derivative-free algorithms such as so-called genetic algorithms) Such alternative methods may be used to derive GNOS values from the lists of SGs, RGPs and PRGPs, listed herein. However, depending on the comparative complexity and degrees of freedom of such models, more observational combined donor gene expression measurement and associated recipient GVHD clinical outcome data samples may be required to provide adequate statistical support of such alternative, more complex implementations of classifiers.

What is claimed:

1. A method for predicting or determining the risk of a hematopoietic cell transplant (HCT) from a candidate donor to induce or not to induce graft vs. host disease (GVHD) in a HCT recipient, comprising:
a) measuring expression of one or more positive or negative GVHD predictor genes, or a combination of positive and/or negative GVHD predictor genes, selected from Tables 1 (RNA 1538), 2, 2A (RNA 143), 2B (RNA 192), 3, 13 (SG175), 15 (SG128) or 18 (SG64), or a polymorphism thereof, in CD4+ T cells or CD8+ T cells from a candidate donor;
b) obtaining an expression value for the positive or negative GVHD predictor genes based upon the expression measured in a), or obtaining linear or non-linear combinations of expression values for the combination of positive and/or negative GVHD predictor genes based upon the expression measured in a);
c) comparing the expression value for the positive or negative GVHD predictor gene to a predefined reference expression value for the positive or negative GVHD predictor gene, or comparing the linear or non-linear combinations of expression values for the combination of positive and/or negative GVHD predictor genes to predefined reference values for the linear or non-linear combinations of the positive and/or negative GVHD predictor genes;
wherein an expression value for the positive GVHD predictor gene greater or less than the predefined reference expression value for the positive GVHD predictor gene indicates that the HCT from the candidate donor is at higher or lower risk, respectively, of inducing GVHD in a HCT recipient, or
wherein an expression value for the negative GVHD predictor gene greater or less than the reference expression value for the negative GVHD predictor gene indicates that the HCT from the candidate donor is at lower or higher risk, respectively, of inducing GVHD in a HCT recipient, or
wherein a linear or non-linear combination of expression values for the combination of positive and/or negative GVHD predictor genes greater or less than the predefined reference value indicates that the HCT from the candidate donor is at higher or lower risk, respectively, of inducing GVHD in a HCT recipient; or
wherein a linear or non-linear combination of expression values for the combination of positive and/or negative GVHD predictor genes greater or less than the predefined reference value indicates that the HCT from the candidate donor is at lower or higher risk, respectively, of inducing GVHD in a HCT recipient, and
d) predicting or determining the risk of the HCT from the candidate donor to induce or to not induce GVHD in an HCT recipient, based upon an evaluation of expression values, total numbers or identity of positive or negative GVHD predictor genes, or the combination of positive and/or negative GVHD predictor genes, that indicate that the HCT from the candidate donor is at higher or lower risk of inducing GVHD in a HCT recipient.

2. A method for predicting or determining the risk of a HCT from a candidate donor to induce or not to induce graft vs. host disease (GVHD) in a HCT recipient, comprising:
a) contacting CD4+ T cells or CD8+ T cells, or nucleic acid or protein expressed by CD4+ T cells or CD8+ T cells, from a candidate donor with an analyte that detects expression of one or more positive or negative GVHD predictor genes listed in Tables 1 (RNA 1538), 2, 2A (RNA 143), 2B (RNA 192), 3, 13 (SG175), 15 (SG128) or 18 (SG64), or a polymorphism thereof;
b) measuring expression of the one or more positive or negative GVHD predictor genes in CD4+ T cells or CD8+ T cells to obtain an expression value for the positive or negative GVHD predictor genes, or measuring expression of a combination of the positive and/or negative predictor genes to obtain linear or non-linear combinations of expression values for the combination of positive and/or negative GVHD predictor genes;
c) comparing the expression value for the positive or negative GVHD predictor gene to a predefined reference expression value for the positive or negative GVHD predictor gene, or comparing the linear or non-linear combinations of expression values of the combination of positive and/or negative GVHD predictor genes to a predefined reference value for the linear or non-linear combinations of expression values of the combination of positive and/or negative GVHD predictor genes;
wherein an expression value for the positive GVHD predictor gene greater or less than the predefined reference expression value for the positive GVHD predictor gene indicates that the HCT from the candidate donor is at higher or lower risk, respectively, of inducing GVHD in a HCT recipient,
wherein an expression value for the negative GVHD predictor gene greater or less than the reference expression value for the negative GVHD predictor gene indicates that the HCT from the candidate donor is at lower or higher risk, respectively, of inducing GVHD in a HCT recipient, or
wherein a linear or non-linear combination of expression values for the combination of positive and/or negative GVHD predictor genes greater or less than the predefined reference value indicates that the HCT from the candidate donor is at higher or lower risk, respectively, of inducing GVHD in a HCT recipient,
wherein a linear or non-linear combination of expression values for the combination of positive and/or negative GVHD predictor genes greater or less than the predefined reference value indicates that the HCT from the candidate donor is at lower or higher risk, respectively, of inducing GVHD in a HCT recipient, and
d) predicting or determining the risk of the HCT from the candidate donor to induce or to not induce GVHD in a HCT recipient, based upon an evaluation of expression values, total numbers or identity of positive or negative GVHD predictor genes, or combination of positive and/or negative GVHD predictor genes, that indicate that the HCT from the candidate donor is at higher or lower risk of inducing GVHD in a HCT recipient.

3. A method for classifying a hematopoietic cell transplant (HCT) from a candidate donor for risk of inducing graft vs. host disease (GVHD) in a HCT recipient, comprising:
a) measuring expression of a plurality of positive or negative GVHD predictor genes selected from a gene listed in Tables 1 (RNA 1538), 2, 2A (RNA 143), 2B (RNA 192), 3, 13 (SG175), 15 (SG128) or 18 (SG64), or a polymorphism thereof, in CD4+ T cells or CD8+ T cells from the candidate HCT donor
b) obtaining an expression value for the positive or negative GVHD predictor genes based upon the expression measured in a), or obtaining linear or non-linear combinations of expression values for the combination of positive and/or negative GVHD predictor genes based upon the expression measured in a);
c) comparing the expression value for the positive or negative GVHD predictor gene to a predefined reference expression value for the positive or negative GVHD predictor gene, or comparing the linear or non-linear combinations of expression values for the combination of positive and/or negative GVHD predictor genes to predefined reference values for the linear or non-linear combinations of the positive and/or negative GVHD predictor genes;
wherein an expression value for the positive GVHD predictor gene greater or less than the predefined reference expression value for the positive GVHD predictor gene indicates that the HCT from the candidate donor is at higher or lower risk, respectively, of inducing GVHD in a HCT recipient, or
wherein an expression value for the negative GVHD predictor gene greater or less than the reference expression value for the negative GVHD predictor gene indicates that the HCT from the candidate donor is at lower or higher risk, respectively, of inducing GVHD in a HCT recipient, or
wherein a linear or non-linear combination of expression values for the combination of positive and/or negative GVHD predictor genes greater or less than the predefined reference value indicates that the HCT from the candidate donor is at higher or lower risk, respectively, of inducing GVHD in a HCT recipient; or
wherein a linear or non-linear combination of expression values for the combination of positive and/or negative GVHD predictor genes greater or less than the predefined reference value indicates that the HCT from the candidate donor is at lower or higher risk, respectively, of inducing GVHD in a HCT recipient; and
d) classifying the candidate donor HCT for risk of inducing or not inducing GVHD based upon an evaluation of expression values, total numbers or identity of positive or negative GVHD predictor genes, or combination of positive and/or negative GVHD predictor genes, that indicate that the HCT from the candidate donor is at higher or lower risk of inducing GVHD in a HCT recipient.

4. A method of producing a database or organizational construct comprising a plurality of actual or candidate HCT donors each assigned a score based upon the probability or degree of risk of the actual or candidate donor HCT to induce or not to induce graft vs. host disease (GVHD) in a HCT recipient, comprising:
a) measuring expression of one or more positive or negative GVHD predictor genes listed in Tables 1 (RNA 1538), 2, 2A (RNA 143), 2B (RNA 192), 3, 13 (SG175), 15 (SG128) or 18 (SG64), or a polymorphism thereof, in CD4+ T cells or CD8+ T cells from an actual or a candidate donor;
b) obtaining an expression value for the positive or negative GVHD predictor genes based upon the expression measured in a), or obtaining linear or non-linear combinations of expression values for the combination of positive and/or negative GVHD predictor genes based upon the expression measured in a);
c) comparing the expression value for the positive or negative GVHD predictor gene to a predefined reference expression value for the positive or negative GVHD predictor gene, or comparing the linear or non-linear combinations of expression values for the combination of positive and/or negative GVHD predictor genes to predefined reference values for the linear or non-linear combinations of the positive and/or negative GVHD predictor genes;
wherein an expression value for the positive GVHD predictor gene greater or less than the predefined reference expression value for the positive GVHD predictor gene indicates that the HCT from the candidate donor is at higher or lower risk, respectively, of inducing GVHD in a HCT recipient, or
wherein an expression value for the negative GVHD predictor gene greater or less than the reference expression value for the negative GVHD predictor gene indicates that the HCT from the candidate donor is at lower or higher risk, respectively, of inducing GVHD in a HCT recipient, or
wherein a linear or non-linear combination of expression values for the combination of positive and/or negative GVHD predictor genes greater or less than the predefined reference value indicates that the HCT from the candidate donor is at higher or lower risk, respectively, of inducing GVHD in a HCT recipient; or
wherein a linear or non-linear combination of expression values for the combination of positive and/or negative GVHD predictor genes greater or less than the predefined reference value indicates that the HCT from the candidate donor is at lower or higher risk, respectively, of inducing GVHD in a HCT recipient;
d) assigning a score based upon an evaluation of expression values, total numbers or identity of positive or negative GVHD predictor genes, or combination of positive and/or negative GVHD predictor genes, that indicate that the HCT from the candidate donor is at higher or lower risk of inducing GVHD in a HCT recipient, wherein the score reflects the probability or degree of risk of the actual or candidate donor HCT to induce GVHD in a HCT recipient,
e) recording or storing the score of the actual or candidate HCT donor; and
f) repeating steps a), b), c), d) and e) for one or more additional actual or candidate HCT donors,
thereby producing a database or organizational construct comprising actual or candidate HCT donors each assigned a score based upon the probability or degree of risk of the actual or candidate donor HCT to induce or to not induce graft vs. host disease (GVHD) in a HCT recipient.

5. The method of any of claim 1, 2 or 4, comprising measuring expression of a plurality of positive or negative predictor genes to obtain expression values for the plurality of positive or negative predictor genes, and comparing the expression value for the positive or negative predictor genes to a predefined reference expression value for the respective positive or negative predictor genes.

6. The method of any of claims 1 to 4, wherein the positive or negative predictor gene is selected from one or more positive or negative predictor genes listed in Tables 2A (RNA 143), 2B (RNA 192), 3, 13 (SG175), 15 (SG128), or 18 (SG64), or a polymorphism thereof.

7. The method of claim 6, wherein the plurality of positive or negative predictor genes measured is 3, 4, 5, 6, 7, 8, 9, 10, 11, 12, 13, 14, 15, 16, 17, 18, 19, 20, 21, 22, 23, 24, 25, 26, 27, 28, 29, 30, 31, 32, 33, 34, 35, 36, 37, 38, 39, 40, 41, 42, 43, 44, 45, 46, 47, 48, 49, 50, or more positive or negative predictor genes.

8. The method of any of claims 1 to 4, wherein an expression value for the positive predictor gene greater than the predefined reference expression value for the positive predictor gene correlates with expression of the positive predictor gene in one or more HCT donors known to induce GVHD.

9. The method of any of claims 1 to 4, wherein an expression value for the negative predictor gene greater than the predefined reference expression value for the negative predictor gene correlates with expression of the negative predictor gene in one or more HCT donors known not to induce GVHD.

10. The method of any of claims 1 to 4, wherein the predefined reference expression value for the positive predictor gene is midway between an average or median expression level of the positive predictor gene from two or more HCT donors that induce GVHD and two or more HCT donors that do not induce GVHD.

11. The method of any of claims 1 to 4, wherein the predefined reference expression value for the negative predictor gene is midway between an average or median expression level of the negative predictor genes from two or more HCT donors that induce GVHD and two or more HCT donors that do not induce GVHD.

12. The method of any of claims 1 to 4, wherein the predefined reference expression value for the positive or negative predictor gene is midway between an average or median expression level of the positive or negative predictor genes from at least 5 HCT donors that induce GVHD and at least 5 HCT donors that do not induce GVHD.

13. The method of any of claims 1 to 4, wherein the predefined reference expression value for the positive predictor gene is midway between a median or average expression of the gene from multiple HCT donors known to induce GVHD, and a median or average expression of the gene from multiple HCT donors known not to induce GVHD.

14. The method of any of claims 1 to 4, wherein the predefined reference expression value for the negative predictor gene is midway between the median or average expression of the gene from multiple HCT donors known to induce GVHD, and the median or average expression of the gene from multiple HCT donors known not to induce GVHD.

15. The method of any of claims 1 to 4, wherein the predefined reference expression value for the positive predictor gene is a midway value, midway between the expression level of the positive predictor gene from one or more donors that induce GVHD and the expression level of the positive predictor gene from one or more donors that do not induce GVHD, and wherein the expression value for the positive predictor gene greater than the midway value indicates that the HCT from the candidate donor is at higher risk of inducing graft vs. host disease (GVHD).

16. The method of any of claims 1 to 4, wherein the predefined reference expression value for the negative predictor gene is a midway value, midway between the expression level of the negative predictor gene from one or more donors that do not induce GVHD and the expression level of the negative predictor gene from one or more donors that induce GVHD, and wherein the expression value for the negative predictor gene greater than the midway value indicates that the HCT from the candidate donor is at lower risk of inducing graft vs. host disease (GVHD).

17. The method of any of claims 10 to 16, wherein the midway value is assigned a value of 0.5, and an expression value for the one or more negative predictor genes greater than 0.5 indicates that the HCT from the candidate donor is at lower risk of inducing graft vs. host disease (GVHD).

18. The method of any of claims 10 to 16, wherein the midway value is assigned a value of 0.5, and an expression value for the one or more negative predictor genes of 0.55 or greater indicates that the HCT from the candidate donor is at lower risk of inducing graft vs. host disease (GVHD).

19. The method of any of claims 10 to 16, wherein the midway value is assigned a value of 0.5, and an expression value for the one or more negative predictor genes of 0.60 or greater indicates that the HCT from the candidate donor is at lower risk of inducing graft vs. host disease (GVHD).

20. The method of any of claims 10 to 16, wherein the midway value is assigned a value of 0.5, and an expression value for the one or more positive predictor genes greater than 0.5 indicates that the HCT from the candidate donor is at higher risk of inducing graft vs. host disease (GVHD).

21. The method of any of claims 10 to 16, wherein the midway value is assigned a value of 0.5, and an expression value for the one or more positive predictor genes of 0.55 or greater indicates that the HCT from the candidate donor is at higher risk of inducing graft vs. host disease (GVHD).

22. The method of any of claims 10 to 16, wherein the midway value is assigned a value of 0.5, and an expression value for the one or more positive predictor genes of 0.60 or greater indicates that the HCT from the candidate donor is at higher risk of inducing graft vs. host disease (GVHD).

23. The method of any of claims 1 to 4, wherein the predefined reference expression value for the positive or negative predictor genes is a value determined by discriminant analysis of gene expression in HCT donors known to induce GVHD and HCT donors known not to induce GVHD.

24. The method of any of claims 1 to 4, wherein the expression value obtained for the positive or negative predictor genes is adjusted or normalized relative to expression of one or more reference genes prior to comparing the expression value of the positive or negative predictor gene to the predefined reference expression value for the positive or negative predictor gene.

25. The method of any of claims 1 to 4, wherein the expression value is represented by a ratio of gene expression, denoted a ratiometric gene pair (RGP), of the positive or negative predictor gene to one or more reference genes.

26. The method of any of claims 1 to 4, wherein the expression value is represented by a ratio of gene expression, denoted a ratiometric gene pair (RGP), of the positive or negative predictor gene to a reference gene, and is represented by the formula “N/D,” wherein “N” is the expression level of the positive or negative predictor gene, and “D” is the expression level of one or more reference genes.

27. The method of claim 26, wherein the numerator value N or denominator value D reflect an average or median expression of one or more positive or negative predictor genes, or one or more reference genes, respectively.

28. The method of any of claims 1 to 4, wherein the expression value is represented by a ratio of gene expression, denoted a ratiometric gene pair (RGP), of the positive or negative predictor gene to a reference gene, and expression of the positive or negative predictor gene, when expressed in log, is represented by the formula “logₙX−logₙY,” wherein “X” is the expression level of the positive or negative predictor gene, “Y” is the expression level of the reference gene, and “n” is 2, 10, e (base of natural log) or any positive real number.

29. The method of claim 25, 26 or 28, wherein at least one of the genes comprising the ratiometric gene pair (RGP) are listed in Tables 2A (RNA 143), 2B (RNA 192), 3, 13 (SG175), 15 (SG128), or 18 (SG64), or a polymorphism thereof.

30. The method of claim 24, 25, 26 or 28, wherein the reference gene comprises a positive or negative predictor gene that is different from the positive or negative predictor gene used to obtain the ratio of gene expression.

31. The method of claim 25, 26 or 28, wherein at least one of the ratiometric gene pairs (RGPs) is selected from the RGPs set forth in Table 14 (RGP348).

32. The method of claim 25, 26 or 28, wherein the number of gene expression ratios measured is 2, 3, 4, 5, 6, 7, 8, 9, 10, 11, 12, 13, 14, 15, 16, 17, 18, 19, 20, 21, 22, 23, 24, 25, 26, 27, 28, 29, 30, 31, 32, 33, 34, 35, 36, 37, 38, 39, 40, 41, 42, 43, 44, 45, 46, 47, 48, 49, 50, or more gene expression ratios.

33. The method of any of claim 25, 26 or 28, wherein at least one of the positive or negative predictor genes that comprise the ratio are selected from one or more single genes (SGs) set forth in Tables 13 (SG175), 15 (SG128) or 18 (SG64), or are selected from ratiometric gene pairs (RGPs) set forth in Table 14 (RGP348).

34. The method of any of claim 24, 25, 26 or 28, wherein the reference gene comprises a gene whose expression is constitutive and at a relatively consistent level in CD4+ T cells or CD8+ T cells, a housekeeping gene, or a positive or negative predictor gene whose expression is not used to determine the numerator value.

35. The method of claim 34, wherein the housekeeping gene is selected from: beta actin (ACTB), aldolase A (ALDOA), lactate dehydrogenase A (LDHA), phosphoglycerate kinase 1 (PGK1), transferrin receptor (TFRC), tubulin beta (TUBB), tubulin beta 2A (TUBB2A), thioredoxin (TXN), ubiquitin C (UBC), ubiquitin-activating enzyme E1 (UBE1), a sequence in Table 2B (RNA 192, denoted HSK, SEQ ID NOs:1690-1738), or a sequence in Table 12 (HSK list).

36. The method of any of claims 1 to 4, wherein the positive or negative predictor gene is selected from Tables 13 (SG175), 15 (SG128) or 18 (SG64).

37. The method of any of claims 1 to 4, comprising a plurality of positive or negative predictor genes selected from Tables 13 (SG175), 15 (SG128) or 18 (SG64), or a plurality of ratiometric gene pairs (RGPs) selected from the RGPs set forth in Table 14 (RGP348).

38. The method of any of claims 1 to 4, comprising a plurality of positive and negative predictor genes selected from Tables 13 (SG175), 15 (SG128) or 18 (SG64), and a plurality of ratiometric gene pairs (RGPs) selected from the RGPs set forth in Table 14 (RGP348).

39. The method of any of claims 1 to 3, further comprising assigning a score based upon the expression value(s) for the positive or negative predictor gene(s), wherein the score reflects the probability or degree of risk of the candidate donor HCT to induce or not induce graft vs. host disease (GVHD) in a HCT recipient.

40. The method of any of claims 1 to 3, wherein a plurality of expression values for negative or positive predictor genes are determined, a vote is assigned to each negative or positive predictor gene according to whether the expression value for the gene indicates the risk of the candidate or actual donor to induce or not to induce GVHD, and a score is assigned to the candidate or actual donor based upon the total number of votes indicative or not indicative of inducing or not inducing GVHD, wherein the score reflects the risk of the hematopoietic cell transplant (HCT) from the candidate or actual donor to induce or not to induce GVHD in a HCT recipient.

41. The method of claim 40, wherein if more than 50% of the votes are indicative of inducing GVHD, then the score reflects an increased risk of the hematopoietic cell transplant (HCT) from the candidate or actual donor to induce GVHD in a HCT recipient.

42. The method of claim 40, wherein if more than 50% of the votes are indicative of not inducing GVHD, then the score reflects a decreased risk of the hematopoietic cell transplant (HCT) from the candidate or actual donor to induce GVHD in a HCT recipient.

43. The method of claim 40, wherein if at least 55%, 60%, 65%, 70%, 75%, 80%, 85%, 90%, 95%, or more of the votes are indicative of inducing GVHD, then the score reflects a increased risk of the hematopoietic cell transplant (HCT) from the candidate or actual donor to induce GVHD in a HCT recipient; or wherein if at least 55%, 60%, 65%, 70%, 75%, 80%, 85%, 90%, 95%, or more of the votes are indicative of not inducing GVHD, then the score reflects a decreased risk of the hematopoietic cell transplant (HCT) from the candidate or actual donor to induce GVHD in a HCT recipient.

44. The method of any of claims 1 to 3, wherein the number of positive or negative predictor genes, or the combination of positive and/or negative GVHD predictor genes, indicating that the HCT from the candidate donor is at higher risk of inducing GVHD is greater than the number of positive or negative predictor genes, or the combination of positive and/or negative GVHD predictor genes, indicating that the HCT from the candidate donor is at lower risk of inducing GVHD in a HCT recipient, predicts or determines a higher risk of the HCT from a candidate donor to induce GVHD in an HCT recipient.

45. The method of any of claims 1 to 3, wherein the number of positive or negative predictor genes, or the combination of positive and/or negative GVHD predictor genes, indicating that the HCT from the candidate donor is at lower risk of inducing GVHD is greater than the number of positive or negative predictor genes, or the combination of positive and/or negative GVHD predictor genes, indicating that the HCT from the candidate donor is at higher risk of inducing GVHD in a HCT recipient, predicts or determines a lower risk of the HCT from a candidate donor to induce GVHD in an HCT recipient.

46. The method of any of claims 1 to 4, wherein the negative and positive predictor genes used to predict or determine risk that a hematopoietic cell transplant (HCT) from a candidate donor will induce or not induce graft vs. host disease (GVHD) in a HCT recipient comprises one or more genes set forth in Table 18 (VmodSG64).

47. The method of any of claims 1 to 4, wherein the negative and positive predictor genes comprise a plurality of ratiometric gene pairs (RGPs) of two or more genes set forth in Tables 1 (RNA 1538), 2, 2A (RNA 143), 2B (RNA 192), 3, 13 (SG175), 15 (SG128) or 18 (SG64).

48. The method of claim 45, wherein the ratiometric gene pairs (RGPs) used to predict or determine risk that a hematopoietic cell transplant (HCT) from a candidate donor will induce or not induce graft vs. host disease (GVHD) in a HCT recipient comprise one or more gene pairs (RGPs) set forth in Table 17 (VmodRGP100).

49. The method of any of claims 1 to 4, wherein the negative and positive predictor genes comprise a combination of single genes (SGs) and ratiometric gene pairs (RGPs) used to predict or determine risk that a hematopoietic cell transplant (HCT) from a candidate donor will induce or not induce graft vs. host disease (GVHD) in a HCT recipient, wherein the combination comprises a plurality of genes selected from the single genes (SGs) listed in Table 18 (VmodSG64) and a plurality of ratiometric gene pairs (RGPs) selected from the RGPs listed in Table 17 (VmodRGP100).

50. The method of claim 49, wherein the combination of single genes (SGs) and ratiometric gene pairs (RGPs) is as set forth in: SG43RGP46-GPperformance; SG42RGP21-GPminimalist; SG43RGP37-GPconnectivity; SG43RGP51-PRGPminranksort; SG43RGP55-PRGPmedranksort; SG43RGP36-RGPgreedysearch; or SG21RGP28-RGPmaxgreedysearch, each of which combinations include the SGs and RGPs indicated by an “x” in Tables 17 and 18.

51. The method of any of claims 1 to 4, wherein the candidate donor and HCT recipient have 10 out of 10, or 9 out of 10, human leukocyte antigen (HLA) marker loci matches.

52. The method of any of claims 1 to 4, wherein the candidate donor and HCT recipient have HLA marker loci matches of all of: HLA-A, HLA-B, HLA-C, HLA-DRB1 and HLA-DQB1 loci, or have HLA marker loci matches of any four of: HLA-A, HLA-B, HLA-C, HLA-DRB1 or HLA-DQB1 loci.

53. The method of claim 51 or 52, wherein the HLA marker loci matches are determined serologically or by sequence analysis of HLA genes.

54. The method of any of claims 1 to 4, wherein the candidate donor and HCT recipient are not siblings or are not familially related.

55. The method of any of claims 1 to 4, wherein the candidate donor and HCT recipient are siblings or are familially related.

56. The method of any of any of claims 1 to 4, wherein the method is superior to identifying a GVHD negative donor based upon having 10 out of 10 or 9 out of 10 HLA marker loci matches with a HCT recipient.

57. The method of any of any of claims 1 to 4, wherein the method predicts GVHD negative donor HCT with an accuracy of at least 60%.

58. The method of any of claims 1 to 4, wherein the method predicts GVHD negative donor HCT with an accuracy of at least 70%.

59. The method of any of claims 1 to 4, wherein the method predicts GVHD negative donor HCT with an accuracy of at least 80%.

60. The method of any of claims 57 to 59, wherein the accuracy of predicting a GVHD negative donor is the probability or degree of risk of correctly identifying a GVHD negative donor within a group of candidate HCT donors classified as negative by 10 out of 10 HLA marker loci matches with an HCT recipient.

61. The method of any of claims 1 to 4, wherein the method predicts GVHD positive donor HCT with an accuracy of at least 60%.

62. The method of any of claims 1 to 4, wherein the method predicts GVHD positive donor HCT with an accuracy of at least 70%.

63. The method of any of claims 1 to 4, wherein the method predicts GVHD positive donor HCT with an accuracy of at least 80%.

64. The method of any of claims 1 to 4, wherein a threshold number of the positive or negative predictor genes must indicate a high risk of inducing graft vs. host disease (GVHD) in a HCT recipient to predict or determine that the candidate donor HCT is at high risk to induce graft vs. host disease (GVHD) in a HCT recipient.

65. The method of any of claims 1 to 4, wherein a threshold number of the positive or negative predictor genes must indicate a low risk of inducing graft vs. host disease (GVHD) in a HCT recipient to predict or determine that the candidate donor HCT is at low risk to induce graft vs. host disease (GVHD) in a HCT recipient.

66. The method of claim 64 or 65, further comprising assigning a score based upon the number of positive or negative predictor genes that indicate a high or a low risk of donor HCT inducing graft vs. host disease (GVHD) in a HCT recipient, wherein the score reflects the probability or degree of risk of the candidate donor HCT to induce graft vs. host disease (GVHD) in a HCT recipient.

67. The method of any of claims 1 to 4, wherein a majority of the positive or negative predictor genes must indicate a high risk of inducing graft vs. host disease (GVHD) in a HCT recipient to predict or determine that the candidate donor HCT is at high risk to induce graft vs. host disease (GVHD) in a HCT recipient.

68. The method of any of claims 1 to 4, wherein a majority of the positive or negative predictor genes must indicate a low risk of inducing graft vs. host disease (GVHD) in a HCT recipient to predict or determine that the candidate donor HCT is at low risk to induce graft vs. host disease (GVHD) in a HCT recipient.

69. The method of any of claims 1 to 4, wherein at least 66% of the positive or negative predictor genes must indicate a high risk of inducing graft vs. host disease (GVHD) in a HCT recipient to predict or determine that the candidate donor HCT is at high risk to induce graft vs. host disease (GVHD) in a HCT recipient.

70. The method of any of claims 1 to 4, wherein at least 66% of the positive or negative predictor genes must indicate a low risk of inducing graft vs. host disease (GVHD) in a HCT recipient to predict or determine that the candidate donor HCT is at low risk to induce graft vs. host disease (GVHD) in a HCT recipient.

71. The method of any of claims 1 to 4, wherein at least 75% of the positive or negative predictor genes must indicate a low risk of inducing graft vs. host disease (GVHD) in a HCT recipient to predict or determine that the candidate donor HCT is at low risk to induce graft vs. host disease (GVHD) in a HCT recipient.

72. The method of claim 2, wherein the analyte comprises a primer pair, an oligo- or poly-nucleotide probe, or an antibody or antigen binding fragment thereof.

73. The method of any of claims 1 to 4, wherein the measuring comprises hybridization with an oligo- or poly-nucleotide probe to RNA transcript produced from one of the positive or negative predictor genes, or a polymorphism thereof, or a cDNA derived from the RNA transcript of the positive or negative predictor gene, or a polymorphism thereof.

74. The method of any of claims 1 to 4, wherein the measuring comprises hybridization with an oligo- or poly-nucleotide probe or primer that hybridizes to a transcription product of a gene set forth in Tables 1 (RNA 1538), 2, 2A (RNA 143), 2B (RNA 192), 3, 13 (SG175), 15 (SG128) or 18 (SG64).

75. The method of any of claims 1 to 4, wherein the measuring comprises hybridization with an oligo- or poly-nucleotide probe or primer set forth in Tables 1 (RNA 1538), 2, 2A (RNA 143), 2B (RNA 192), 3, 13 (SG175), 15 (SG128) or 18 (SG64).

76. The method of any of claims 1 to 4, wherein the measuring comprises hybridization of a primer pair and subsequent amplification of a cDNA derived from the RNA transcript of the positive or negative predictor gene produced from the positive or negative predictor genes, or a polymorphism thereof.

77. The method of any of claims 1 to 4, wherein the primer pair is a pair set forth in sequence in Table 2B (RNA 192), or a primer pair that hybridizes to a transcript of a gene set forth in Tables 1 (RNA 1538), 2, 2A (RNA 143), 2B (RNA 192), 3, 13 (SG175), 15 (SG128) or 18 (SG64).

78. The method of any of claims 1 to 4, wherein the measuring comprises reverse transcription of RNA transcript to produce cDNA to determine expression levels of one or more positive or negative predictor genes.

79. The method of any of claims 1 to 4, wherein the CD4+ T cells or CD8+ T cells are from or are present in the candidate or actual donors' blood.

80. The method of any of claims 1 to 4, wherein the GVHD is classified as a group 1, 2, 3, 4, 5, or 6 class of GVHD.

81. The method of any of claims 1 to 4, wherein the GVHD is classified as acute grade I, II, III or IV GVHD, with or without chronic GVHD, or chronic GVHD without acute GVDH.

82. The method of any of claims 1 to 3, further comprising selecting a HCT donor at lower risk of inducing graft vs. host disease (GVHD) for a HCT recipient.

83. The method of any of claims 1 to 4, wherein the gene expression profile of candidate HCT or actual donors, or scores, or a risk profile of inducing or not inducing GVHD, are recorded or stored on a computer readable medium, electronic storage medium, or in a database or other organizational construct.

84. The method of any of claims 1 to 4, wherein candidate HCT donors with a low or a high risk to induce or to not induce graft vs. host disease (GVHD) are identified.

85. The method of any of claims 1 to 4, wherein the risk or scores of HCT from the candidate or actual donor to induce or not induce GVHD in a HCT recipient are recorded or stored on an electronic or computer readable medium.

86. The method of any of claims 1 to 4, further comprising creating a report of the risk or score of the HCT from the candidate donor to induce or to not induce graft vs. host disease (GVHD) in a HCT recipient.

87. The method of any of claims 1 to 4, wherein expression of the positive or negative predictor genes, or a housekeeping gene, is determined by RT-PCR.

88. A kit, comprising two or more primer pairs, wherein each primer pair is oppositely oriented to each other, wherein the first of the primer pairs hybridizes to RNA or cDNA produced from one of the positive or negative predictor genes and the second hybridizes to a housekeeping gene listed in Tables 1 (RNA 1538), 2, 2A, 2B (RNA 192), 3 and/or 12.

89. The kit of claim 88, comprising five or more primer pairs oppositely oriented to each other, wherein each of the five primer pairs hybridize to RNA or cDNA of the positive or negative predictor genes listed in Tables 1 (RNA 1538), 2, 2A (RNA 143), 2B (RNA 192), 3, 13 (SG175), 15 (SG128) or 18 (SG64), or a polymorphism thereof.

90. The kit of claim 88, comprising 10 or more primer pairs oppositely oriented to each other, wherein each of the 10 primer pairs hybridize to RNA or cDNA of the positive or negative predictor genes listed in Tables 1 (RNA 1538), 2, 2A (RNA 143), 2B (RNA 192), 3, 13 (SG175), 15 (SG128) or 18 (SG64), or a polymorphism thereof.

91. The kit of claim 88, comprising 20 or more primer pairs oppositely oriented to each other, wherein each of the 20 primer pairs hybridize to RNA or cDNA of the positive or negative predictor genes listed in Tables 1 (RNA 1538), 2, 2A (RNA 143), 2B (RNA 192), 3, 13 (SG175), 15 (SG128) or 18 (SG64), or a polymorphism thereof.

92. The kit of claim 88, further comprising a probe that hybridizes to a nucleic acid sequence amplified by one of the primer pairs.

93. The kit of claim 88, wherein each of the primer pairs are not affixed to a support or substrate.

94. A kit, comprising one or more nucleic acid probes, wherein said one or more probes hybridizes to RNA or cDNA of one or more of the positive or negative predictor genes listed in Tables 1 (RNA 1538), 2, 2A (RNA 143), 2B (RNA 192), 3, 13 (SG175), 15 (SG128) or 18 (SG64), or a polymorphism thereof.

95. The kit of claim 94, comprising five or more probes that hybridize to RNA or cDNA of five of the positive or negative predictor genes listed in Tables 1 (RNA 1538), 2, 2A (RNA 143), 2B (RNA 192), 3, 13 (SG175), 15 (SG128) or 18 (SG64), or a polymorphism thereof.

96. The kit of claim 94, comprising 10 or more probes that hybridize to RNA or cDNA of 10 of the positive or negative predictor genes listed in Tables 1 (RNA 1538), 2, 2A (RNA 143), 2B (RNA 192), 3, 13 (SG175), 15 (SG128) or 18 (SG64), or a polymorphism thereof.

97. The kit of claim 94, comprising 20 or more probes that hybridize to RNA or cDNA of 20 of the positive or negative predictor genes listed in Tables 1 (RNA 1538), 2, 2A (RNA 143), 2B (RNA 192), 3, 13 (SG175), 15 (SG128) or 18 (SG64), or a polymorphism thereof.

98. A database or organizational construct, comprising gene expression profiles of two or more positive or negative predictor genes from a plurality of actual or candidate HCT donors, wherein the two or more positive or negative predictor genes are listed in Tables 1 (RNA 1538), 2, 2A (RNA 143), 2B (RNA 192), 3, 13 (SG175), 15 (SG128) or 18 (SG64), or a polymorphism thereof, and wherein the database or organizational construct associates the gene expression profile with each of the actual or candidate HCT donors.

99. The database or organizational construct of claim 98, wherein the database comprises expression profiles of 3, 4, 5, 6, 7, 8, 9, 10, 11, 12, 13, 14, 15, 16, 17, 18, 19, 20, 21, 22, 23, 24, 25, 26, 27, 28, 29, 30, 31, 32, 33, 34, 35, 36, 37, 38, 39, 40, 41, 42, 43, 44, 45, 46, 47, 48, 49, 50, or more positive or negative predictor genes, and optionally one or more housekeeping genes.

100. The database or organizational construct of claim 98, wherein HCT from the actual or candidate donors at lower or higher risk of inducing graft vs. host disease (GVHD) in a HCT recipient are identified.

101. The database or organizational construct of claim 98, wherein expression of the positive or negative predictor genes is from a biological sample comprising actual or candidate donor CD4+ T cells or CD8+ T cells.

102. The database or organizational construct of claim 98, wherein the database is operatively linked to a processor, said processor comprising a data entry module or a data query module.

103. The database or organizational construct of claim 98, wherein one or more of the actual or candidate HCT donors are assigned a score based upon the probability or risk of their HCT to induce or not to induce graft vs. host disease (GVHD) in a HCT recipient.

104. An array of primers, comprising two or more primer pairs, wherein each primer pair is oppositely oriented to each other, wherein each of the primer pairs hybridize to RNA or cDNA produced from one of the positive or negative predictor genes listed in Tables 1 (RNA 1538), 2, 2A (RNA 143), 2B (RNA 192), 3, 13 (SG175), 15 (SG128) or 18 (SG64), or a polymorphism thereof, and wherein each primer pair is affixed to or contained in a support or substrate.

105. An array of probes, wherein each probe hybridizes to RNA or cDNA produced from a positive or negative predictor gene listed in Tables 1 (RNA 1538), 2, 2A (RNA 143), 2B (RNA 192), 3, 13 (SG175), 15 (SG128) or 18 (SG64), or a polymorphism thereof, and wherein each probe is affixed to or contained in a support or substrate.

106. The array of claim 104 or 105, further comprising a primer pair or probe that hybridizes to RNA or cDNA produced by a housekeeping gene.

107. The array of claim 104 or 105, wherein each primer pair or probe has a known position or address on the support or substrate.

108. The array of claim 104 or 105, wherein all of the primer pairs or probes hybridize to RNA or cDNA of the positive or negative predictor genes listed in Tables 1 (RNA 1538), 2, 2A (RNA 143), 2B (RNA 192), 3, 13 (SG175), 15 (SG128) or 18 (SG64), or a polymorphism thereof.

109. The array of claim 104 or 105, comprising primer pairs or probes that hybridize to RNA or cDNA of 5, 10, 20, 30 or more of the positive or negative predictor genes listed in Tables 1 (RNA 1538), 2, 2A, 2B (RNA 192) and/or 3, or a polymorphism thereof.

110. The array of claim 104 or 105, wherein the total primer pairs or probes comprising the array are less than 20,000, less than 15,000, less than 10,000, less than 5,000, less than 2,500, less than 2,000, less than 1,500, less than 1,000, less than 500, less than 400, less than 300, less than 200, less than 100, less than 50, or less than 25 primer pairs or probes.

111. The array of claim 104 or 105, wherein the support or substrate comprises a multi-well format.

112. The array of claim 104 or 105, wherein the support or substrate comprises a multi-well plate.

113. The array of claim 104, further comprising a probe that hybridizes to a nucleic acid sequence amplified by one of the primer pairs.

114. The method of any of claims 1 to 4, wherein the CD4+ T cells or CD8+ T cells comprise a biological sample.

115. The method of any of claims 72 to 77, the kit of claim 88 or 924 or the array of claim 104 or 105, wherein the oligo- or poly-nucleotide probe or primer has a length of about 5-10, 10-20, 20-30, 30-40, 40-50, 50-60, 60-70, 70-80, 90-100, 100-150, 150-200, 200-250, 250-300, 300-400, 400-500, 500-1000, or 1000-2000 nucleotides.

The application's sequence listing, which the Patent Office published only in electronic form, follows.

SEQUENCE LISTING (1738 sequences)

SEQ ID NO: 1 - DNA, 594 bp, Homo sapiens
ggccacgtgaggagggtgggcggggcgttaaagttcatatcccagtgtcctttgaatcgacttccttttttcttttttccggcgttcaagatgtcgaagcgaggacgtggtgggtcctctggtgcgaaattccggatttccttgggtcttccggtaggagctgtaatcaattgtgctgacaacacaggagccaaaaacctgtatatcatctccgtgaaggggatcaagggacggctgaacagacttcccgctgctggtgtgggtgacatggtgatggccacagtcaagaaaggcaaaccagagctcagaaaaaaggtacatccagcagtggtcattcgacaacgaaagtcataccgtagaaaagatggcgtgtttctttattttgaagataatgcaggagtcatagtgaacaataaaggcgagatgaaaggttctgccattacaggaccagtagcaaaggagtgtgcagacttgtggccccggattgcatccaatgctggcagcattgcatgattctccagtatatttgtaaaaaataaaaaaaaaaactaaacccattaaaaagtatttgtttgcaaaaaaaaaaaaaaaaaa

SEQ ID NO: 2 - DNA, 1259 bp, Homo sapiens
gtggtcttgcgagtggagtgtccgctgtgcccgggcctgcaccatgagcgtcccggccttcatcgacatcagtgaagaagatcaggctgctgagcttcgtgcttatctgaaatctaaaggagctgagatttcagaagagaactcggaaggtggacttcatgttgatttagctcaaattattgaagcctgtgatgtgtgtctgaaggaggatgataaagatgttgaaagtgtgatgaacagtgtggtatccctactcttgatcctggaaccagacaagcaagaagctttgattgaaagcctatgtgaaaagctggtcaaatttcgcgaaggtgaacgcccgtctctgagactgcagttgttaagcaaccttttccacgggatggataagaatactcctgtaagatacacagtgtattgcagccttattaaagtggcagcatcttgtggggccatccagtacatcccaactgagctggatcaagttagaaaatggatttctgactggaatctcaccactgaaaaaaagcacacccttttaagactactttatgaggcacttgtggattgtaagaagagtgatgctgcttcaaaagtcatggtggaattgctcggaagttacacagaggacaatgcttcccaggctcgagttgatgcccacaggtgtattgtacgagcattgaaagatccaaatgcatttctttttgaccaccttcttactttaaaaccagtcaagtttttggaaggcgagcttattcatgatcttttaaccatttttgtgagtgctaaattggcatcatatgtcaagttttatcagaataataaagacttcattgattcacttggcctgttacatgaacagaatatggcaaaaatgagactacttacttttatgggaatggcagtagaaaataaggaaatttcttttgacacaatgcagcaagaacttcagattggagctgatgatgttgaagcatttgttattgacgccgtaagaactaaaatggtctactgcaaaattgatcagacccagagaaaagtagttgtcagtcatagcacacatcggacatttggaaaacagcagtggcaacaactgtatgacacacttaatgcctggaaacaaaatctgaacaaagtgaaaaacagccttttgagtctttctgatacctgagtttttatgcttataatttttgttctttgaaaaaaaagccctaaatcatagtaaaacattataaactaaaaaaaaaaaaaaaaaaaaaaaa

SEQ ID NO: 3 - DNA, 2463 bp, Homo sapiens
gtcctgtttctctccctgttgtccctgcctctttttccttcccgccgtgccccgcggccgggccggggcagccgggaagcgggtggggtggtgtgttacccagtagctcctgggacatcgctcgggtacgctccacgccgtcgcagccactgctgtggtcgccggtcggccgaggggccgcgatactggttgcccgcggtgtaagcagaattcgacgtgtatcgctgccgtcaagatggaggggcctttgtccgtgttcggtgaccgcagcactggggaaacgatccgctcccaaaacgttatggctgcagcttcgattgccaatattgtaaaaagttctcttggtccagttggcttggataaaatgttggtggatgatattggtgatgtaaccattactaacgatggtgcaaccatcctgaagttactggaggtagaacatcctgcagctaaagttctttgtgagctggctgatctgcaagacaaagaagttggagatggaactacttcagtggttattattgcagcagaactcctaaaaaatgcagatgaattagtcaaacagaaaattcatcccacatcagttattagtggctatcgacttgcttgcaaggaagcagtgcgttatatcaatgaaaacctaattgttaacacagatgaactgggaagagattgcctgattaatgctgctaagacatccatgtcttccaaaatcattggaataaatggtgatttctttgctaacatggtagtagatgctgtacttgctattaaatacacagacataagaggccagccacgctatccagtcaactctgttaatattttgaaagcccatgggagaagtcaaatggagagtatgctcatcagtggctatgcactcaactgtgtggtgggatcccagggcatgcccaagagaatcgtaaatgcaaaaattgcttgccttgacttcagcctgcaaaaaacaaaaatgaagcttggtgtacaggtggtcattacagaccctgaaaaactggaccaaattagacagagagaatcagatatcaccaaggagagaattcagaagatcctggcaactggtgccaatgttattctaaccactggtggaattgatgatatgtgtctgaagtattttgtggaggctggtgctatggcagttagaagagttttaaaaagggaccttaaacgcattgccaaagcttctggagcaactattctgtcaaccctggccaatttggaaggtgaagaaacttttgaagctgcaatgttgggacaggcagaagaagtggtacaggagagaatttgtgatgatgagctgatcttaatcaaaaatactaaggctcgtacgtctgcatcgattatcttacgtggggcaaatgatttcatgtgtgatgagatggagcgctctttacatgatgcactttgtgtagtgaagagagttttggagtcaaaatctgtggttcccggtgggggtgctgtagaagcagccctttccatataccttgaaaactatgcaaccagcatggggtctcgggaacagcttgcgattgcagagtttgcaagatcacttcttgttattcccaatacactagcagttaatgctgcccaggactccacagatctggttgcaaaattaagagcttttcataatgaggcccaggttaacccagaacgtaaaaatctaaaatggattggtcttgatttgagcaatggtaaacctcgagacaacaaacaagcaggggtgtttgaaccaaccatagttaaagttaagagtttgaaatttgcaacagaagctgcaatcaccattcttcgaattgatgatcttattaaattacatccagaaagtaaagatgataaacatggaagttatgaagatgctgttcactctggagcccttaatgattgatctgatgttccttttatttataacaatgttaaatgcaattgtcttgtaccttgagttgagtattacacattaaagtaaagtacaagctgtaaacttgggtttttgtgatgtaggaaatggtttccatctgtactttggtcctctgatttcacatattgcaacctagtactttattagtttaaaaagaaattgaggttgttcaaagtttaagcaattcattctctctgaacacacattgctattcccatcccacccccaatgcacagggctgcaacaccacgacttctgcccattctctccagtgtgtgtaacagggtcacaagaattcgacagccagatgctccaagagggtggcccaaggctatagcccctccttcaatattgacctaacgggggagaaaagatttagattgtttattcttctgtggacacagtttaaaatcttaaacttgtctttttcctcttaatgtatcagcatgctaccctttcaaactcaaattttcattttaactgcttaggaataaatttacacctttgtgaaaattcaaaaaaaaaaa

SEQ ID NO: 4 - DNA, 1813 bp, Artificial Sequence
  Description of Artificial Sequence: Phosphatidylinositol 4-kinase
gtacaaaaaagttggcaccatgacagtggagcagaaatttggcctgttttctgctgagataaaggaagcagaccccctggctgcctcggaagcaagtcaacccaaaccctgtccccccgaagtgaccccccactacatctggatcgacttcctggtgcagcggtttgagatcgccaagtactgcagctctgaccaagtggagatcttctccagcctgctgcagcgctccatgtccctgaacatcggcagggccaaggggagcatgaaccggcacgtggcggccatcgggccccgcttcaagctgctgaccctggggctgtccctcctgcatgccgatgtggttccaaatgcaaccatccgcaatgtgcttcgcgagaagatctactccactgcctttgactacttcagctgtcccccaaagtttcctactcaaggagagaagcggctgcgtgaagacataagcatcatgattaaattttggaccgccatgttctcagataagaagtacctgaccgccagccagcttgttcccccagctgacatcggcgacctcctggagcagttagtagaggagaacacaggctccttgtcgggcccagcgaaggacttttaccagcgggagtttgatttctttaacaagatcaccaacgtgtcggctatcatcaagccctaccctaaaggcgacgagagaaagaaggcttgtctgtcggccctgtctgaagtgacggtgcagccaggctgctccctgcccagcaaccccgaagccattgtgctggacgtcgactacaagtctgggaccccgatgcagagtgctgcaaaagccccatatctggccaagttcaaggtgaagcgatgtggagttagtgaacttgaaaaagaaggtctgcggtgccgctcagactctgaggatgagtgcagcacgcaggaggccgacggccagaagatctcctggcaggcagccatcttcaaactgggagacgactgccggcagaagagctactggggtgcaaggacgccaactgaccgcatcctgcgcctcccggcttcccaggacatgctggccctgcagatcatcgacctcttcaagaacatcttccagctggtcggcctggacctctttgtttttccctaccgcgtggtggccactgcccctgggtgcggggtgatcgagtgcatccccgactgcacctcccgggaccagctgggccgccagacagactttggcatgtacgactacttcacacgccagtacggggatgagtccactctggccttccagcaggcctgctacaacttcatccgaagcatggccgcctacagcctcctgctgttcctgctgcagatcaaggacagacacaacggcaacattatgctggacaagaagggccatatcatccacatcgactttggcttcatgtttgaaagctcgccgggcggcaatctcggctgggaacccgacatcaagctgacggatgagatggtgatgatcatggggggcaagatggaggccacacccttcaagtggttcatggagatgtgtgtccaggctacctggctgtgcggtgagcctgggccctacatggatgtggtcgtctccctggtcactatcatgttggacacgggcctgccctgttttcgcggccagacaatcaagttcttgaagcacaggtttagccccaacatgactgagcgcgaggctgcaaatttcatcatgaaggtcatccagagctgcttcctcagcaacaggagccggacctacaacatgatccagtactatcagaatgacatcccctactgaccaactttcttgtac

SEQ ID NO: 5 - DNA, 741 bp, Homo sapiens
gcagccgccctcggcgtcctctgtagcgggcgacctaggccgcgggacccggacggaggtagaggccagggcagcgcgtccgggagcggagtccgcgcccgccgccgccatgccggacagctgggacaaggatgtgtaccctgagcccccgcgccgcacgccggtgcagcccaatcccatcgtctacatgatgaaagcgttcgacctcatcgtggaccgacccgtgaccctcgtgagagaatttatagagcggcagcacgcaaagaacaggtattactactaccaccggcagtaccgccgcgtgccagacatcactgagtgcaaggaggaggacatcatgtgcatgtatgaagccgaaatgcagtggaagagggactacaaagtcgaccaagaaattatcaacattatgcaggatcggctcaaagcctgtcagcagagggaaggacagaactaccagcagaactgtatcaaggaagtggagcagttcacccaggtggccaaggcctaccaggaccgctatcaggacctgggggcctacagttctgccaggaagtgcctggccaaacagaggcagaggatgctgcaagagagaaaagctgcaaaagaggccgccgctgccacctcctgaggcagctgtgggtgcccctgctgtgtggctctgtatgactgttgctgaaatataaagccctgcaacctgaaaaaaaaaaaaaaaaaaaaaaaaaaaaaaaaaaaaaaaaaaaa

SEQ ID NO: 6 - DNA, 3859 bp, Homo sapiens
aaagatgactcctgtacggtccctgccgtccaggaccctggagtcaagtcagaaatggatgtgtccacagctgattgtgtgacaaggtctggatttgtgggtgttttcattggagtccagggaccctggtaccttatgtgcttttttgccttgtttctttccagattgctcatttagaaagtggatgtgtgggataacatgtccaatgtgtccgaggagagaagaaaaaggcagcagaacattaaggaaggactgcagtttatacagtcaccgctgtcatatccaggaacacaggagcaatatgcggtatatttgcgtgctctcgtgagaaatctttttaatgaaggaaatgacgtttatcgggaacatgattggaacaactcgataagccagtacacggaagccttgaatatagctgattatgcaaaatctgaagaaattttaatccccaaagaaataattgaaaaactatatataaatcgtattgcctgctattctaatatgggtttccatgataaagttttggaggactgcaatatagtcctcagtttaaatgccagtaactgcaaagctctgtatcggaaatctaaggctttaagtgatttaggaagatacaaaaaggcttacgatgctgtagcaaagtgctccttagcagtgcctcaggatgagcatgtaataaaactaactcaagaactagctcagaaattgggatttaaaataagaaaagcgtatgtcagagctgagctctcattaaaatcagttcctggggatggggctaccaaggctttgaaccattctgtggaagatattgagccagatttattaactccaaggcaagaagcagttcctgttgtctctttaccggcacccagtttttctcatgaagttggaagtgagctggcctcagttcctgttatgcccttaacttctattttgccactacaagtggaagagagcgctctgccatctgcagtgctggcaaatggaggaaagatgcccttcactatgccagaagcttttctagatgatggagatatggtccttggagatgaactagatgacctgcttgattctgcacctgaaactaatgaaactgttatgccgtcagctttagtcagaggaccccttcagacagccagtgtctctcctagcatgcccttttcggcatcgctgttaggaaccttacccattggtgcgaggtatgctcctccaccctccttctcagaattttatccacctttgacttcatccttagaagatttttgttcttctttaaattcattttcaatgagtgaatccaaacgagatctgtccacctcaacttctagagagggaacaccgcttaacaacagtaattcttcccttttacttatgaatggaccaggtagtttgtttgcttcagagaatttcctgggaatttcaagtcagcctagaaatgactttggaaacttttttggaagtgcagttaccaaaccatcttcatcagtgactccaagacatcccctcgaaggaacccatgaattgagacaagcttgccagatctgttttgtaaaatcaggccctaagttaatggatttcacttaccatgctaacatagatcataagtgtaagaaagatattttaatcggtaggataaagaatgttgaagataaatcatggaaaaaaatacgtccaagaccaacaaaaacaaattatgaaggaccatattatatatgtaaagatgttgctgctgaggaggaatgtagatattcaggccactgcacgtttgcttattgccaagaggagatagatgtgtggacactggagcggaaaggagcattcagccgggaggctttctttggcggcaatggaaagattaaccttactgtgttcaaacttctccaggagcatcttggggaatttatattcctttgtgagaaatgttttgatcataagcctagaatgataagtaaaagaaataaagataattctactgcttgttctcacccggttacaaagcatgagtttgaagacaataagtgccttgtccacattttgcgagagacaacagtaaaatactccaaaatacgttcttttcatggtcagtgtcagcttgatttatgtcgacatgaagttcggtatggctgtttaagggaagatgagtgcttttatgcccatagtcttgtggaactgaaagtctggataatgcaaaatgaaacaggtatctcacatgatgctattgctcaagagtctaaacgatattggcagaatttggaagcaaatgtacctggagcgcaggtacttggtaatcaaataatgcctggatttcttaatatgaagataaagtttgtgtgcgcccagtgtctgagaaacggtcaagtcattgaaccagacaaaaacagaaaatattgtagtgcaaaagcaaggcattcgtggaccaaagaccggcgtgcgatgagagtgatgtctattgaacgtaagaagtggatgaacatccgtcctctccccacaaagaaacaaatgcctttacagtttgatctgtgcaaccatattgcttctgggaaaaaatgtcaatatgttggaaactgttcctttgctcatagtcctgaggaaagagaagtttggacttacatgaaggagaatgggatacaagatatggagcaattttacgaactatggctcaagagtcaaaaaaatgaaaaaagtgaagacatagccagtcagtcaaacaaggaaaatggaaaacaaattcacatgccaacagattatgctgaagttacagtggactttcactgctggatgtgtgggaaaaactgcaacagtgagaagcagtggcagggccacatctcctccgagaagcacaaagagaaggttttccacaccgaggacgaccagtactgctggcagcaccgcttcccaacaggctatttcagtatttgtgataggtatatgaatggcacctgcccagaaggaaacagctgtaaatttgcacatggaaatgccgaacttcatgaatgggaagaaagaagagatgccctaaagatgaagctcaacaaagcacgaaaagatcacttaattggcccaaatgataatgactttggaaaatatagttttttgtttaaagatttaaactaatatgctggcttttatgtatgatacctaatcagagcattgaccagaaaaattgaaagtgttctgaggcacatagcagaggagctgcagatttcctgcttgtattggcgtatatcgttcctcctgagcagcaacccacagtaggtaggaaaatgggctgtttcacaggcctggccacgctctcacggaaccactggcatcagatggtgaagtgactgctacccggttgccatctgttgaacagacttttggatgaagtgtgttggggaagaggataaggttatatctaggacaactctttgagttggtccttcatataagaatcgtgacggtaagagaataaacacttgtactgggatcagaatacatgatggatgaaattctttacatgttttagcagaatgaatttgtttaatataataaagtttgctacttatctgtatgtaggttgctaaaaaggattttcttaactcagattttaagccaaataaccatttaacactagtatttgttaaatggggtatttttctgtatttgtatgtttcactataataagggaattaaggataatgtgcattgagaatattttgaaaaataattgactcaaattttatttcttggtcttttgctgtttaaatgatgattttgaaagattaaacctgtactgttggtattgtgttagtgtatggaccaatactgcctgtaataaagattttatatatagatgcctttcaaaaaaaaaaaaaaa

SEQ ID NO: 7 - DNA, 1094 bp, Homo sapiens
ccgccccggtccgcaaagccggtggcgcccggaggctgcacggagagcggtgcccgcgtcagtgaccgaaggaagagaccaagatgaatgcagagcccgagaggaagtttggcgtggtggtggttggtgttggccgagccggctccgtgcggatgagggacttgcggaatccacacccttcctcagcgttcctgaacctgattggcttcgtgtcgagaagggagctcgggagcattgatggagtccagcagatttctttggaggatgctctttccagccaagaggtggaggtcgcctatatctgcagtgagagctccagccatgaggactacatcaggcagttccttaatgctggcaagcacgtccttgtggaataccccatgacactgtcattggcggccgctcaggaactgtgggagctggctgagcagaaaggaaaagtcttgcacgaggagcatgttgaactcttgatggaggaattcgctttcctgaaaaaagaagtggtggggaaagacctgctgaaagggtcgctcctcttcacagctggcccgttggaagaagagcggtttggcttccctgcattcagcggcatctctcgcctgacctggctggtctccctctttggggagctttctcttgtgtctgccactttggaagagcgaaaggaagatcagtatatgaaaatgacagtgtgtctggagacagagaagaaaagtccactgtcatggattgaagaaaaaggacctggtctaaaacgaaacagatatttaagcttccatttcaagtctgggtccttggagaatgtgccaaatgtaggagtgaataagaacatatttctgaaagatcaaaatatatttgtccagaaactcttgggccagttctctgagaaggaactggctgctgaaaagaaacgcatcctgcactgcctggggcttgcagaagaaatccagaaatattgctgttcaaggaagtaagaggaggaggtgatgtagcacttccaagatggcaccagcatttggttcttctcaagagttgaccattatctctattcttaaaattaaacatgttggggaaacaagaaaaaaaaaaaaaaa

SEQ ID NO: 8 - DNA, 3754 bp, Homo sapiens
gacgtttcgcggcgtgggcggggccagcacgcaggttgcatattttaggaagtgaggaggaggcgcgggctggagctgcggcggggtctggggcgcagagcagcggcgggaggaggcggacacgtggcaacagcggtagcagcccgggcggcggcagcaacagcggcggcggcatcggcccgagccgccggccgccctcccaccctcccgccccgcggcagccctagctccctccacttggctcccctggtcccgctcgctcggccgggagctgctctgtgcttttctctctgattctccagcgacaggacccggcgccgggcactgagcaccgccaccatggggaagggggttggacgtgataagtatgagcctgcagctgtttcagaacaaggtgataaaaagggcaaaaagggcaaaaaagacagggacatggatgaactgaagaaagaagtttctatggatgatcataaacttagccttgatgaacttcatcgtaaatatggaacagacttgagccggggattaacatctgctcgtgcagctgagatcctggcgcgagatggtcccaacgccctcactccccctcccactactcctgaatggatcaagttttgtcggcagctctttggggggttctcaatgttactgtggattggagcgattctttgtttcttggcttatagcatccaagctgctacagaagaggaacctcaaaacgataatctgtacctgggtgtggtgctatcagccgttgtaatcataactggttgcttctcctactatcaagaagctaaaagttcaaagatcatggaatccttcaaaaacatggtccctcagcaagcccttgtgattcgaaatggtgagaaaatgagcataaatgcggaggaagttgtggttggggatctggtggaagtaaaaggaggagaccgaattcctgctgacctcagaatcatatctgcaaatggctgcaaggtggataactcctcgctcactggtgaatcagaaccccagactaggtctccagatttcacaaatgaaaaccccctggagacgaggaacattgccttcttttcaaccaattgtgttgaaggcaccgcacgtggtattgttgtctacactggggatcgcactgtgatgggaagaattgccacacttgcttctgggctggaaggaggccagacccccattgctgcagaaattgaacattttatccacatcatcacgggtgtggctgtgttcctgggtgtgtctttcttcatcctttctctcatccttgagtacacctggcttgaggctgtcatcttcctcatcggtatcatcgtagccaatgtgccggaaggtttgctggccactgtcacggtctgtctgacacttactgccaaacgcatggcaaggaaaaactgcttagtgaagaacttagaagctgtggagaccttggggtccacgtccaccatctgctctgataaaactggaactctgactcagaaccggatgacagtggcccacatgtggtttgacaatcaaatccatgaagctgatacgacagagaatcagagtggtgtctcttttgacaagacttcagctacctggcttgctctgtccagaattgcaggtctttgtaacagggcagtgtttcaggctaaccaggaaaacctacctattcttaagcgggcagttgcaggagatgcctctgagtcagcactcttaaagtgcatagagctgtgctgtggttccgtgaaggagatgagagaaagatacgccaaaatcgtcgagatacccttcaactccaccaacaagtaccagttgtctattcataagaaccccaacacatcggagccccaacacctgttggtgatgaagggcgccccagaaaggatcctagaccgttgcagctctatcctcctccacggcaaggagcagcccctggatgaggagctgaaagacgcctttcagaacgcctatttggagctggggggcctcggagaacgagtcctaggtttctgccacctctttctgccagatgaacagtttcctgaagggttccagtttgacactgacgatgtgaatttccctatcgataatctgtgctttgttgggctcatctccatgattgaccctccacgggcggccgttcctgatgccgtgggcaaatgtcgaagtgctggaattaaggtcatcatggtcacaggagaccatccaatcacagctaaagctattgccaaaggtgtgggcatcatctcagaaggcaatgagaccgtggaagacattgctgcccgcctcaacatcccagtcagccaggtgaaccccagggatgccaaggcctgcgtagtacacggcagtgatctaaaggacatgacctccgagcagctggatgacattttgaagtaccacactgagatagtgtttgccaggacctcccctcagcagaagctcatcattgtggaaggctgccaaagacagggtgctatcgtggctgtgactggtgacggtgtgaatgactctccagctttgaagaaagcagacattggggttgctatggggattgctggctcagatgtgtccaagcaagctgctgacatgattcttctggatgacaactttgcctcaattgtgactggagtagaggaaggtcgtctgatctttgataacttgaagaaatccattgcttataccttaaccagtaacattcccgagatcaccccgttcctgatatttattattgcaaacattccactaccactggggactgtcaccatcctctgcattgacttgggcactgacatggttcctgccatctccctggcttatgagcaggctgagagtgacatcatgaagagacagcccagaaatcccaaaacagacaaacttgtgaatgagcggctgatcagcatggcctatgggcagattggaatgatccaggccctgggaggcttctttacttactttgtgattctggctgagaacggcttcctcccaattcacctgttgggcctccgagtggactgggatgaccgctggatcaacgatgtggaagacagctacgggcagcagtggacctatgagcagaggaaaatcgtggagttcacctgccacacagccttcttcgtcagtatcgtggtggtgcagtgggccgacttggtcatctgtaagaccaggaggaattcggtcttccagcaggggatgaagaacaagatcttgatatttggcctctttgaagagacagccctggctgctttcctttcctactgccctggaatgggtgttgctcttaggatgtatcccctcaaacctacctggtggttctgtgccttcccctactctcttctcatcttcgtatatgacgaagtcagaaaactcatcatcaggcgacgccctggcggctgggtggagaaggaaacctactattagccccccgtcctgcacgccgtggagcatcaggccacacactctgcatccgacacccaccccctctttgtgtacttcagtcttggagtttggaactctaccctggtaggaaagcaccgcagcatgtggggaagcaagacgtcctggaatgaagcatgtagctctatggggggaggggggagggctgcctgaaaaccatccatctgtggaaatgacagcggggaaggtttttatgtgcctttttgtttttgtaaaaaaggaacacccggaaagactgaaagaatacattttatatctggatttttacaaataaagatggctattataatggaaaaaaaaaaaaaaa

SEQ ID NO: 9 - DNA, 5867 bp, Homo sapiens
agctgcagcagccgcgccgccccctcgcccgcggctcccagggtgatcccgagcacagccggtggctcgcggcgcggcagccccagaagacgggaaagttcgcggccggagcgcggagatgccgggcagcgacacggcgctcaccgtggaccggacctactcggaccccggccggcaccaccgctgcaagagccgggtagaacgtcatgacatgaataccttaagcctgcccctgaacatacgccgaggggggtcagacaccaacctcaactttgatgtcccggatggcatcctggacttccacaaggtcaaactcactgcagacagcctgaagcaaaaaattctaaaggtaacagagcagataaaaattgagcaaacatcgcgcgatgggaatgttgcggagtatctgaaactagtgaacaacgcagacaagcagcaggcgggacgtatcaagcaagtctttgagaagaagaatcagaaatcagctcactccatcgcccagctgcagaagaagttagagcagtatcatcgaaagctcagagagatcgagcagaatggagcctctaggagctcaaaggacatttccaaagaccacctgaaggatatacatcgctctttgaaagatgcccacgtgaaatctcgaactgccccccattgcatggagagcagcaaatcgggcatgccaggggtctcacttactccacctgtgttcgttttcaataagtccagagagtttgccaacctgatccggaataagtttggcagcgccgacaacattgctcacttgaaaaattccttagaggagtttaggccagaggcgagtgccagggcctacgggggcagcgctaccatcgtgaacaaacccaagtatggcagtgatgatgaatgttcgagtggcacgtcaggctcggccgacagtaacggaaaccagtcgtttggggctggtggagccagcacactggacagccagggcaagctcgccgtgatcctggaggaactgagggagatcaaggatacccaagctcagctggctgaggacatcgaggcactgaaggtgcagtttaagagagaatatggttttatttctcagaccctgcaagaggaaagatacaggtatgagcgactggaggaccagctgcatgacctgacggacctgcatcagcatgagacagccaacctgaagcaggagctggccagcattgaggagaaggtggcctaccaggcctacgagcgctcgcgggacatccaggaagccttggaatcctgccagactcgcatttctaagctggagctccaccagcaagagcagcaagctctgcagacagacaccgtgaatgctaaagttctcctggggaggtgcatcaacgtgatcctggccttcatgactgtcatcttagtgtgtgtgtccaccatcgcgaagttcgtctcacccatgatgaagagtcgctgccacattcttggcaccttctttgccgtgactcttcttgctatattttgtaaaaactgggaccatatcctgtgtgccatagaaaggatgataataccaagatgaagccactggttcctgccttcaagttctttcaagtttttattttaaagaaaactctgtgcatactaccaaattttacagtgaatgattgtgcggactcgtgtgtaagaaaaactaggactgtgtggtgtaaataactacaattctcttaactccgtagcagttgccaactcagtccttgtacttcgttaacacgaatctgtttcagagctctcctaccttgctcactgccttaatcagaccgatttcctgcccacctgaccagcccagcgtggtaaacctctgtatattgagaccttggcataattggtgatcctgaagaaagaggtctctctcctaagtctctgtcagaattgagcttcacaattgctaatggttgttttctgtgagtcctataaaaagcaaggatatgcatgattcagggaatgaagaatcacaggcttgggcagtgttaaacactgtggcctatggtccccgtgtgatccaccctgcttctctccaggggaccataggtcccgtcatgtactcagtgtccacagcagtcagtcgtgtatgaccctgtaacgtggaaatcttatcacacacctgttatccaacaagtctacctgaggggttttgttacactttaaatgggaaggcatagggatttatgaatggggctttcaccttctcatacccaggcaaccaacacctgattttgtctcaactggctagcaaatgcccagccttcagagtgtgcaggaatgttttcaaatccctcatcagactgtgactttaacattaatttggaatcctgtgagcactactctgaaggtttgtgttttggcaaatcttttttcttttttgagacagggctctgctaaatattgctcaggctggttgcaaactccttgcttcaagggatcctcccacctcagcctcccaagcagccgggactgcaggcacaagccaccatgcctggctgttttttggcaaatcttgattgtgataagcccccctggaggatatgattcactttatgtgattcatcttattcacaggtctgtgagggactgcaaagcttactcaggaaatgaaaacaaatgatggtcatgttgcagttttttccttgaaggacaaccgaaccatagcctctaaagttcaagtgcactgaggtgtcggaacgctgaaagcatgaggaaacgaggacgtagggtgtgactgaatggtggctagattagtgggagcagttcacctggatgaagattgagagcatcgtctttgagaagtgaaagactagcaagaataaaataaattaagtccagtgtttgagccaaggttgccacctgtctcttaacatctcactgaacataagtcctgaggtattaggacgaccatactgcctctgagctgaaaacattcaaaagttcacatccctgtttgggggataccattcaccgccttcagcccagatgatactttcctttaaatctgtgtctctgtgtgtataacaaagaggaagatggaaacaatgttcatggaaactgctgttgagccccttgtcccaccactcccgccatctgctgcaggcaggaaggcatgtgagtgtacgttttcttccaggagacatcaggtccccctggattcaaattaagtgcaatattttgcaaacagctcttcttagggaaatctcctgaaggaaaaaaatgtgacagaatgttccatagtctgagagaatggaatcgttgagcatttagtacaagtccagtgtgtgtgagcgggacttaggcagctcaagcttgcttttttttttaagcgtacaattgagtggttttagtaaattcacaaacttgttcaaccatcaccactatctaattccagactcacgcttttttaaacaataaatgtcatttcatgaaatctttggtgataaagtattttggattcagagaagagctcccttaccagtcccaccctgatctcatggctgtctctcctttcattgtcagactccccctggtctaccgcgttgatgtgtatacactgatctttcaagtctgggagacagataaggaggccaggtgcaaggcagggaggcagagagaatgttgtgcttcctttagcttttgtatttcgatggccagcattaccctttacctgtgggcatcagactcagcgtgggctgagtgctgagtgtaacttacactcctaaatcaagctggggcctgggtgggcccctcttggtatctgtgaatctttccaagcaccacttcggacacaccagggattgagtgctgctgttagtttagagaaggagagatgtctaacccttgaggtgaagggctctgggagggtccaagaagacgtaggcttcattttcacaccagcccacaccattccagtgctcagcctagcaaatgtgctttaatgcacacttctcagacctgtgatccgtgtatcttctccccagtgacagaagtagagaagagaatggaaagcagcacactccgtcccctctagtctggagctgttaacagaatctgctagaaactagctttattctaacataccgtaggatctaaatcctcctacctggatcatgaattcctttgaaataattcatattttcattgactctcactaaatgtcaaataaccttgttttcacttggataggctcaacctacctggcatatttattttgcagtcttgttgaaagttcatgaaactttgtactttttaataagatgatacactcgaaggaaacttttaatctctgcagtttattctctcttaaggaataaacactcccactgtttgttctcttcaatgtgtaaggagattaaatgacattttagaaatattacaattaaaaatagtgatgtagctgtaacatatgctggaattggatatttaatttatgtttgtgtcaactataatcctttccccacccctttcatttatggtaaacatcttgggcaaacccaaagatggaaagtgcttgttgggtgggtaagcaccacctggtctctcagcaaacactcctgagtggttgaagatgctggacattggattctagcactgggtttatctggtgacatagtctcctgtgggtcttgagttggttatttcaagctcaaactctgaatatgattaaaccagaacaccccacccccaactgccaaaaaaaaaaaaaaaaaatggaaatccataatgaaacagcaaaaaagtactccgttgctgggtttggacaatgaacatgggattagtcccaagtttgtagcttggaacggtagcatttttgcctgcgtgatccttgtcagctattcacagaaggaaatcttccgaaactccgtctttcatttcagccggtgaggctgttatccttctctgtcaattagcattcatgtggttttcgctctttccagctctgtcactcttgttttcatttaaatattgccccactctgtgtttattgccttgccatttctctagcatatcaggtttaattatgggctcagtaataatgaggaactagcttccctcaggcaactaattacttttgtcttttttggtcggattgtaccaaattattttgcattgaatgggaatgtttttgcagtgaatccagatatagttgtattggtttggaaaaacatttaaatatatttattcatatgaacatgtgtgattaaacaacctattttacatatttctgtaattctgaggagtgggctgggggtaggaagaaatggcaccacttaaaattcagggcttatatgaagaggtgttttaaggttagcacatgcacaaaggaacgagttggtttaaaaagataaatcactgcaaagaatgaaattggcttattcacatcaaaactagataagatgctaaaaaaaaaagatatgaaacagaactaacctatagtttcctgaaatcagtacagtttaatttataagaagctagaaagtaatgcaccttgattgttttaggaatgatttatgtgttgcaattttaatttatttaaagcatgtctactgtgtttgtcctaagagaaatatttcaacaaaacgtgctctgtgtttaagatatgtttaggcagtagttagcaactctgaaagtagaaactggaaatgtttattgtgaggcttgttgcagaatttccattttgtgagttactacttagtttcatgtcagcctaaaattgtaaattccctgtagatcttcaccccattgtggtgtcatcaatgaatccaaagcaggtgccattatttttttaaataaacacttgatgttagctttggtgttaaataaagaggtagatttcttaaattttaaaa

SEQ ID NO: 10 - DNA, 3976 bp, Homo sapiens
acacggctacctgctcccaggaattgagactgaagtggacttacaagtccgaagccaatgtagcttggaaaacttgggaggcggaattcctaccgctgggaactgaaagggtctgcgacactctcgggcaggccgaacccacatctctacccatcctgcgcccctcttctgaagcgccctccagggaagttaagagttttgactttcggggagtggttgggatgtacgtgggggattcttgactcgggttagtctctggggatgcagagccgggaagaggaatggttccaccaggtgagaagagtgatgaccatccttttccttactatggttatttcatactttggttgcatgaaggctgcccccatgaaagaagcaaacatccgaggacaaggtggcttggcctacccaggtgtgcggacccatgggactctggagagcgtgaatgggcccaaggcaggttcaagaggcttgacatcattggctgacactttcgaacacgtgatagaagagctgttggatgaggaccagaaagttcggcccaatgaagaaaacaataaggacgcagacttgtacacgtccagggtgatgctcagtagtcaagtgcctttggagcctcctcttctctttctgctggaggaatacaaaaattacctagatgctgcaaacatgtccatgagggtccggcgccactctgaccctgcccgccgaggggagctgagcgtgtgtgacagtattagtgagtgggtaacggcggcagacaaaaagactgcagtggacatgtcgggcgggacggtcacagtccttgaaaaggtccctgtatcaaaaggccaactgaagcaatacttctacgagaccaagtgcaatcccatgggttacacaaaagaaggctgcaggggcatagacaaaaggcattggaactcccagtgccgaactacccagtcgtacgtgcgggcccttaccatggatagcaaaaagagaattggctggcgattcataaggatagacacttcttgtgtatgtacattgaccattaaaaggggaagatagtggatttatgttgtatagattagattatattgagacaaaaattatctatttgtatatatacataacagggtaaattattcagttaagaaaaaaataattttatgaactgcatgtataaatgaagtttatacagtacagtggttctacaatctatttattggacatgtccatgaccagaagggaaacagtcatttgcgcacaacttaaaaagtctgcattacattccttgataatgttgtggtttgttgccgttgccaagaactgaaaacataaaaagttaaaaaaaataataaattgcatgctgctttaattgtgaattgataataaactgtcctctttcagaaaacagaaaaaaacacacacacacacaacaaaaatttgaaccaaaacattccgtttacattttagacagtaagtatcttcgttcttgttagtactatatctgttttactgcttttaacttctgatagcgttggaattaaaacaatgtcaaggtgctgttgtcattgctttactggcttaggggatgggggatggggggtatatttttgtttgttttgtgtttttttttcgtttgtttgttttgttttttagttcccacagggagtagagatggggaaagaattcctacaatatatattctggctgataaaagatacatttgtatgttgtgaagatgtttgcaatatcgatcagatgactagaaagtgaataaaaattaaggcaactgaacaaaaaaatgctcacactccacatcccgtgatgcacctcccaggccccgctcattctttgggcgttggtcagagtaagctgcttttgacggaaggacctatgtttgctcagaacacattctttccccccctccccctctggtctcctctttgttttgttttaaggaagaaaaatcagttgcgcgttctgaaatattttaccactgctgtgaacaagtgaacacattgtgtcacatcatgacactcgtataagcatggagaacagtgatttttttttagaacagaaaacaacaaaaaataaccccaaaatgaagattattttttatgaggagtgaacatttgggtaaatcatggctaagcttaaaaaaaactcatggtgaggcttaacaatgtcttgtaagcaaaaggtagagccctgtatcaacccagaaacacctagatcagaacaggaatccacattgccagtgacatgagactgaacagccaaatggaggctatgtggagttggcattgcatttaccggcagtgcgggaggaatttctgagtggccatcccaaggtctaggtggaggtggggcatggtatttgagacattccaaaacgaaggcctctgaaggacccttcagaggtggctctggaatgacatgtgtcaagctgcttggacctcgtgctttaagtgcctacattatctaactgtgctcaagaggttctcgactggaggaccacactcaagccgacttatgcccaccatcccacctctggataattttgcataaaattggattagcctggagcaggttgggagccaaatgtggcatttgtgatcatgagattgatgcaatgagatagaagatgtttgctacctgaacacttattgctttgaaactagacttgaggaaaccagggtttatcttttgagaacttttggtaagggaaaagggaacaggaaaagaaaccccaaactcaggccgaatgatcaaggggacccataggaaatcttgtccagagacaagacttcgggaaggtgtctggacattcagaacaccaagacttgaaggtgccttgctcaatggaagaggccaggacagagctgacaaaattttgctccccagtgaaggccacagcaaccttctgcccatcctgtctgttcatggagagggtccctgcctcacctctgccattttgggttaggagaagtcaagttgggagcctgaaatagtggttcttggaaaaatggatccccagtgaaaactagagctctaagcccattcagcccatttcacacctgaaaatgttagtgatcaccacttggaccagcatccttaagtatcagaaagccccaagcaattgctgcatcttagtagggtgagggataagcaaaagaggatgttcaccataacccaggaatgaagataccatcagcaaagaatttcaatttgttcagtctttcatttagagctagtctttcacagtaccatctgaatacctctttgaaagaaggaagactttacgtagtgtagatttgttttgtgttgtttgaaaatattatctttgtaattatttttaatatgtaaggaatgcttggaatatctgctatatgtcaactttatgcagcttccttttgagggacaaatttaaaacaaacaaccccccatcacaaacttaaaggattgcaagggccagatctgttaagtggtttcataggagacacatccagcaattgtgtggtcagtggctcttttacccaataagatacatcacagtcacatgcttgatggtttatgttgacctaagatttattttgttaaaatctctctctgttgtgttcgttcttgttctgttttgttttgttttttaaagtcttgctgtggtctctttgtggcagaagtgtttcatgcatggcagcaggcctgttgcttttttatggcgattcccattgaaaatgtaagtaaatgtctgtggccttgttctctctatggtaaagatattattcaccatgtaaaacaaaaaacaatatttattgtattttagtatatttatataattatgttattgaaaaaaattggcattaaaacttaaccgcatcagaacctattgtaaatacaagttctatttaagtgtactaattaacatataatatatgttttaaatatagaatttttaatgtttttaaatatattttcaaagtacataaaa

SEQ ID NO: 11 - DNA, 2296 bp, Homo sapiens
gcagagcggcggcttctctcgcgaggacggacgccattatcgcatctccccgacaaacaccacgagaattccgcagcccacacggtgaccaaaagccagccccactgtgagttgaactctttcgtgttgaccggccactctccgtgctctggatgatgtcggaacacgacctggccgatgtggttcagattgcagtggaagacctgagccctgaccacccagttgttttggagaatcatgtagtgacagatgaagacgaacctgctttgaaacgccagcgactagaaatcaattgccaggatccatctataaagtcattcctgtattccatcaaccagacaatctgcttgcggttggatagcattgaagccaaattgcaagccctggaggctacttgtaaatccttagaagaaaagctggatctggtcacgaacaagcagcacagccccatccaggtccccatggtggccggctcccctctcggggcaacccagacgtgcaacaaagtgcgatgcgctgtgcctgggcgtcggcagaacaccattgtggtgaaggtgccgggccaagaagacagccaccacgaggacggggagagcggctcggaggccagcgactctgtgtccagctgtgggcaggcgggcagtcagagcatcgggagcaacgtcacgctcatcaccctgaactcggaagaggactaccccaatggcacctggctgggcgacgagaacaaccccgagatgcgggtacgctgcgccatcatcccctccgacatgctgcacatcagcaccaactgccgcacggccgagaagatggcgctcacgctgctggactacctcttccaccgcgaggtgcaggctgtgtccaacctctcggggcagggcaagcacgggaagaagcagctggacccgctcaccatctacggcatccggtgtcaccttttctataaatttggcatcacagaatccgactggtaccgaatcaagcagagcatcgactccaagtgccgcacggcgtggcggcgcaagcagcggggccagagcctggcggtcaagagcttctcgcggagaacgcccaactcgtcctcctactgcccttcagagccgatgatgagcaccccacctcctgccagcgagctcccgcagccacagccgcagccgcaggccctgcactacgcgctggccaacgcacagcaggtgcagatccaccagatcggagaagacggacaggtgcaagtaatcccacagggacacctccacatcgcccaggtgccgcagggggagcaagtccagatcacgcaggacagcgagggcaacctccagatccatcacgtggggcaggacggtcagcttctagaggccacccgcatcccctgcctcctggccccatccgtcttcaaagccagcagtggccaggtgctgcagggtgcacagctgatcgccgtggcctcctcggaccccgcggcggcgggcgtggatgggtcgccactccagggcagcgacatccaggttcagtacgtgcagctggcgccagtgagtgaccacacggccggggcacagacggccgaagccctgcagcccacgctacagccggagatgcagctcgagcacggggccatccagattcagtgagcggtgcccatggcaccaggagcccctcgccggctccgcctacggcccggcccccacgcgccctgctctcacggcctcggcacaggcagcggctgcacgtgttctgctgaagtgcgtctgaaggccgctgcctccgcggggaacagcatcctatcaactgaaagagcagccgccgccgcccccagccggagacccctttcgtttgagtcctgctgttggtgtcggagcacgaggggaggcacggtgcggagagcgtcgcatatgcgcgggaaatcaagaactatgatatttttctgtttaaacagctttttttaatttgctatggtgtttataacaaaaaagaaaatttgaaaaaaaaaatcccaggggagtagcaggagccctttgctgtgtgctctgtccagtgtcatgagacgggagccctttgctgtgtgctctgtccagtgtcatgagacgggagccctttgctgtgtgctctgtccagtgtcatgagacgggagccctttgctgtgtgctctgtccagtgtcatgaggcaggtgtttgcaaagccagctctcggttccgatggggtattgctgacctacttttctaggggaaatgctcttaaacactgtaattatgcatttctaatgaaataaaatgtatttatgaccacaaaaaaaaaaaa

SEQ ID NO: 12 - DNA, 2173 bp, Homo sapiens
atctttccgtcccgggcagccagcgccagtcggagccagcgcgagccgccgccgccatcactgccgctgccaagtcctccacccgctgcccccgccatgtctgctaccgctgccacggccccccctgctgccccggctggggagggtggtccccctgcaccccctccaaacctcaccagtaacaggagactgcagcagacccaggcccaggtggatgaggtggtggacatcatgagggtgaacgtggacaaggtcctggagcgagaccagaagctgtcggagctggacgaccgtgcagatgcactccaggcgggggcctcccagtttgaaacaagcgcagccaagctcaagcgcaaatactggtggaaaaacctcaagatgatgatcatcttgggagtgatttgcgccatcatcctcatcatcatcatagtttacttcagcacttaaatccccgaggagtctgccctgcctagagaagggcctctcccccaaccctcagccgttcctccacctctcagccatatctttcagcccccactcccctggatccgtgtgtgtgtgtgtccgtgtgtgtgtccccctgtaaatagccagctgttatttatacatatataatattatatatatttggtctgtttgtagttttattactagatgatttttccggttgtccttaacaccccttcctgaggttcccttcacccctctctcttgccttccttccctttccctttcttcctgactagccccaagtcccttcatttgcatctgctatgcaatagtccctctcctttccttcttcttccctcagatttagctgatccttcctcccaccctggccttcctttcctctttcctcctcactctccccgtcatgctccctctgccccgccctcaaaaaaaaaaaaaaaaaaaaaaaaacaacagcacctgtccaggcttccttaggtacatcttctttgtatccattgggaggctctgagactggccccacttggtcctaagaatcccaaggtctttgggagcgtccagcatgttaattagcgtatcattacatactgctatccctttccatttctttttgttccatcactcttctctcaacctgtgtttctttttttactgaggagttagtccccattagttcttgtatcacattttcatttgcacgacattactcgcaggtggtggggagcctgggcttttggggaaccaggctgctctggtccccagcattgcctcctcctagcccctctagtccagtttgcctcccttaccctcattttccaaacctcttgtaccctcctctccctcccccagctggtatgtaagtgtcttgaagttcagtatgttatgatggaccaataattctgccacttcgggtttctccctacattcctgctccccagttttcatgtggggtactcaactgacattcccatggggtttccctcccatctgcctgatccacctcctcctcccaccaggagagttgggggttggccacaattgatctcttgtgagaggggtggctaccagtgtgtgtgtgggggtcatcactgccttggggaggagtggggcagggcagagaatccccccaattcctgcctgaaatctctggcctcacccctgctgggggttggactgaaaaccctcctccccaatttggggggtgttgccccatcactgcccagctcctctgactgccccccctgaatttagggtgggggtactagtcactgccaatgtgtgtatgggacttgctggaaaacggggatgcttgcccctctccaggactattgagcccagagagagctgtcctctcattgggtgaactgattgaggaagggtctattgtctttttaaatggcacaattttaagggtttgagggtacagtcccttaacctgccacgggagggggcccccaaactttcttccccccacacttctggttttctgtgtggagggggagcagggatatctaagctgtggtgtgaaagggtaggagagatgctggaggtgggggtgctgtgttttagaccccccatattatcccagtgtcccctgcccccctcttcccccaccccatgcccccaattctgtggcgcatccagattgtgaaaatgtacaataaatgtgtaatgagtaaccaggaaaaaaaaaaaaaaaaaa

SEQ ID NO: 13 - DNA, 1905 bp, Homo sapiens
gctgtcttttcagtcgggcgctgagtggtttttcggatcatgtctggtggctccgcggattataacagagaacatggcggcccagagggaatggaccccgatggtgtcatcgagagcaactggaatgagattgttgataactttgatgatatgaatttaaaggagtctctccttcgtggcatctatgcttacggttttgagaagccttccgctattcagcagagagctattattccctgtattaaagggtatgatgtgattgctcaagctcagtcaggtactggcaagacagccacatttgctatttccatcctgcaacagttggagattgagttcaaggagacccaagcactagtattggcccccaccagagaactggctcaacagatccaaaaggtaattctggcacttggagactatatgggagccacttgtcatgcctgcattggtggaacaaatgttcgaaatgaaatgcaaaaactgcaggctgaagcaccacatattgttgttggtacacccgggagagtgtttgatatgttaaacagaagatacctttctccaaaatggatcaaaatgtttgttttggatgaagcagatgaaatgttgagccgtggttttaaggatcaaatctatgagattttccaaaaactaaacacaagtattcaggttgtgttgctttctgccacaatgccaactgatgtgttggaagtgaccaaaaaattcatgagagatccaattcgaattctggtgaaaaaggaagaattgacccttgaaggaatcaaacagttttatattaatgttgagagagaggaatggaagttggatacactttgtgacttgtacgagacactgaccattacacaggctgttatttttctcaatacgaggcgcaaggtggactggctgactgagaagatgcatgccagagacttcacagtttctgctctgcatggtgacatggaccagaaggagagagatgttatcatgagggaattccggtcagggtcaagtcgtgttctgatcactactgacttgttggctcgcgggattgatgtgcaacaagtgtctttggttataaattatgatctacctaccaatcgtgaaaactatattcacagaattggcagagggggtcgatttgggaggaaaggtgtggctataaactttgttactgaagaagacaagaggattcttcgtgacattgagactttctacaatactacagtggaggagatgcccatgaatgtggctgaccttatttaattcctgggatgagagttttggatgcagtgctcgctgttgctgaataggcgatcacaacgtgcattgtgcttctttctttgggaatatttgaatcttgtctcaatgctcataacggatcagaaatacagattttgatagcaaagcgacgttagtcgtgagctcttgtgaggaaagtcattggctttatcctctttagagttagactgttggggtgggtataaaagatggggtctgtaaaatctttctttcttagaaatttatttcctagttctgtagaaatggttgtattagatgttctctatcatttaataatatacttgtggactaaaagatataagtgctgtataaaatcagccaattatgttaaactagcatatctgcctttattgtgtttgtcattagcctgagtagaaaggcctttaaaatttttttagaaagcatttgaatgcattttgtttggtattgtatttattcaataaagtatttaattagtgctaagtgtgaactggaccctgttgctaagccccagcaagcaatcctaggtagggtttaatccccagtaaaattgccatattgcacatgtcttaatgaagtttgaatgttaaataaattgtatattcactttaaaaaaaaaaaaaaaaa

SEQ ID NO: 14 - DNA, 3946 bp, Homo sapiens
cccatgctgccctgcgccaacccctcccctcacctttcctcccccgccctctactcgccgcccggccggtccccccacccgtcccttcccttatcagcacccgcggccccggcagcgccgacgcaggcgcactgcaccgcgccgccgccattttgtgtctgagcctgtggagcgattaaaccgtgcgcggagctgcttctttggcggcagcggcggcggcggtggccggtgcggacgcgcggagctcgccggagacgccgggtggccggagccgtggagcggcggcggagcgggcgccgcggggggtgtggcgcggagaatgattacggacctgaagccaaagaacaagatgcgctagtggacagattgctgaccaggggcttgagagctgggttctattttccctcctcaaactgactttgcagccacggagaggcaggggaaatggaaggtgatgcagtcgaagccattgtggaggagtccgaaacttttattaaaggaaaggagagaaagacttaccagagacgccgggaagggggccaggaagaagatgcctgccacttaccccagaaccagacggatgggggtgaggtggtccaggatgtcaacagcagtgtacagatggtgatgatggaacagctggaccccacccttcttcagatgaagactgaagtaatggagggcacagtggctccagaagcagaggctgctgtggacgatacccagattataactttacaggttgtaaatatggaggaacagcccataaacataggagaacttcagcttgttcaagtacctgttcctgtgactgtacctgttgctaccacttcagtagaagaacttcagggggcttatgaaaatgaagtgtctaaagagggccttgcggaaagtgaacccatgatatgccacaccctacctttgcctgaagggtttcaggtggttaaagtgggggccaatggagaggtggagacactagaacaaggggaacttccaccccaggaagatcctagttggcaaaaagacccagactatcagccaccagccaaaaaaacaaagaaaaccaaaaagagcaaactgcgttatacagaggagggcaaagatgtagatgtgtctgtctacgattttgaggaagaacagcaggagggtctgctatcagaggttaatgcagagaaagtggttggtaatatgaagcctccaaagccaacaaaaattaaaaagaaaggtgtaaagaagacattccagtgtgagctttgcagttacacgtgtccacggcgttcaaatttggatcgtcacatgaaaagccacactgatgagagaccacacaagtgccatctctgtggcagggcattcagaacagtcaccctcctgaggaatcaccttaacacacacacaggtactcgtcctcacaagtgcccagactgcgacatggcctttgtgaccagtggagaattggttcggcatcgtcgttacaaacacacccacgagaagccattcaagtgttccatgtgcgattacgccagtgtagaagtcagcaaattaaaacgtcacattcgctctcatactggagagcgtccgtttcagtgcagtttgtgcagttatgccagcagggacacatacaagctgaaaaggcacatgagaacccattcaggggaaaagccttatgaatgttatatttgtcatgctcggtttacccaaagtggtaccatgaagatgcacattttacagaagcacacagaaaatgtggccaaatttcactgtccccactgtgacacagtcatagcccgaaaaagtgatttgggtgtccacttgcgaaagcagcattcctatattgagcaaggcaagaaatgccgttactgtgatgctgtgtttcatgagcgctatgccctcatccagcatcagaagtcacacaagaatgagaagcgctttaagtgtgaccagtgtgattacgcttgtagacaggagaggcacatgatcatgcacaagcgcacccacaccggggagaagccttacgcctgcagccactgcgataagaccttccgccagaagcagcttctcgacatgcacttcaagcgctatcacgaccccaacttcgtccctgcggcttttgtctgttctaagtgtgggaaaacatttacacgtcggaataccatggcaagacatgctgataattgtgctggcccagatggcgtagagggggaaaatggaggagaaacgaagaagagtaaacgtggaagaaaaagaaagatgcgctctaagaaagaagattcctctgacagtgaaaatgctgaaccagatctggacgacaatgaggatgaggaggagcctgccgtagaaattgaacctgagccagagcctcagcctgtgaccccagccccaccacccgccaagaagcggagaggacgaccccctggcagaaccaaccagcccaaacagaaccagccaacagctatcattcaggttgaagaccagaatacaggtgcaattgagaacattatagttgaagtaaaaaaagagccagatgctgagcccgcagagggagaggaagaggaggcccagccagctgccacagatgcccccaacggagacctcacgcccgagatgatcctcagcatgatggaccggtgatggcggagccttgtgcgtcgccaggacttctctgggctgtgtttaaacggcccgcatcttaatttttctcccttctttctttttttggctttgggaaaagcatcattttaccaaacataccgagaacgaaaacttcaaggatgatgttagaaaaaaatgtgatttaactagaacttgctgtctgatgttagcaaatcatggaatgttctgagtccctgagggtttactgtgaagtgctgaggacagtgttgacaactaactcgttttcctagatggaaacggagacattgacccctccctccatgtggtaaaccactccagaatggccaccaggcttcccagagttctatggtcttcttcccaagagagtttttaattgtaaatgcatacttgggaaggacttagagttttaaactgttttttgcttttgcttttccctgactccctttgcttggagtcagctgcacaccagtagtatggcatgctacgatcaggttctgtcctgaaagctttgcctctttcttggcaaagtttctggtatggtcaagcttgtaaataactttttttacattttaatcttttccattaattaagaggttgaaaagaagtgcagtgtaagaaaacccagcattttaattacttgcaaattaagttaccacagactctgtagtgtgtaaatgttgacaaggaattggatcacaatcatgtagcagaatggcacccagaccactgcccaccagtgacggacatgcacgtggcagatcatgatttccagcccacggagccagcatttgaaccttgtataattaactttcagttatgatttcccatcgacattttctttgccctgtttgtagctgattgttgtgttttataaatcttctgttaaggcagaagggtgattatgagtggttcacagcagcccttataagctgggccagaaaatttcactaggtcagtaatttaaaccttggatcttcaaaaaataaaataatgtgaagcaaaaccaactaaaaagtgattcttgcacatgaactgtcacatgtttaaaaatgtgttttttagagagcctcagtcttactgatttcaaacacttttttcttctgtgtattgcttttaagagagccatcagttagctatcagactctaggttgatgcattttgtacttagctgtactgtgtgatatttttcattattttaggacgccaacatgagacctgtaataaaatatgtaatggggttgaaagctggggaggaggatctactgctgtacagctaataaatcataacggattaacaagtgctccaaagaaaaaa

SEQ ID NO: 15 - DNA, 2391 bp, Homo sapiens
cgcaaccggaactagccttctgggggccggcttggtttatctctggcggccttgtagtcgtctccgagactccccacccctccttccctcttgaccccctaggtttgattgccctttccccgaaacaactatcatgagcgcgaggctgccggtgttgtctccacctcggtggccgcggctgttgctgctgtcgctgctcctgctgggggcggttcctggcccgcgccggagcggcgctttctacctgcccggcctggcgcccgtcaacttctgcgacgaagaaaaaaagagcgacgagtgcaaggccgaaatagaactatttgtgaacagacttgattcagtggaatcagttcttccttatgaatacacagcgtttgatttttgccaagcatcagaaggaaagcgcccatctgaaaatcttggtcaggtactattcggggaaagaattgaaccttcaccatataagtttacgtttaataagaaggagacctgtaagcttgtttgtacaaaaacataccatacagagaaagctgaagacaaacaaaagttagaattcttgaaaaaaagcatgttattgaattatcaacatcactggattgtggataatatgcctgtaacgtggtgttacgatgttgaagatggtcagaggttctgtaatcctggatttcctattggctgttacattacagataaaggccatgcaaaagatgcctgtgttattagttcagatttccatgaaagagatacattttacatcttcaaccatgttgacatcaaaatatactatcatgttgttgaaactgggtccatgggagcaagattagtggctgctaaacttgaaccgaaaagcttcaaacatacccatatagataaaccagactgctcagggccccccatggacataagtaacaaggcttctggggagataaaaattgcctatacttactctgttagcttcgaggaagatgataagatcagatgggcgtctagatgggactatattctggagtctatgcctcatacccacattcagtggtttagcattatgaattccctggtcattgttctcttcttatctggaatggtagctatgattatgttacggacactgcacaaagatattgctagatataatcagatggactctacggaagatgcccaggaagaatttggctggaaacttgttcatggtgatatattccgtcctccaagaaaagggatgctgctatcagtctttctaggatccgggacacagattttaattatgacctttgtgactctatttttcgcttgcctgggatttttgtcacctgccaaccgaggagcgctgatgacgtgtgctgtggtcctgtgggtgctgctgggcacccctgcaggctatgttgctgccagattctataagtcctttggaggtgagaagtggaaaacaaatgttttattaacatcatttctttgtcctgggattgtatttgctgacttctttataatgaatctgatcctctggggagaaggatcttcagcagctattccttttgggacactggttgccatattggccctttggttctgcatatctgtgcctctgacgtttattggtgcatactttggttttaagaagaatgccattgaacacccagttcgaaccaatcagattccacgtcagattcctgaacagtcgttctacacgaagcccttgcctggtattatcatgggagggattttgccctttggctgcatctttatacaacttttcttcattctgaatagtatttggtcacaccagatgtattacatgtttggcttcctatttctggtgtttatcattttggttattacctgttctgaagcaactatacttctttgctatttccacctatgtgcagaggattatcattggcaatggcgttcattccttacgagtggctttactgcagtttatttcttaatctatgcagtacactacttcttttcaaaactgcagatcacgggaacagcaagcacaattctgtactttggttataccatgataatggttttgatcttctttctttttacaggaacaattggcttctttgcatgcttttggtttgttaccaaaatatacagtgtggtgaaggttgactgaagaagtccagtgtgtccagttaaaacagaaataaattaaactcttcatcaacaaagacctgtttttgtgactgccttgagttttatcagaattattggcctagtaatccttcagaaacaccgtaattctaaataaacctcttcccatacacctttcccccataagatctgtcttcaacactataaagcatttgtattgtgatttgattaagtatatatttggttgttctcaatgaagagcaaatttaaatattatgtgcatttgaa

SEQ ID NO: 16 - DNA, 3952 bp, Homo sapiens
ggagtttagggcctgacagaagcccgcccccgctggcgctcgtgcgcacgcgtggcgggctctcggcgcactgagcaggcgcggcctcgtgtcggccggagggggcgggcgcaacgacgcgcgctgcgtcccggcgctcggctttccctccgccggtcccgccctccgtcgcggcggcgcggtgtaccctgggatagggagcgatctccgagcgaggcggcaagatggacgcgggatttttccgcggaacaagtgcagaacaggataatcggttcagcaacaaacagaagaaactactgaagcagctgaaatttgcagaatgcctagaaaaaaaggtggacatgagcaaagtaaatttggaggttataaagccttggataacaaaaagagtaacggaaatccttgggtttgaagatgatgttgtgattgagtttatattcaaccagctggaagtgaagaatccagactccaaaatgatgcaaatcaacctgactggatttttgaatggaaaaaatgctcgagaatttatgggagaactgtggcccctgctgctaagtgcacaagaaaacatcgcgggaatcccttctgctttcctagaactgaagaaagaagaaataaaacaaagacagattgaacaagaaaaactggcatctatgaaaaagcaagatgaagacaaagataaaagagataaggaagaaaaagaaagcagcagagaaaaaagggagcggtctcgtagcccaagaagacgcaaatccagatctccttcccctagaagacgatcttcccctgtcaggagagagagaaagcgcagtcattctcgatctccccgtcacagaaccaagagccggagtccttcccctgctccagaaaagaaggaaaaaactccagagctcccagaaccttcagtgaaagtaaaagaaccttcagtacaagaggctacttctactagtgacattctgaaagttcccaaacctgaacctataccagagcctaaagaaccttctccggaaaaaaattccaaaaaagaaaaggagaaggagaagacccgaccacgatctcggtcacgctccaaatcaagatcccggacgcggtcccgctctccttctcacactcgacctagacggcgccatagatcccgatcaagatcgtattcacctagaaggcggccaagcccaagaaggcggccatctcctcgaagaagaactccgccaagaagaatgcctcctccaccaaggcatagaaggagtagatctccagtaagacgaagaagacgttcgtcagcatccttgtctgggagtagctcatcatcctcttcatctcgttcacggtcaccaccaaagaagcctcccaagaggacatccagcccccctcggaaaactcgtaggttatctccttcagcaagtcctccaaggcgaaggcacaggccatcacctcctgcaactccaccacccaaaactcggcattcccctacaccccagcagtcaaaccgtacaagaaaaagtcgtgtttctgtgtctccagggagaacttcaggtaaagtgacaaaacataaaggtactgagaaaagagaatccccttcaccagcaccgaagcctagaaaagtagagttatctgaatcggaagaagataaaggtggcaaaatggctgcagcagattctgtgcagcagagacgccaatacagacgacaaaaccagcagtcttcatctgactctggctcctcctcctcctcagaagatgaacgacccaagagatcccatgtgaagaatggtgaggttggcaggcggcggagacattccccttcccggagtgcttctccatcaccacgaaagcgccaaaaagagacttcccctcgtggtagacggaggagaagtccatccccaccacccaccagaaggcgacggtctccttctcccgcccctcctcctcgacggcgcaggactcccacaccaccaccacgacgaaggactccttctcctcccccacgtcggcgctcaccttctcctagaagatactctcctccaatacagaggagatactctccttctccacctccaaagagaagaacggcttcacctcctccccctcctaaacgaagagcatcaccatctccaccaccaaagcggcgggtctcccattctccacctcccaaacaaagaagctccccagtcaccaagagacgttcaccttcattatcatccaagcataggaaagggtcttccccaagccgctctacccgggaggcccgatcaccacaaccaaacaaacggcattcgccctcaccacggcctcgagctcctcagacctcctcaagtcctccacccgttcgaagaggagcgtcgtcatcaccccaaagaaggcagtccccgtctccaagtactaggcccattaggagagtctccaggactccggaacctaaaaagataaaaaaggctgcttccccaagcccacagtctgtaagaagggtctcatcctcccgatctgtctccgggtctcctgagccagcagctaaaaagcccccagcacctccatcccccgtccagtctcagtcaccgtctacaaactggtcaccagctgtaccggtcaaaaaggccaaaagcccaacaccgagcccatcaccgccaagaaattcagatcaggaaggaggtggaaagaaaaagaagaaaaagaaggacaagaaacacaaaaaggataagaagcacaagaagcacaaaaaacacaagaaggaaaaggctgtggctgcagctgctgcagctgctgtgacccctgcagccattgcagctgccacaaccacattagcacaggaagagccagtggcagcgccagagccgaagaaggagactgaaagtgaagctgaagataaccttgatgatttagaaaagcacctgcgtgaaaaggccctgagatcaatgaggaaggcccaagtgtccccacagtcttagggggaaatgtttgttatgatgtaaattttatttggtttgtacgcagttcaatttcaaaattgctaaaatgtgtttgagctttagactataacatttgttgtaataattgctaggttgaagttcaacatgtaaaaaaagggggcatggatttacattgcaaaaggtgtccacagtgtattagtgacattctttcattgacagctgacataattcattgagtgaaatattttaagccaaaaaaaaattccctttttaaaaaagggggtttaaatactgttggcatttttatggttcctttaaatgccctagctattcccagaggggtttttttgtttgtttttttggttttgattttctttttgtttttctttcttcttcttatttttttcatttgagtcttagctcccatttaagttatgcttctgaccttgtatggtctgtaagcttgcccagaaataagaccactgttttgaactaccacaaaagtataaatgaatattttaatgccacaatctttcctgttgcctgtggagtctctgctgaaatgaatcaggattcgagctctaggatgagacagaaaatgaaagcatgttgtttgccaggacactgtgggtttatattgatgtgtaacaagttgatttggaacactggactctcattctgttattctggttttgttttttttgttttgttttttttcttttgtaaaggcaatgagctagtcccagaaaggatccttcagttacatacaatttgtttaatgaaatgtcatggctctgttcatatttttgtcttgttcttccaattggtatatacaactttcagagcctcttgtatttggaaggctggaagggcccagactttggaatagtgtcttggtttcactgtttttgttttgattttttttttgttttgattttttttaaactaaagctatataaagcttgtggattaaacagaataaatttctaaatttaaaaattttgccactcttaaaaaaaaaaaaaaaaaaa

SEQ ID NO: 17 - DNA, 2913 bp, Homo sapiens
gaatggctggggttggctgaagagcgcacagtggagttttaatgtccgccatgttggccatggcgtattgaagagagcgagcgagagaggagcggagcggcacagcctcccaccctcccggctggtgttagtgcccggacggcgggctctgcgctccgcccctcaagtccccggcagcggttggcgagtgggggccgaacccccggttctccatgatcccgctggccggggccgtttccccagagcggagaggtatctgctgcgcctgagatgagtaaactgtcgtttcgggcgcgggcgctagacgcctcgaagccgctgccggttttccgctgtgaggatctgcccgacctgcacgaatacgcctcgataaacagggccgtgccgcagatgcccaccggaatggagaaggaagaggagtcggaacatcatcttcagcgggctatttcagcacagcaggtgtatggcgagaagagggataatatggttataccggtcccagaggcagaaagtaatattgcttactatgagtctatatatcctggggaatttaagatgccaaagcagctcattcacatacagccttttagtttggatgctgaacagcctgattatgatttggattctgaagatgaagtatttgtgaataaactgaaaaagaaaatggacatctgcccattgcaatttgaggagatgattgaccgcctagaaaaaggcagtggtcagcagccagtcagtctgcaggaagccaaactactgctaaaagaagatgatgaactaattagagaagtttatgaatattggattaaaaagagaaaaaactgtcgagggccatctcttattccatcagtaaaacaagagaagcgagatggttccagcacaaatgatccttatgtggcttttagaaggcgtactgaaaaaatgcagactcgaaaaaatcgcaaaaatgatgaagcctcttacgaaaaaatgcttaagctgcgacgagatctaagtcgagctgttactattctagagatgataaaaagaagagaaaaaagtaaaagagagctattgcacttaacactggaaattatggaaaagaggtataatttgggcgactacaatggagagatcatgtctgaggttatggcacagagacagccaatgaaacctacttatgccatccccatcatccctattactaatagcagtcaatttaaacaccaggaagcaatggatgtgaaggagttcaaagttaataagcaagataaagccgatcttatccgaccgaaacggaaatatgaaaagaagcccaaagtcttaccatcgtctgccgctgctactccccaacagacgagtcctgctgcactgccagtcttcaatgctaaagatctgaatcagtatgactttcccagctcagacgaagaacctctctcccaggttttgtctggctcttcggaagctgaggaagacaatgatcctgatggtccttttgctttccgtaggaaagcaggctgtcagtactatgctcctcacttagaccaaactggcaactggccttggactagtcctaaagatggaggattaggggatgtgcgatatagatactgcttaactactctcaccgtaccccaaaggtgtattggatttgcacgaagacgggttgggcgcggtggaagggtcttactggacagagctcattcagactatgacagtgtgtttcaccatctggatttggaaatgctttcctcaccacaacattctccagtcaatcagtttgccaatacctcagaaacaaatacctcggacaaatctttctctaaagacctcagtcagatactagtcaatatcaaatcatgtagatggcggcattttaggcctcggacaccatccctacatgacagtgacaatgatgaactctcctgtagaaaattatataggagtataaaccgaacaggaacagcacaacctgggacccagacatgcagtacctctacgcaaagtaaaagtagcagtggttcagcacactttgcatttacagccgaacaataccagcaacatcaacagcaactggcactcatgcagaaacagcagcttgcacaaattcagcaacagcaagcaaatagtaattcctccaccaacacatcacagaaccttgcatctaaccagcagaaaagtggctttcgcctgaatatacagggtttagaaagaacactacagggttttgtttctaagactttggattctgctagtgcacagtttgctgcttctgctttggtgacatcagaacaactgatgggattcaagatgaaggatgatgtggtgcttggaatcggggtgaatggcgtccttccagcctcaggagtatacaagggcttacacctcagtagtactacaccaacagcacttgtacatacaagtccatcaacggcaggttcagctttgttacagccttcaaatattacacagacttcaagttcccacagtgcactgagtcatcaagtaactgctgccaattctgcaacaactcaggttctgattgggaacaacattcgattaactgtaccttcatcagttgccactgtaaactctattgccccaataaatgcacgacatatacctaggactttaagtgctgttccatcatctgccttaaagctggccgctgcagcaaactgtcaagtttccaaggtcccatcttcatcctctgtagattcagttccaagggaaaatcatgaatcagaaaagccagcactgaacaacatagcagacaacacagtagcgatggaggtgacgtagcttcctccgagtggaactgcagcctggggacttgattaggtgctatgcatcagtagcattttgaatgcaagggatgatggaaagcagcacatgcgtttctgtggcagctgtggggacttgacagcaatgctc

SEQ ID NO: 18 - DNA, 1891 bp, Homo sapiens
ggcccggtctggagtttgcggagggccgagccgggtgcgcacggggaggcggaggcagcggcggcggcggcggcggcggcggcggcggcggagcaggaccattctggctgctgtctggacaagaagtcgtagggggtgagggtggaagctgggaaacccacaggaggcaaccacactagtttagatcttctggtgaccccacttctcgctgctcatgccgctgggactggggcggcggaaaaaggcgccccctctagtggaaaatgaggaggctgagccaggccgtggagggctgggcgtgggggagccagggcctctgggcggaggtgggtcggggggcccccaaatgggcttgcccccccctcccccagccctgcggccccgcctcgtgttccacacccagctggcccatggcagtcccactggccgcatcgagggcttcaccaacgtcaaggagctgtatggcaagatcgccgaggccttccgcctgccaactgccgaggtgatgttctgcaccctgaacacccacaaagtggacatggacaagctcctggggggccagatcgggctggaggacttcatcttcgcccacgtgaaggggcagcgcaaggaggtggaggtgttcaagtcggaggatgcactcgggctcaccatcacggacaacggggctggctacgccttcatcaagcgcatcaaggagggcagcgtgatcgaccacatccacctcatcagcgtgggcgacatgatcgaggccattaacgggcagagcctgctgggctgccggcactacgaggtggcccggctgctcaaggagctgccccgaggccgtaccttcacgctgaagctcacggagcctcgcaaggccttcgacatgatcagccagcgttcagcgggtggccgccctggctctggcccacaactgggcactggccgagggaccctgcggctccgatcccggggccccgccacggtggaggatctgccctctgcctttgaagagaaggccattgagaaggtggatgacctgctggagagttacatgggtatcagggacacggagctggcggccaccatggtggagctgggaaaggacaaaaggaacccggatgagctggccgaggccctggacgaacggctgggtgactttgccttccctgacgagttcgtctttgacgtctggggcgccattggggacgccaaggtcggccgctactaggactgcccccggaccctgcgatgatgacccgggcgcaacctggtgggggcccccagcagggacactgacgtcaggacccgagcctccagcctgagcctagctcagcagcccaaggacgatggtgaggggaggtggggccaggccccctgccccgctccaatcggtaccatcccctccctggttcccagtctggccggggtccccggcccccctgtgccctgttccccacctacctcagctgggtcaggcacagggaggggagggatcagccaaattgggcggccacccccgcctccaccactttccaccatcagctgccaaactggtccctctgtctccctggggccttgggttctgtttgggggtcatgaccttcctagtttcctgacgcagggaatacaggggagagggttgtccttccccccagcaaatgcaataatgccctcacccctcctgagaggagccccctccctgtggagcctgttacctccgcatttgacacgagtctgctgtgaaccccgcaacctcctccccacctcccatctctccttccaggcccatccctggcccagagcaggagggagggagggacgatggcggtgggtttttgtatctgaatttgctgtcttgaacataaagaatctatctgctgttggaaaaaaaaaaaaaaaaaaa

SEQ ID NO: 19 - DNA, 5851 bp, Homo sapiens
cttgcgcggtgtggcggccgatgccgctataaaggcttgttttgctgcagggctcatgctcgggagcgtggttgagcggctggcgcggttgtcctggagcaggggcgcaggaattctgatgtgaaactaacagtctgtgagccctggaacctccactcagagaagatgaaggatatcgacataggaaaagagtatatcatccccagtcctgggtatagaagtgtgagggagagaaccagcacttctgggacgcacagagaccgtgaagattccaagttcaggagaactcgaccgttggaatgccaagatgccttggaaacagcagcccgagccgagggcctctctcttgatgcctccatgcattctcagctcagaatcctggatgaggagcatcccaagggaaagtaccatcatggcttgagtgctctgaagcccatccggactacttccaaacaccagcacccagtggacaatgctgggcttttttcctgtatgactttttcgtggctttcttctctggcccgtgtggcccacaagaagggggagctctcaatggaagacgtgtggtctctgtccaagcacgagtcttctgacgtgaactgcagaagactagagagactgtggcaagaagagctgaatgaagttgggccagacgctgcttccctgcgaagggttgtgtggatcttctgccgcaccaggctcatcctgtccatcgtgtgcctgatgatcacgcagctggctggcttcagtggaccagccttcatggtgaaacacctcttggagtatacccaggcaacagagtctaacctgcagtacagcttgttgttagtgctgggcctcctcctgacggaaatcgtgcggtcttggtcgcttgcactgacttgggcattgaattaccgaaccggtgtccgcttgcggggggccatcctaaccatggcatttaagaagatccttaagttaaagaacattaaagagaaatccctgggtgagctcatcaacatttgctccaacgatgggcagagaatgtttgaggcagcagccgttggcagcctgctggctggaggacccgttgttgccatcttaggcatgatttataatgtaattattctgggaccaacaggcttcctgggatcagctgtttttatcctcttttacccagcaatgatgtttgcatcacggctcacagcatatttcaggagaaaatgcgtggccgccacggatgaacgtgtccagaagatgaatgaagttcttacttacattaaatttatcaaaatgtatgcctgggtcaaagcattttctcagagtgttcaaaaaatccgcgaggaggagcgtcggatattggaaaaagctgggtacttccagagcatcactgtgggtgtggctcccattgtggtggtgattgccagcgtggtgaccttctctgttcatatgaccctgggcttcgatctgacagcagcacaggctttcacagtggtgacagtcttcaattccatgacttttgctttgaaagtaacaccgttttcagtaaagtccctctcagaagcctcagtggctgttgacagatttaagagtttgtttctaatggaagaggttcacatgataaagaacaaaccagccagtcctcacatcaagatagagatgaaaaatgccaccttggcatgggactcctcccactccagtatccagaactcgcccaagctgacccccaaaatgaaaaaagacaagagggcttccaggggcaagaaagagaaggtgaggcagctgcagcgcactgagcatcaggcggtgctggcagagcagaaaggccacctcctcctggacagtgacgagcggcccagtcccgaagaggaagaaggcaagcacatccacctgggccacctgcgcttacagaggacactgcacagcatcgatctggagatccaagagggtaaactggttggaatctgtggcagtgtgggaagtggaaaaacctctctcatttcagccattttaggccagatgacgcttctagagggcagcattgcaatcagtggaaccttcgcttatgtggcccagcaggcctggatcctcaatgctactctgagagacaacatcctgtttgggaaggaatatgatgaagaaagatacaactctgtgctgaacagctgctgcctgaggcctgacctggccattcttcccagcagcgacctgacggagattggagagcgaggagccaacctgagcggtgggcagcgccagaggatcagccttgcccgggccttgtatagtgacaggagcatctacatcctggacgaccccctcagtgccttagatgcccatgtgggcaaccacatcttcaatagtgctatccggaaacatctcaagtccaagacagttctgtttgttacccaccagttacagtacctggttgactgtgatgaagtgatcttcatgaaagagggctgtattacggaaagaggcacccatgaggaactgatgaatttaaatggtgactatgctaccatttttaataacctgttgctgggagagacaccgccagttgagatcaattcaaaaaaggaaaccagtggttcacagaagaagtcacaagacaagggtcctaaaacaggatcagtaaagaaggaaaaagcagtaaagccagaggaagggcagcttgtgcagctggaagagaaagggcagggttcagtgccctggtcagtatatggtgtctacatccaggctgctgggggccccttggcattcctggttattatggcccttttcatgctgaatgtaggcagcaccgccttcagcacctggtggttgagttactggatcaagcaaggaagcgggaacaccactgtgactcgagggaacgagacctcggtgagtgacagcatgaaggacaatcctcatatgcagtactatgccagcatctacgccctctccatggcagtcatgctgatcctgaaagccattcgaggagttgtctttgtcaagggcacgctgcgagcttcctcccggctgcatgacgagcttttccgaaggatccttcgaagccctatgaagttttttgacacgacccccacagggaggattctcaacaggttttccaaagacatggatgaagttgacgtgcggctgccgttccaggccgagatgttcatccagaacgttatcctggtgttcttctgtgtgggaatgatcgcaggagtcttcccgtggttccttgtggcagtggggccccttgtcatcctcttttcagtcctgcacattgtctccagggtcctgattcgggagctgaagcgtctggacaatatcacgcagtcacctttcctctcccacatcacgtccagcatacagggccttgccaccatccacgcctacaataaagggcaggagtttctgcacagataccaggagctgctggatgacaaccaagctcctttttttttgtttacgtgtgcgatgcggtggctggctgtgcggctggacctcatcagcatcgccctcatcaccaccacggggctgatgatcgttcttatgcacgggcagattcccccagcctatgcgggtctcgccatctcttatgctgtccagttaacggggctgttccagtttacggtcagactggcatctgagacagaagctcgattcacctcggtggagaggatcaatcactacattaagactctgtccttggaagcacctgccagaattaagaacaaggctccctcccctgactggccccaggagggagaggtgacctttgagaacgcagagatgaggtaccgagaaaacctccctctcgtcctaaagaaagtatccttcacgatcaaacctaaagagaagattggcattgtggggcggacaggatcagggaagtcctcgctggggatggccctcttccgtctggtggagttatctggaggctgcatcaagattgatggagtgagaatcagtgatattggccttgccgacctccgaagcaaactctctatcattcctcaagagccggtgctgttcagtggcactgtcagatcaaatttggaccccttcaaccagtacactgaagaccagatttgggatgccctggagaggacacacatgaaagaatgtattgctcagctacctctgaaacttgaatctgaagtgatggagaatggggataacttctcagtgggggaacggcagctcttgtgcatagctagagccctgctccgccactgtaagattctgattttagatgaagccacagctgccatggacacagagacagacttattgattcaagagaccatccgagaagcatttgcagactgtaccatgctgaccattgcccatcgcctgcacacggttctaggctccgataggattatggtgctggcccagggacaggtggtggagtttgacaccccatcggtccttctgtccaacgacagttcccgattctatgccatgtttgctgctgcagagaacaaggtcgctgtcaagggctgactcctccctgttgacgaagtctcttttctttagagcattgccattccctgcctggggcgggcccctcatcgcgtcctcctaccgaaaccttgcctttctcgattttatctttcgcacagcagttccggattggcttgtgtgtttcacttttagggagagtcatattttgattattgtatttattccatattcatgtaaacaaaatttagtttttgttcttaattgcactctaaaaggttcagggaaccgttattataattgtatcagaggcctataatgaagctttatacgtgtagctatatctatatataattctgtacatagcctatatttacagtgaaaatgtaagctgtttattttatattaaaataagcactgtgctaataacagtgcatattcctttctatcatttttgtacagtttgctgtactagagatctggttttgctattagactgtaggaagagtagcatttcattcttctctagctggtggtttcacggtgccaggttttctgggtgtccaaaggaagacgtgtggcaatagtgggccctccgacagccccctctgccgcctccccacggccgctccaggggtggctggagacgggtgggcggctggagaccatgcagagcgccgtgagttctcagggctcctgccttctgtcctggtgtcacttactgtttctgtcaggagagcagcggggcgaagcccaggccccttttcactccctccatcaagaatggggatcacagagacattcctccgagccggggagtttctttcctgccttcttctttttgctgttgtttctaaacaagaatcagtctatccacagagagtcccactgcctcaggttcctatggctggccactgcacagagctctccagctccaagacctgttggttccaagccctggagccaactgctgctttttgaggtggcactttttcatttgcctattcccacacctccacagttcagtggcagggctcaggatttcgtgggtctgttttcctttctcaccgcagtcgtcgcacagtctctctctctctctcccctcaaagtctgcaactttaagcagctcttgctaatcagtgtctcacactggcgtagaagtttttgtactgtaaagagacctacctcaggttgctggttgctgtgtggtttggtgtgttcccgcaaaccccctttgtgctgtggggctggtagctcaggtgggcgtggtcactgctgtcatcaattgaatggtcagcgttgcatgtcgtgaccaactagacattctgtcgccttagcatgtttgctgaacaccttgtggaagcaaaaatctgaaaatgtgaataaaattattttggattttgtaaaaaaaaaa

SEQ ID NO: 20 - DNA, 11433 bp, Homo sapiens
aggctgcttcgttgcacacccgagaaagtttcagccaaacttcgggcggcggctgaggcggcggccgaggagcggcggactcggggcgcggggagtcgaggcatttgcgcctgggcttcggagcgtagcgccagggcctgagcctttgaagcaggaggaggggaggagagagtggggctcctctatcgggaccccctccccatgtggatctgcccaggcggcggcggcggcggcggaggaggaggcgaccgagaagatgcccgccctgcgccccgctctgctgtgggcgctgctggcgctctggctgtgctgcgcggcccccgcgcatgcattgcagtgtcgagatggctatgaaccctgtgtaaatgaaggaatgtgtgttacctaccacaatggcacaggatactgcaaatgtccagaaggcttcttgggggaatattgtcaacatcgagacccctgtgagaagaaccgctgccagaatggtgggacttgtgtggcccaggccatgctggggaaagccacgtgccgatgtgcctcagggtttacaggagaggactgccagtactcaacatctcatccatgctttgtgtctcgaccctgcctgaatggcggcacatgccatatgctcagccgggatacctatgagtgcacctgtcaagtcgggtttacaggtaaggagtgccaatggacggatgcctgcctgtctcatccctgtgcaaatggaagtacctgtaccactgtggccaaccagttctcctgcaaatgcctcacaggcttcacagggcagaaatgtgagactgatgtcaatgagtgtgacattccaggacactgccagcatggtggcacctgcctcaacctgcctggttcctaccagtgccagtgccctcagggcttcacaggccagtactgtgacagcctgtatgtgccctgtgcaccctcaccttgtgtcaatggaggcacctgtcggcagactggtgacttcacttttgagtgcaactgccttccaggttttgaagggagcacctgtgagaggaatattgatgactgccctaaccacaggtgtcagaatggaggggtttgtgtggatggggtcaacacttacaactgccgctgtcccccacaatggacaggacagttctgcacagaggatgtggatgaatgcctgctgcagcccaatgcctgtcaaaatgggggcacctgtgccaaccgcaatggaggctatggctgtgtatgtgtcaacggctggagtggagatgactgcagtgagaacattgatgattgtgccttcgcctcctgtactccaggctccacctgcatcgaccgtgtggcctccttctcttgcatgtgcccagaggggaaggcaggtctcctgtgtcatctggatgatgcatgcatcagcaatccttgccacaagggggcactgtgtgacaccaaccccctaaatgggcaatatatttgcacctgcccacaaggctacaaaggggctgactgcacagaagatgtggatgaatgtgccatggccaatagcaatccttgtgagcatgcaggaaaatgtgtgaacacggatggcgccttccactgtgagtgtctgaagggttatgcaggacctcgttgtgagatggacatcaatgagtgccattcagacccctgccagaatgatgctacctgtctggataagattggaggcttcacatgtctgtgcatgccaggtttcaaaggtgtgcattgtgaattagaaataaatgaatgtcagagcaacccttgtgtgaacaatgggcagtgtgtggataaagtcaatcgtttccagtgcctgtgtcctcctggtttcactgggccagtttgccagattgatattgatgactgttccagtactccgtgtctgaatggggcaaagtgtatcgatcacccgaatggctatgaatgccagtgtgccacaggtttcactggtgtgttgtgtgaggagaacattgacaactgtgaccccgatccttgccaccatggtcagtgtcaggatggtattgattcctacacctgcatctgcaatcccgggtacatgggcgccatctgcagtgaccagattgatgaatgttacagcagcccttgcctgaacgatggtcgctgcattgacctggtcaatggctaccagtgcaactgccagccaggcacgtcaggggttaattgtgaaattaattttgatgactgtgcaagtaacccttgtatccatggaatctgtatggatggcattaatcgctacagttgtgtctgctcaccaggattcacagggcagagatgtaacattgacattgatgagtgtgcctccaatccctgtcgcaagggtgcaacatgtatcaacggtgtgaatggtttccgctgtatatgccccgagggaccccatcaccccagctgctactcacaggtgaacgaatgcctgagcaatccctgcatccatggaaactgtactggaggtctcagtggatataagtgtctctgtgatgcaggctgggttggcatcaactgtgaagtggacaaaaatgaatgcctttcgaatccatgccagaatggaggaacttgtgacaatctggtgaatggatacaggtgtacttgcaagaagggctttaaaggctataactgccaggtgaatattgatgaatgtgcctcaaatccatgcctgaaccaaggaacctgctttgatgacataagtggctacacttgccactgtgtgctgccatacacaggcaagaattgtcagacagtattggctccctgttccccaaacccttgtgagaatgctgctgtttgcaaagagtcaccaaattttgagagttatacttgcttgtgtgctcctggctggcaaggtcagcggtgtaccattgacattgacgagtgtatctccaagccctgcatgaaccatggtctctgccataacacccagggcagctacatgtgtgaatgtccaccaggcttcagtggtatggactgtgaggaggacattgatgactgccttgccaatccttgccagaatggaggttcctgtatggatggagtgaatactttctcctgcctctgccttccgggtttcactggggataagtgccagacagacatgaatgagtgtctgagtgaaccctgtaagaatggagggacctgctctgactacgtcaacagttacacttgcaagtgccaggcaggatttgatggagtccattgtgagaacaacatcaatgagtgcactgagagctcctgtttcaatggtggcacatgtgttgatgggattaactccttctcttgcttgtgccctgtgggtttcactggatccttctgcctccatgagatcaatgaatgcagctctcatccatgcctgaatgagggaacgtgtgttgatggcctgggtacctaccgctgcagctgccccctgggctacactgggaaaaactgtcagaccctggtgaatctctgcagtcggtctccatgtaaaaacaaaggtacttgcgttcagaaaaaagcagagtcccagtgcctatgtccatctggatgggctggtgcctattgtgacgtgcccaatgtctcttgtgacatagcagcctccaggagaggtgtgcttgttgaacacttgtgccagcactcaggtgtctgcatcaatgctggcaacacgcattactgtcagtgccccctgggctatactgggagctactgtgaggagcaactcgatgagtgtgcgtccaacccctgccagcacggggcaacatgcagtgacttcattggtggatacagatgcgagtgtgtcccaggctatcagggtgtcaactgtgagtatgaagtggatgagtgccagaatcagccctgccagaatggaggcacctgtattgaccttgtgaaccatttcaagtgctcttgcccaccaggcactcggggcctactctgtgaagagaacattgatgactgtgcccggggtccccattgccttaatggtggtcagtgcatggataggattggaggctacagttgtcgctgcttgcctggctttgctggggagcgttgtgagggagacatcaacgagtgcctctccaacccctgcagctctgagggcagcctggactgtatacagctcaccaatgactacctgtgtgtttgccgtagtgcctttactggccggcactgtgaaaccttcgtcgatgtgtgtccccagatgccctgcctgaatggagggacttgtgctgtggccagtaacatgcctgatggtttcatttgccgttgtcccccgggattttccggggcaaggtgccagagcagctgtggacaagtgaaatgtaggaagggggagcagtgtgtgcacaccgcctctggaccccgctgcttctgccccagtccccgggactgcgagtcaggctgtgccagtagcccctgccagcacgggggcagctgccaccctcagcgccagcctccttattactcctgccagtgtgccccaccattctcgggtagccgctgtgaactctacacggcaccccccagcacccctcctgccacctgtctgagccagtattgtgccgacaaagctcgggatggcgtctgtgatgaggcctgcaacagccatgcctgccagtgggatgggggtgactgttctctcaccatggagaacccctgggccaactgctcctccccacttccctgctgggattatatcaacaaccagtgtgatgagctgtgcaacacggtcgagtgcctgtttgacaactttgaatgccaggggaacagcaagacatgcaagtatgacaaatactgtgcagaccacttcaaagacaaccactgtgaccaggggtgcaacagtgaggagtgtggttgggatgggctggactgtgctgctgaccaacctgagaacctggcagaaggtaccctggttattgtggtattgatgccacctgaacaactgctccaggatgctcgcagcttcttgcgggcactgggtaccctgctccacaccaacctgcgcattaagcgggactcccagggggaactcatggtgtacccctattatggtgagaagtcagctgctatgaagaaacagaggatgacacgcagatcccttcctggtgaacaagaacaggaggtggctggctctaaagtctttctggaaattgacaaccgccagtgtgttcaagactcagaccactgcttcaagaacacggatgcagcagcagctctcctggcctctcacgccatacaggggaccctgtcataccctcttgtgtctgtcgtcagtgaatccctgactccagaacgcactcagctcctctatctccttgctgttgctgttgtcatcattctgtttattattctgctgggggtaatcatggcaaaacgaaagcgtaagcatggctctctctggctgcctgaaggtttcactcttcgccgagatgcaagcaatcacaagcgtcgtgagccagtgggacaggatgctgtggggctgaaaaatctctcagtgcaagtctcagaagctaacctaattggtactggaacaagtgaacactgggtcgatgatgaagggccccagccaaagaaagtaaaggctgaagatgaggccttactctcagaagaagatgaccccattgatcgacggccatggacacagcagcaccttgaagctgcagacatccgtaggacaccatcgctggctctcacccctcctcaggcagagcaggaggtggatgtgttagatgtgaatgtccgtggcccagatggctgcaccccattgatgttggcttctctccgaggaggcagctcagatttgagtgatgaagatgaagatgcagaggactcttctgctaacatcatcacagacttggtctaccagggtgccagcctccaggcccagacagaccggactggtgagatggccctgcaccttgcagcccgctactcacgggctgatgctgccaagcgtctcctggatgcaggtgcagatgccaatgcccaggacaacatgggccgctgtccactccatgctgcagtggcagctgatgcccaaggtgtcttccagattctgattcgcaaccgagtaactgatctagatgccaggatgaatgatggtactacacccctgatcctggctgcccgcctggctgtggagggaatggtggcagaactgatcaactgccaagcggatgtgaatgcagtggatgaccatggaaaatctgctcttcactgggcagctgctgtcaataatgtggaggcaactcttttgttgttgaaaaatggggccaaccgagacatgcaggacaacaaggaagagacacctctgtttcttgctgcccgggaggggagctatgaagcagccaagatcctgttagaccattttgccaatcgagacatcacagaccatatggatcgtcttccccgggatgtggctcgggatcgcatgcaccatgacattgtgcgccttctggatgaatacaatgtgaccccaagccctccaggcaccgtgttgacttctgctctctcacctgtcatctgtgggcccaacagatctttcctcagcctgaagcacaccccaatgggcaagaagtctagacggcccagtgccaagagtaccatgcctactagcctccctaaccttgccaaggaggcaaaggatgccaagggtagtaggaggaagaagtctctgagtgagaaggtccaactgtctgagagttcagtaactttatcccctgttgattccctagaatctcctcacacgtatgtttccgacaccacatcctctccaatgattacatcccctgggatcttacaggcctcacccaaccctatgttggccactgccgcccctcctgccccagtccatgcccagcatgcactatctttttctaaccttcatgaaatgcagcctttggcacatggggccagcactgtgcttccctcagtgagccagttgctatcccaccaccacattgtgtctccaggcagtggcagtgctggaagcttgagtaggctccatccagtcccagtcccagcagattggatgaaccgcatggaggtgaatgagacccagtacaatgagatgtttggtatggtcctggctccagctgagggcacccatcctggcatagctccccagagcaggccacctgaagggaagcacataaccacccctcgggagcccttgccccccattgtgactttccagctcatccctaaaggcagtattgcccaaccagcgggggctccccagcctcagtccacctgccctccagctgttgcgggccccctgcccaccatgtaccagattccagaaatggcccgtttgcccagtgtggctttccccactgccatgatgccccagcaggacgggcaggtagctcagaccattctcccagcctatcatcctttcccagcctctgtgggcaagtaccccacacccccttcacagcacagttatgcttcctcaaatgctgctgagcgaacacccagtcacagtggtcacctccagggtgagcatccctacctgacaccatccccagagtctcctgaccagtggtcaagttcatcaccccactctgcttctgactggtcagatgtgaccaccagccctacccctgggggtgctggaggaggtcagcggggacctgggacacacatgtctgagccaccacacaacaacatgcaggtttatgcgtgagagagtccacctccagtgtagagacataactgacttttgtaaatgctgctgaggaacaaatgaaggtcatccgggagagaaatgaagaaatctctggagccagcttctagaggtaggaaagagaagatgttcttattcagataatgcaagagaagcaattcgtcagtttcactgggtatctgcaaggcttattgattattctaatctaataagacaagtttgtggaaatgcaagatgaatacaagccttgggtccatgtttactctcttctatttggagaataagatggatgcttattgaagcccagacattcttgcagcttggactgcattttaagccctgcaggcttctgccatatccatgagaagattctacactagcgtcctgttgggaattatgccctggaattctgcctgaattgacctacgcatctcctcctccttggacattcttttgtcttcatttggtgcttttggttttgcacctctccgtgattgtagccctaccagcatgttatagggcaagacctttgtgcttttgatcattctggcccatgaaagcaactttggtctcctttcccctcctgtcttcccggtatcccttggagtctcacaaggtttactttggtatggttctcagcacaaacctttcaagtatgttgtttctttggaaaatggacatactgtattgtgttctcctgcatatatcattcctggagagagaaggggagaagaatacttttcttcaacaaattttgggggcaggagatcccttcaagaggctgcaccttaatttttcttgtctgtgtgcaggtcttcatataaactttaccaggaagaagggtgtgagtttgttgtttttctgtgtatgggcctggtcagtgtaaagttttatccttgatagtctagttactatgaccctccccacttttttaaaaccagaaaaaggtttggaatgttggaatgaccaagagacaagttaactcgtgcaagagccagttacccacccacaggtccccctacttcctgccaagcattccattgactgcctgtatggaacacatttgtcccagatctgagcattctaggcctgtttcactcactcacccagcatatgaaactagtcttaactgttgagcctttcctttcatatccacagaagacactgtctcaaatgttgtacccttgccatttaggactgaactttccttagcccaagggacccagtgacagttgtcttccgtttgtcagatgatcagtctctactgattatcttgctgcttaaaggcctgctcaccaatctttctttcacaccgtgtggtccgtgttactggtatacccagtatgttctcactgaagacatggactttatatgttcaagtgcaggaattggaaagttggacttgttttctatgatccaaaacagccctataagaaggttggaaaaggaggaactatatagcagcctttgctattttctgctaccatttcttttcctctgaagcggccatgacattccctttggcaactaacgtagaaactcaacagaacattttcctttcctagagtcaccttttagatgataatggacaactatagacttgctcattgttcagactgattgcccctcacctgaatccactctctgtattcatgctcttggcaatttctttgactttcttttaagggcagaagcattttagttaattgtagataaagaatagttttcttcctcttctccttgggccagttaataattggtccatggctacactgcaacttccgtccagtgctgtgatgcccatgacacctgcaaaataagttctgcctgggcattttgtagatattaacaggtgaattcccgactcttttggtttgaatgacagttctcattccttctatggctgcaagtatgcatcagtgcttcccacttacctgatttgtctgtcggtggccccatatggaaaccctgcgtgtctgttggcataatagtttacaaatggttttttcagtcctatccaaatttattgaaccaacaaaaataattacttctgccctgagataagcagattaagtttgttcattctctgctttattctctccatgtggcaacattctgtcagcctctttcatagtgtgcaaacattttatcattctaaatggtgactctctgcccttggacccatttattattcacagatggggagaacctatctgcatggacctctgtggaccacagcgtacctgcccctttctgccctcctgctccagccccacttctgaaagtatcagctactgatccagccactggatattttatatcctcccttttccttaagcacaatgtcagaccaaattgcttgtttctttttcttggactactttaatttggatcctttgggtttggagaaagggaatgtgaaagctgtcattacagacaacaggtttcagtgatgaggaggacaacactgcctttcaaactttttactgatctcttagattttaagaactcttgaattgtgtggtatctaataaaagggaaggtaagatggataatcactttctcatttgggttctgaattggagactcagtttttatgagacacatcttttatgccatgtatagatcctcccctgctatttttggtttatttttattgttataaatgctttctttctttgactcctcttctgcctgcctttggggataggtttttttgtttgtttatttgcttcctctgttttgttttaagcatcattttcttatgtgaggtggggaagggaaaggtatgagggaaagagagtctgagaattaaaatattttagtataagcaattggctgtgatgctcaaatccattgcatcctcttattgaatttgccaatttgtaatttttgcataataaagaaccaaaggtgtaatgttttgttgagaggtggtttagggattttggccctaaccaatacattgaatgtatgatgactatttgggaggacacatttatgtacccagaggcccccactaataagtggtactatggttacttccttgtgtacatttctcttaaaagtgatattatatctgtttgtatgagaaacccagtaaccaataaaatgaccgcatattcctgactaaacgtagtaaggaaaatgcacactttgtttttacttttccgtttcattctaaaggtagttaagatgaaatttatatgaaagcatttttatcacaaaataaaaaaggtttgccaagctcagtggtgttgtattttttattttccaatactgcatccatggcctggcagtgttacctcatgatgtcataatttgctgagagagcaaattttcttttctttctgaatcccacaaagcctagcaccaaacttctttttttcttcctttaattagatcataaataaatgatcctggggaaaaagcatctgtcaaataggaaacatcacaaaactgagcactcttctgtgcactagccatagctggtgacaaacagatggttgctcagggacaaggtgccttccaatggaaatgcgaagtagttgctatagcaagaattgggaactgggatataagtcataatattaattatgctgttatgtaaatgattggtttgtaacattccttaagtgaaatttgtgtagaacttaatatacaggattataaaataatattttgtgtataaatttgttataagttcacattcatacatttatttataaagtcagtgagatatttgaacatgaaaaaaaaaa

SEQ ID NO: 21 - DNA, 1188 bp, Homo sapiens
cttgcagagaaagagtcttttgtgcagcaccctttaaagggtgactcgtcccacttgtgttctctctcctggtgcagagttgcaagcaagtttatcggagtatcgccatgaagttcgtcccctgcctcctgctggtgaccttgtcctgcctggggactttgggtcaggccccgaggcaaaagcaaggaagcactggggaggaattccatttccagactggagggagagattcctgcactatgcgtcccagcagcttggggcaaggtgctggagaagtctggcttcgtgtcgactgccgcaacacagaccagacctactggtgtgagtacagggggcagcccagcatgtgccaggctttcgctgctgaccccaaaccttactggaatcaagccctgcaggagctgaggcgccttcaccatgcgtgccagggggccccggtgcttaggccatccgtgtgcagggaggctggaccccaggcccatatgcagcaggtgacttccagcctcaagggcagcccagagcccaaccagcagcctgaggctgggacgccatctctgaggcccaaggccacagtgaaactcacagaagcaacacagctgggaaaggactcgatggaagagctgggaaaagccaaacccaccacccgacccacagccaaacctacccagcctggacccaggcccggagggaatgaggaagcaaagaagaaggcctgggaacattgttggaaacccttccaggccctgtgcgcctttctcatcagcttcttccgagggtgacaggtgaaagacccctacagatctgacctctccctgacagacaaccatctctttttatattatgccgctttcaatccaacgttctcacactggaagaagagagtttctaatcagatgcaacggcccaaattcttgatctgcagcttctctgaagtttggaaaagaaaccttcctttctggagtttgcagagttcagcaatatgatagggaacaggtgctgatgggcccaagagtgacaagcatacacaactacttattatctgtagaagttttgctttgttgatctgagccttctatgaaagtttaaatatgtaacgcattcatgaatttccagtgttcagtaaatagcagctatgtgtgtgcaaaataaaagaatgatttcagaaatacgaaaaaaaaaaaaaaaaaa

SEQ ID NO: 22 - DNA, 2814 bp, Homo sapiens
acttccggggcggcggttgcatcagattctaggaagtgtctgtagccgcagctgcgggtccgggattcccagccatggcagattcctccgggcagcaggctcctgactacaggtccattctgagcattagtgacgaggcagccagggcacaagccctgaacgagcacctcagcacgcgtagctatgtccaggggtactcactgtcccaggcagacgtggacgcgttcaggcagctctcggccccgcccgctgacccccagctcttccacgtggctcggtggttcaggcacatagaagcgctcctgggtagcccctgtggcaaaggccagccctgcaggctccaagcaagcaaaggccggcgtgtgcagccccagtggtcccctcctgctgggacccagccatgcagactccacctttacaacagcctcaccaggaacaagtgtttcttgcatttcttgtgatcgtcattccttcattcctaacaaaggaagtgttcatacctcaagatgggaaaaaggtgacgtggtattgctgtgggccaaccgtctatgacgcatctcacatggggcacgccaggtcctacatctcttttgatatcttgagaagagtgttgaaggattacttcaaatttgatgtcttttattgcatgaacattacggatattgatgacaagatcatcaagagggcccggcagaaccacctgttcgagcagtatcgggagaagaggcctgaagcggcacagctcttggaggatgttcaggccgccctgaagccattttcagtaaaattaaatgagaccacggatcccgataaaaagcagatgctcgaacggattcagcacgcagtgcagcttgccacagagccacttgagaaagctgtgcagtccagactcacgggagaggaagtcaacagctgtgtggaggtgttgctggaagaagccaaggatttgctctctgactggctggattctacacttggctgtgatgtcactgacaattccatcttctccaagctgcccaagttctgggagggggacttccacagagacatggaagctctgaatgttctccctccagatgtcttaacccgggttagtgagtatgtgccagaaattgtgaactttgtccagaagattgtggacaacggttacggctatgtctccaatgggtctgtctactttgatacagcgaagtttgcttctagcgagaagcactcctatgggaagctggtgcctgaggccgttggagatcagaaagcccttcaagaaggggaaggtgacctgagcatctctgcagaccgcctgagtgagaagcgctctcccaacgactttgccttatggaaggcctctaagcccggagaaccgtcctggccgtgcccttggggaaagggtcgtccgggctggcatatcgagtgctcggccatggcaggcaccctcctaggggcttcgatggacattcacggaggtgggttcgacctccggttcccccaccatgacaatgagctggcacagtcggaggcctactttgaaaacgactgctgggtcaggtacttcctgcacacaggccacctgaccattgcaggctgcaaaatgtcaaagtcactaaaaaacttcatcaccattaaagatgccttgaaaaagcactcagcacggcagttgcggctggccttcctcatgcactcgtggaaggacaccctggactactccagcaacaccatggagtcagcgcttcaatatgagaagttcttgaatgagtttttcttaaatgtgaaagatatccttcgcgctcctgttgacatcactggtcagtttgagaagtggggagaagaagaagcagaactgaataagaacttttatgacaagaagacagcaattcacaaagccctctgtgacaatgttgacacccgcaccgtcatggaagagatgcgggccttggtcagtcagtgcaacctctatatggcagcccggaaagccgtgaggaagaggcccaaccaggctctgctggagaacatcgccctgtacctcacccatatgctgaagatctttggggccgtagaagaggacagctccctgggattcccggtcggagggcctggaaccagcctcagtctcgaggccacagtcatgccctaccttcaggtgttatcagaattccgagaaggagtgcggaagattgcccgagagcaaaaagtccctgagattctgcagctcagcgatgccctgcgggacaacatcctgcccgagcttggggtgcggtttgaagaccacgaaggactgcccacagtggtgaaactggtagacagaaacaccttattaaaagagagagaagaaaagagacgggttgaagaggagaagaggaagaagaaagaggaggcggcccggaggaaacaggaacaagaagcagcaaagctggccaagatgaagattccccccagtgagatgttcttgtcagaaaccgacaaatactccaagtttgatgaaaatggtctgcccacacatgacatggagggcaaagagctcagcaaagggcaagccaagaagctgaagaagctcttcgaggctcaggagaagctctacaaggaatatctgcagatggcccagaatggaagcttccagtgagggggcacaggactgactttttaaaccattgtggactagtggctgctgtctgcctcagtgacaatgtcccagcgctcctatcatgtttacagtcacccttgggtcctaaattaagagttgtgttcatgtaggttcgtgtcgtcgttggctctgagacattgataataaatttttctcaacagtgaaaaaaaaaaaaa

SEQ ID NO: 23 - DNA, 829 bp, Homo sapiens
ccccccgagcgccgctccggctgcaccgcgctcgctccgagtttcaggctcgtgctaagctagcgccgtcgtcgtctcccttcagtcgccatcatgattatctaccgggacctcatcagccacgatgagatgttctccgacatctacaagatccgggagatcgcggacgggttgtgcctggaggtggaggggaagatggtcagtaggacagaaggtaacattgatgactcgctcattggtggaaatgcctccgctgaaggccccgagggcgaaggtaccgaaagcacagtaatcactggtgtcgatattgtcatgaaccatcacctgcaggaaacaagtttcacaaaagaagcctacaagaagtacatcaaagattacatgaaatcaatcaaagggaaacttgaagaacagagaccagaaagagtaaaaccttttatgacaggggctgcagaacaaatcaagcacatccttgctaatttcaaaaactaccagttctttattggtgaaaacatgaatccagatggcatggttgctctattggactaccgtgaggatggtgtgaccccatatatgattttctttaaggatggtttagaaatggaaaaatgttaacaaatgtggcaattattttggatctatcacctgtcatcataactggcttctgcttgtcatccacacaacaccaggacttaagacaaatgggactgatgtcatcttgagctcttcatttattttgactgtgatttatttggagtggaggcattgtttttaagaaaaacatgtcatgtaggttgtctaaaaataaaatgcatttaaactcatttgagag

SEQ ID NO: 24 - DNA, 609 bp, Homo sapiens
ttctcttcctgctctccatcatggcgcaggatcaaggtgaaaaggagaaccccatgcgggaacttcgcatccgcaaactctgtctcaacatctgtgttggggagagtggagacagactgacgcgagcagccaaggtgttggagcagctcacagggcagacccctgtgttttccaaagctagatacactgtcagatcctttggcatccggagaaatgaaaagattgctgtccactgcacagttcgaggggccaaggcagaagaaatcttggagaagggtctaaaggtgcgggagtatgagttaagaaaaaacaacttctcagatactggaaactttggttttgggatccaggaacacatcgatctgggtatcaaatatgacccaagcattggtatctacggcctggacttctatgtggtgctgggtaggccaggtttcagcatcgcagacaagaagcgcaggacaggctgcattggggccaaacacagaatcagcaaagaggaggccatgcgctggttccagcagaagtatgatgggatcatccttcctggcaaataaattcccgtttctatccaaaagagcaataaaaagttttcagtgaaatgtgcaa

SEQ ID NO: 25 - DNA, 73 bp, Homo sapiens
gcccggatagctcagtcggtagagcatcagacttttaatctgagggtccagggttcaagtccctgttcgggcg

SEQ ID NO: 26 - DNA, 2429 bp, Homo sapiens
acactccacccctactcgccctctctctctctgcttctttccttttctctctcatggtagggttatgagtcagttgccaaaaggtggggacatttcctgatgcatttgcaacactgagaagttatcttaagggaggctgggccccattctactcatctggcccagaaagtgaacaccttgggggccactaaggcagccctgctaggggagacgctccaacctgtcttctctctgtctcctggcagctctcttggcctcctagtttctacctaatcatgtccctggtggaggccatcagcctctggaatgaaggggtgctggcagcggacaagaaggactggaagggagccctggatgccttcagtgccgtccaggacccccactcccggatttgcttcaacattggctgcatgtacactatcctgaagaacatgactgaagcagagaaggcctttaccagaagcattaaccgagacaagcacttggcagtggcttacttccaacgagggatgctctactaccagacagagaaatatgatttggctatcaaagaccttaaagaagccttgattcagcttcgagggaaccagctgatagactataagatcctggggctccagttcaagctgtttgcctgtgaggtgttatataacattgctttcatgtatgccaagaaggaggaatggaaaaaagctgaagaacagttagcattggccacgagcatgaagtctgagcccagacattccaaaatcgacaaggcgatggagtgtgtctggaagcagaagctatatgagccagtggtgatccctgtgggcaagctgtttcgaccaaatgagagacaagtggctcagctggccaagaaggattacctaggcaaggcgacggtcgtggcatctgtggtggatcaagacagtttctctgggtttgcccctctgcaaccacaggcagctgagcctccacccagaccgaaaaccccagagatcttcagggctctggaaggggaggctcaccgtgtgctatttgggtttgtgcctgagacaaaagaagagctccaggtcatgccagggaacattgtctttgtcttgaagaagggcaatgataactgggccacggtcatgttcaacgggcagaaggggcttgttccctgcaactaccttgaaccagttgagctgcggatccaccctcagcagcagccccaggaggaaagctctccgcagtccgacatcccagctcctcctagttccaaagcccctggaagaccccagctgtcaccaggccagaaacaaaaagaagagcctaaggaagtgaagctcagtgttcccatgccctacacactcaaggtgcactacaagtacacggtagtcatgaagactcagcccgggctcccctacagccaggtccgggacatggtgtctaagaaactggagctccggctggaacacactaagctgagctatcggcctcgggacagcaatgagctggtgcccctttcagaagacagcatgaaggatgcctggggccaggtgaaaaactactgcctgactctgtggtgtgagaacacagtgggtgaccaaggctttccagatgaacccaaggaaagtgaaaaagctgatgctaataaccagacaacagaacctcagcttaagaaaggcagccaagtggaggcactcttcagttatgaggctacccaaccagaggacctggagtttcaggaaggggatataatcctggtgttatcaaaggtgaatgaagaatggctggaaggggagtgcaaagggaaggtgggcattttccccaaagtttttgttgaagactgcgcaactacagatttggaaagcactcggagagaagtctaggatgtttcacaaactacaaagctgaagaaaatgaagccctattacttgtttgtaagatttagcacccttctgctgtatactgtactgagacattacagtttggaagtgttaactatttattccctgttaaaatttaacctactagacaatgatgtgagtacccaggatgatttcctggggcacagtgggtgaggagatggggacaggtgaatggaggagttaggggagaggaaaagtggatggaagtgtctggaaagggcacgagagagtcttccaggtactgatcctgtttcttgctctgagtgctagctagccagctgtgttcacactgtaaacattcatcaagctgtacatttggtgcacttttctgtgtcataccacaataaaaaaaaacctagcatcttacaaaaacaagacacccaagtccaggcccaaggagtaagtacaaatattcctgtttctgaaccattactgtaattggctcttaaggcttgaagtaaccttataggttactcataaggcatatacaaataaacttgtttgttttcttttttcaaaaaaaaaaaaaaaaaa

SEQ ID NO: 27 - DNA, 4029 bp, Homo sapiens
gcttctccccgttgctaatgcgcaggcgctggcgggatagcgcgccgccgagccgagaaagaggtcacgaactctgaccccccagaaatacccaaacacagaaagctctctccgccgtgaatctcgatcccacatcccgtcggctttcttcaacctctcttcccggagcgccccccaatccacgagtggcagccgcgggactgtcgcgtcggcgcccgacgccggagtcagcagggcgcaaaagcgccggtagatcatggcaaccatagaagaaattgcacatcaaattattgaacaacagatgggagagattgttacagagcagcaaactgggcagaaaatccagattgtgacagcacttgatcataatacccaaggcaagcagttcattctgacaaatcacgacggctctactccaagcaaagtcattctggccaggcaagattccactccgggaaaagttttccttacaactccagatgcagcaggtgtcaaccagttattttttaccactcctgatctgtctgcacaacacctgcagctcctaacagataattctccagaccaaggaccaaataaggtttttgatctttgcgtagtatgtggagacaaagcatcaggacgtcattatggagcagtaacttgtgaaggctgcaaaggattttttaaaagaagcatccgaaaaaatttagtatattcatgtcgaggatcaaaggattgtattattaataagcaccaccgaaaccgctgtcaatactgcaggttacagagatgtattgcgtttggaatgaagcaagactctgtccaatgtgaaagaaaacccattgaagtatcacgagaaaaatcttccaactgtgccgcttcaacagaaaaaatctatatccgaaaggaccttcgtagcccattaactgcaactccaacttttgtaacagatagtgaaagtacaaggtcaacaggactgttagattcaggaatgttcatgaatattcatccatctggagtaaaaactgagtcagctgtgctgatgacatcagataaggctgaatcatgtcagggagatttaagtacattggccaatgtggttacatcattagcgaatcttggaaaaactaaagatctttctcaaaatagtaatgaaatgtctatgattgaaagcttaagcaatgatgatacctctttgtgtgaatttcaagaaatgcagaccaacggtgatgtttcaagggcatttgacactcttgcaaaagcattgaatcctggagagagcacagcctgccagagctcagtagcgggcatggaaggaagtgtacacctaatcactggagattcaagcataaattacaccgaaaaagaggggccacttctcagcgattcacatgtagctttcaggctcaccatgccttctcctatgcctgagtacctgaatgtgcactacattggggagtctgcctccagactgctgttcttatcaatgcactgggcactttcgattccttctttccaggctctagggcaagaaaacagcatatcactggtgaaagcttactggaatgaactttttactcttggtcttgcccagtgctggcaagtgatgaatgtagcaactatattagcaacatttgtcaattgtcttcacaatagtcttcaacaagataaaatgtcaacagaaagaagaaaattattgatggagcacatcttcaaactacaggagttttgtaacagcatggttaaactctgcattgatggatacgaatatgcctacctgaaggcaatagtactcttcagtccagatcatccaagcctagaaaacatggaacagatagagaaatttcaggaaaaggcttatgtggaattccaagattatataaccaaaacatatccagatgacacctacaggttatccagactactactcagattgccagctttaagactgatgaatgctaccatcactgaagaattgtttttcaaaggtctcattggcaatatacgaattgacagtgttatcccacatattttgaaaatggagcctgcagattataactctcaaataattggtcacagcatttgaaaactgtgactgcagtgctgtaaacttaactgttctttgccagaacacaagacaccaaattgaactcactgcttttgaggcatctggaaatttttactttaaaaagtaaccagaatccaaggtatttttattttagcttcccttaagaatttttgaagtgactgggcaggcagcagaaattaaatgaatttttcttcctgattcctttaaatgaatatgaaacactacaaatttattcttggtgaagatgatacctgaagctgtcacctcttgattatctaaactaagcgctcattctattttataaaacaaataaattagtctcttttttctgaattgtgttctagtcatatttaacttcattatgaactagtaaaaatacttaatggtcagaaatccctaaggagttagttccttgcattttactctgccataataatttttgtttaattaccatatcaaaataagattattttatgcttactggtataatgacagtattagaactataggaaataattgaatacatattttttgtcttctctaaatatcatggtgtcccttagcatatactactctcattgctggcagtgagacaggccattcatgatcttaagagttgccatttttaatgtatattattagttacaagcactttatatagcagaaaattgtttttgagaataagctagtgttgatattttaatatttttagcttactgctcgtgtttttgtttttgttttcgtttatagaggtgggtttcactgttgcccaggctggtctcaaactcctgggctcaagtgatcctgcctcagcctcccaaagtactgggattacaggcgcgtgccaccgtgcctggcctactgctgtctttgaaaataatagagactagccaggtgtagtggctcatgcctataatcccagcactttgggaggctgaggcaggcagattgcttgagctcaggagttcgagaccagcctgggcaatatagcaagacctcgtctctgtaaaaagaaagaaagtaataaagactaattgagcccaaaatgtttcactatttcaaaaaagatatttaaattgttgctctttcattccataaaaaggatctgatctctctcccacttttctgacctgagttagagcttcccaaacctgtcatgtatgggttttagccaatttcttttagatcactaaaaaaactcacccaatatgtcaaataatggatttatcatagccagtacatgttctcaaggcaagtttaaacattattttgaagctattgataattttttaaaataaagaaatattcactgatttttttcactgtaaagcacgggagggctgctttaacaacagtataagaatcagcctgaagccttgttactgctacaacaaattcattttagactcctcggatgtcttccacagtaatttattcttttagcaaacctgatactgataactgtttctttgctttgatttcttgatgaattattttggtatgtttgttgatttttaaagcaaacacggataatgcactcagagtacattttttgtaaagatttttgcaatagaagaaaagtgaagtttttgtggggatgtggattttattgcttactactttatagtaatcaaaagtttgaaaatatcaacttacagtctttaccagtttactaagggaaacttttttccctatttaaaacatgatcttagtcaacaattttatttataattatcagctaaattacatttagtataatactcaaatggaaaaatcagtagtttatacctttataaatacagtttagtaagccaaggaatcagggaaataatcctttaaaataatgtactaatagttaagatgtttcaggtgttttttctgattaaatttgctactatatttggaagactttaaaactatattaaaatgtgacttgcattacaaaaaaaaaaaaaaaa

SEQ ID NO: 28 - DNA, 2534 bp, Homo sapiens
agcctcgtctgagggggcgggggacggaggagggagcgggagtcgagcgagagcctgtggaggagtccgcctgctgtagcgtgcgtaagcaaggcagctacgccgggcggctacgctgcggaatcggcgtaggcgcctttggagaatcggcgggctgcgctccgctggggctggtcgcggagggggggaggggatgtcggtcagtgcgagatccgctgctgctgaggagaggagcgtcaacagcagcaccatggtagctcaacagaagaaccttgaaggctatgtgggatttgccaatctcccaaatcaagtatacagaaaatcggtgaagagaggttttgaattcacgcttatggtagtgggtgaatctggattgggaaagtcgacattaatcaactcattattcctcacagatttgtattctccagagtatccaggtccttctcatagaattaaaaagactgtacaggtggaacaatccaaagttttaatcaaagaaggtggtgttcagttgctgctcacaatagttgataccccaggatttggagatgcagtggataatagtaattgctggcagcctgttatcgactacattgatagtaaatttgaggactacctaaatgcagaatcacgagtgaacagacgtcagatgcctgataacagggtgcagtgttgtttatacttcattgctccttcaggacatggacttaaaccattggatattgagtttatgaagcgtttgcatgaaaaagtgaatatcatcccacttattgccaaagcagacacactcacaccagaggaatgccaacagtttaaaaaacagataatgaaagaaatccaagaacataaaattaaaatatacgaatttccagaaacagatgatgaagaagaaaataaacttgttaaaaagataaaggaccgtttacctcttgctgtggtaggtagtaatactatcattgaagttaatggcaaaagggtcagaggaaggcagtatccttggggtgttgctgaagttgaaaatggtgaacattgtgattttacaatcctaagaaatatgttgataagaacacacatgcaggacttgaaagatgttactaataatgtccactatgagaactacagaagcagaaaacttgcagctgtgacttataatggagttgataacaacaagaataaagggcagctgactaagagccctctggcacaaatggaagaagaaagaagggagcatgtagctaaaatgaagaagatggagatggagatggagcaggtgtttgagatgaaggtcaaagaaaaagttcaaaaactgaaggactctgaagctgagctccagcggcgccatgagcaaatgaaaaagaatttggaagcacagcacaaagaattggaggaaaaacgtcgtcagttcgaggatgagaaagcaaactgggaagctcaacaacgtattttagaacaacagaactcttcaagaaccttggaaaagaacaagaagaaagggaagatcttttaaactctctattgaccaccagttaacgtattagttgccaatatgccagcttggacatcagtgtttgttggatccgtttgaccaatttgcaccagttttatccataatgatggatttaacagcatgacaaaaattatttttttttttgttcttgatggagattaagatgccttgaattgtctagggtgttctgtacttagaaagtaagagctctaagtacctttcctacattttctttttttattaaacagatatcttcagtttaatgcaagagaacattttactgttgtacaatcatgttctggtggtttgattgtttacaggatattccaaaataaaaggactctggaagattttcattgaggataaattgccataatatgatgcaaactgtgcttctctatgataattacaatacaaaggttccattcagtgcagcatatacaataatgtaatttagtctaacacagttgaccctattttttgacacttccattgtttaaaaatacacatggaaaaaaaaaaaaccctatatgcttactgtgcacctagagcttttttataacaacgtctttttgtttgtttgttttggattctttaaatatatattattctcatttagtgccctctttagccagaatctcattactgcttcatttttgtaataacatttaatttagatattttccatatattggcactgctaaaatagaatatagcatctttcatatggtaggaaccaacaaggaaactttcctttaactccctttttacactttatggtaagtagcagggggggaaatgcatttatagatcatttctaggcaaaattgtgaagctaatgaccaacctgtttctacctatatgcagtctctttattttactagaaatgggaatcatggcctcttgaagagaaaaaagtcaccattctgcatttagctgtattcatatattgcatttctgtattttttgtttgtattgtaaaaaattcacataataaacgatgttgtgatgtaaaaaaaaaaaaaaa

SEQ ID NO: 29 - DNA, 3690 bp, Homo sapiens
gcgtgtggttcttggagaaagttggaggtggtggtgatttcagtcgccttggccgccttgagccggagctgagcggaggcactgggccgagcctgcttcccgggccttcctaccatgccagggctgctccctgcctccgccaccctggcacaccttcacccgcgtaccgcctcctccccgtcgctctgccttttccaaaactcacttgggccctccgtgcgcagggttcttttttggtttttctgtaaaaatcaaaacaaaaaacagagacttttgagaggagcagatgccacctaaagtcccactgcattccctgcaaagcgctcaaatgtggaagccagtcattggcatttttattttttattgattgattgattttttcaccagtggctttttgtaacctctgtgttctgctgtgtttcttgtgtttagtcttcgagtgcttcgactgaccatgatcccctgggccccctccctcctggctgggagaagagacaggacaatggacgggtgtattacgtgaaccataacactcgcacgacccagtgggaggatccccggacccaggggatgatccaggaaccagctctgcccccaggatgggagatgaaatacaccagcgagggggtgcgatactttgtggaccacaatacccgcaccaccacctttaaggatcctcgcccggggtttgagtcggggacgaagcaaggttcccctggtgcttatgaccgcagttttcggtggaagtatcaccagttccgtttcctctgccattcaaatgccctacctagccacgtgaagatcagcgtttccaggcagacgcttttcgaagattccttccaacagatcatgaacatgaaaccctatgacctgcgccgccggctctacatcatcatgcgtggcgaggagggcctggactatgggggcatcgccagagagtggtttttcctcctgtctcatgaggtgctcaaccctatgtattgtttatttgaatatgccggaaagaacaattactgcctgcagatcaaccccgcctcctccatcaacccggaccacctcacctactttcgctttataggcagattcatcgccatggcgctgtaccatggaaagttcatcgacacgggcttcaccctccctttctacaagcggatgctcaataagagaccaaccctgaaagacctggagtccattgaccctgagttctacaactccattgtctggatcaaagagaacaacctggaagaatgtggcctggagctgtacttcatccaggacatggagatactgggcaaggtgacgacccacgagctgaaggagggcggcgagagcatccgggtcacagaggagaacaaggaagagtacatcatgctgctgactgactggcgtttcacccgaggcgtggaagagcagaccaaagccttcctggatggcttcaacgaggtggccccgctggagtggctgcgctactttgacgagaaagagctggagctgatgctgtgcggcatgcaggagatagacatgagcgactggcagaagagcaccatctaccggcactacaccaagaacagcaagcagatccagtggttctggcaggtggtgaaggagatggacaacgagaagaggatccggctgctgcagtttgtcaccggtacctgccgcctgcccgtcgggggatttgccgaactcatcggtagcaacggaccacagaagttttgcattgacaaagttggcaaggaaacctggctgcccagaagccacacctgcttcaaccgtctggatcttccaccctacaagagctacgaacagctgagagagaagctgctgtatgccattgaggagaccgagggctttggacaggagtaaccgaggccgcccctcccacgccccccagcgcacatgtagtcctgagtcctccctgcctgagaggccactggccccgcagcccttgggaggcccccgtggatgtggccctgtgtgggaccacactgtcatctcgctgctggcagaaaagcctgatcccaggaggccctgcagttcccccgacccgcggatggcagtctggaataaagccccctagttgcctttggccccacctttgcaaagttccagagggctgaccctctctgcaaaactctcccctgtcctctagaccccaccctgggtgtatgtgagtgtgcaagggaaggtgttgcatccccaggggctgccgcagaggccggagacctcctggactagttcggcgaggagactggccactgggggtggctgttcgggactgagagcgccaagggtctttgccagcaaaggaggttctgcctgtaattgagcctctctgatgatggagatgaagtgaaggtctgagggagcgggccctggggcgaggccatctctgcctgcctccctagcaggcgccagcggtggaggctgagtcgcaggacacatgccggccagttaattcattctcagccaatgaaggtttgtctaagctgcctgggtatccacgggacaaaaacagcaaactccctcagactttgtccatgtataaacttgaagtggttgtgttgtagggttgcaggttttttgttacgctgctgtcactttctgtccaggagctggcaccccaggtgttctgagaccttgagggacccagacctttgggtccaagagtttcccaaacagccacgcctctcaggaacccacctggcggttccgtgagctcaggcaggcctgacccggcggcacagcctggcagggacctcgtccccaagcctggcagaatgagaggggttgaggtcccgagcgccactcctagccttgccgccttcaatagagaagaaatccctttgctagatagggtcccccaggcagtccccagtggcgggacacaggggtccggctgtggagctcccctgccagcccctggagctccaggagggcctgttggtcccctgttcagaatggagtgcagcccgccagcggaaagtgttcattctgcataggtgtgaggctttatctgcacacaggacatgaaaaccagcagaaaggccctgagctgctgcatagccccatctgatttctgcagttcccgccagcctccaacacggggactctgccgtaactggaatcttcataggtcatattgaaatcttcaaggtgaccatgccccaccggggtgctggggcagtagtcatggcagactcccggcctgggcccccaggattctaggacccccaggcagccccttggactggtcccgggtgccttccaagcacagtctccatgctcccagattctcgaccttcccccggcccgggaggtgcagcctgcgtctgcctctgtcgtgtgtgctgatttgagtggcttagcttgccacagcgcagcctcttctgtccctttcagtcatttgctgtacttccctgtggcacgttaccatggaagccgctccagggtgggtcagggtgcaagctgctggtgaggtttggaagcatcaggctcacgggtgttcatgtgtgttcgtgcgtgtgtgtgcgtacgtgtatataactgaagtgtctgtacggaatgccctttgctagccatgggctggtcaccagattgttttgtaatgcccgccccttgcctcgatattgccagtttcttgtgcaataaacaatcagcagctgtaaaaaaaaaaaaaaaaaaaaaaaa

SEQ ID NO: 30 - DNA, 466 bp, Homo sapiens
cttgccgcgctgcactccaccacgcctcctccaagtcccagcgaacccgcgtgcaacctgtcccgactctagccgcctcttcagctcgccatggatcccaactgctcctgcgccgccggtgactcctgcacctgcgccggctcctgcaaatgcaaagagtgcaaatgcacctcctgcaagaaaagctgctgctcctgctgccctgtgggctgtgccaagtgtgcccagggctgcatctgcaaaggggcgtcggacaagtgcagctgctgcgcctgatgctgggacagccccgctcccagatgtaaagaacgcgacttccacaaacctggattttttatgtacaaccctgaccgtgaccgtttgctatattcctttttctatgaaataatgtgaatgataataaaacagctttgacttgaaaaaaaaaaaaaaaaaaaaaaaaaaaaaaaaaaaaaaaaaaaaaaaa

SEQ ID NO: 31 - DNA, 2426 bp, Homo sapiens
ctcttttctaagcttgtctcttaaaacccactggacgttggcacagtgctgggatgactatggagacccaaatgtctcagaatgtatgtcccagaaacctgtggctgcttcaaccattgacagttttgctgctgctggcttctgcagacagtcaagctgctcccccaaaggctgtgctgaaacttgagcccccgtggatcaacgtgctccaggaggactctgtgactctgacatgccagggggctcgcagccctgagagcgactccattcagtggttccacaatgggaatctcattcccacccacacgcagcccagctacaggttcaaggccaacaacaatgacagcggggagtacacgtgccagactggccagaccagcctcagcgaccctgtgcatctgactgtgctttccgaatggctggtgctccagacccctcacctggagttccaggagggagaaaccatcatgctgaggtgccacagctggaaggacaagcctctggtcaaggtcacattcttccagaatggaaaatcccagaaattctcccatttggatcccaccttctccatcccacaagcaaaccacagtcacagtggtgattaccactgcacaggaaacataggctacacgctgttctcatccaagcctgtgaccatcactgtccaagtgcccagcatgggcagctcttcaccaatggggatcattgtggctgtggtcattgcgactgctgtagcagccattgttgctgctgtagtggccttgatctactgcaggaaaaagcggatttcagccaattccactgatcctgtgaaggctgcccaatttgagccacctggacgtcaaatgattgccatcagaaagagacaacttgaagaaaccaacaatgactatgaaacagctgacggcggctacatgactctgaaccccagggcacctactgacgatgataaaaacatctacctgactcttcctcccaacgaccatgtcaacagtaataactaaagagtaacgttatgccatgtggtcatactctcagcttgctgagtggatgacaaaaagaggggaattgttaaaggaaaatttaaatggagactggaaaaatcctgagcaaacaaaaccacctggcccttagaaatagctttaactttgcttaaactacaaacacaagcaaaacttcacggggtcatactacatacaagcataagcaaaacttaacttggatcatttctggtaaatgcttatgttagaaataagacaaccccagccaatcacaagcagcctactaacatataattaggtgactagggactttctaagaagatacctacccccaaaaaacaattatgtaattgaaaaccaaccgattgcctttattttgcttccacattttcccaataaatacttgcctgtgacattttgccactggaacactaaacttcatgaattgcgcctcagatttttcctttaacatcttttttttttttgacagagtctcaatctgttacccaggctggagtgcagtggtgctatcttggctcactgcaaacccgcctcccaggtttaagcgattctcatgcctcagcctcccagtagctgggattagaggcatgtgccatcatacccagctaatttttgtattttttattttttttttttagtagagacagggtttcgcaatgttggccaggccgatctcgaacttctggcctctagcgatctgcccgcctcggcctcccaaagtgctgggatgaccagcatcagccccaatgtccagcctctttaacatcttctttcctatgccctctctgtggatccctactgctggtttctgccttctccatgctgagaacaaaatcacctattcactgcttatgcagtcggaagctccagaagaacaaagagcccaattaccagaaccacattaagtctccattgttttgccttgggatttgagaagagaattagagaggtgaggatctggtatttcctggactaaattccccttggggaagacgaagggatgctgcagttccaaaagagaaggactcttccagagtcatctacctgagtcccaaagctccctgtcctgaaagccacagacaatatggtcccaaatgactgactgcaccttctgtgcctcagccgttcttgacatcaagaatcttctgttccacatccacacagccaatacaattagtcaaaccactgttattaacagatgtagcaacatgagaaacgcttatgttacaggttacatgagagcaatcatgtaagtctatatgacttcagaaatgttaaaatagactaacctctaacaacaaattaaaagtgattgtttcaaggtgatgcaattattgatgacctattttatttttctataatgatcatatattacctttgtaataaaacattataaccaaaaca

SEQ ID NO: 32 - DNA, 5365 bp, Homo sapiens
gttttccgtacagcagcatggcggccgccgacgggaggcggtcatagcatcacgcccgggggaagaggccgccgtaaaggaagctctgcttcctcttcttccttctcccgcctcccaccggctgtcgtaaaacggtgaatggagagcgagttgtgggggggaaaaagggaggacagggggcgcggagtcagagtggcgcagcaagtggccgcaggtggcgacggtggcggggggtggggtgtgaggtaatccaggggtcgcggaagaggaggctgagagggtcaaaagaaaactaaagctgcagtccggcctactgttccgggggccgcggagcccccacccggggagatggacctcaaccggatcatccaggcgctgaagggcaccatcgacccgaagttgcggattgcagccgagaacgagctcaaccagtcctacaagattatcaattttgcccccagtttacttcggattatagtctctgaccatgtggaattcccagtacgacaggcagctgccatttacctgaagaacatggtgacacaatactggccagatcgagaacctccaccaggagaagcaatatttccattcaacattcacgaaaacgatcgccagcaaatacgtgataacattgtggaaggaataattcggtctccagatttagtgagagtccaattaacaatgtgtctccgtgccatcataaaacatgattttcctggtcactggccaggagtggtcgacaagatagactattacttgcaatcacagagcagtgcaagctggcttggcagtttattatgcctgtatcaactggtgaagacatatgaatataagaaagcagaagagagagaacctcttataatagcaatgcagatattcctgcctcgtattcagcaacaaattgttcagctccttcctgattcctcctattattctgtattactgcagaaacaaattctgaaaatcttttatgcacttgttcagtatgcattgcctcttcagctagtgaataaccaaaccatgacaacatggatggagatcttccgaactattatcgacaggaccgttcctcctgagactctgcacattgatgaggatgatagaccagaactggtatggtggaagtgtaagaagtgggcactgcatattgtagctcggctctttgaacgatatggaagcccaggaaatgtcacaaaagaatactttgaattttctgaattctttttgaaaacctatgcagtgggcattcagcaggtgctactaaaaattttagatcaatatagacagaaagaatatgtagctccccgtgttcttcagcaagcattcaactatctcaaccaaggggtggttcattctataacctggaagcagatgaagccacacatacagaatatctctgaagatgtgattttttctgtgatgtgttataaagatgaggatgaagagctgtggcaagaagatccatatgagtatataaggatgaaatttgatatttttgaagattatgcttctcccaccacagcagcccagactctcttatatactgctgcaaagaaaagaaaagaggtgttgccaaaaatgatggcattctgttatcaaatcctgacagacccgaactttgaccctaggaagaaagatggagccctgcatgtgattggttccctagctgagattttactgaagaagagtttattcaaggaccaaatggagctgtttctacaaaatcatgtatttccattattattgtctaacctgggatatcttcgagctagatcttgctgggtacttcatgcatttagttctttgaagttccataatgagctcaatctaagaaatgccgttgaattagcgaagaagagcctgattgaagataaagagatgcctgtcaaagttgaagctgcccttgctcttcagtctttaatttctaaccagatacaagctaaggaatatatgaagccacatgtgaggcctattatgcaggaactgttgcacattgttagagagacagaaaatgatgatgttactaatgtcatccagaagatgatatgtgaatacagtcaagaggtagcctcaattgctgttgatatgacccaacacttggctgagatatttggcaaagttcttcaaagtgatgaatatgaagaagttgaagacaaaacagtaatggctatgggaattttacataccattgatactatcttaacagttgtagaagatcataaagagattacccagcagttagagaatatctgtctacggatcattgatcttgttctgcagaaacatgtaattgaattctatgaagaaattctttccctggcatacagtttaacctgccacagtatttcccctcaaatgtggcagcttctaggtatactatatgaagtgtttcagcaggattgctttgaatactttacagacatgatgcctctcctgcataattatgtgacaatagatacagataccttactatcaaatgcaaaacatttagaaattctttttacaatgtgtaggaaggtactatgtggagatgcaggagaagatgcagagtgtcatgcagctaaacttctggaagtcatcattcttcagtgcaaaggaaggggaattgatcagtgcattccactcttcgttcaacttgttttggagagattaactcgaggggtcaaaactagtgagcttcgtactatgtgtcttcaggttgcaattgctgccttgtactacaaccctgatttgctgctacatactttagaacgaattcagttgcctcacaaccctggacctatcactgtacagtttataaatcaatggatgaatgatacagattgttttcttgggcatcatgaccggaagatgtgtataataggactgagtatccttttggaattgcaaaatcgacctcctgcagtagatgctgtggtgggacagattgttccctcaattcttttccttttccttggcctaaagcaggtctgtgctactagacaactggtaaaccgggaagatcgttcaaaagcagagaaagctgatatggaagaaaatgaggagatttcaagtgatgaagaggagacaaatgtaactgctcaagcaatgcagtcaaataatggaagaggtgaagatgaggaggaggaagatgatgactgggatgaagaagtattggaagaaaccgcgcttgaggggttcagtactccacttgaccttgacaatagtgtggatgaatatcagttttttacacaagctctgataactgtgcagagtcgagatgcagcctggtaccagctgctgatggcaccactcagcgaggatcagaggacagcactgcaggaggtgtacacactggcagagcaccgacggacggtggcagaggcaaagaagaagattgaacaacagggaggcttcacctttgaaaacaaaggagtcctctccgcatttaattttgggactgtgcccagcaacaactgaaggaaagaacatcagctgaccaaatgtcatcgctgcattttatttcacaagaggagtgtgagggtcaaggggatgaaatgaggggctgcttttagggccctcctgctgtgccagttaccatctggcattaggcagcacttttatctactctttcccctttgacctttgtcaccctgaaatatatattttaaacagctactgtaagtatgaaatgaaagaaaaacaatcattggacggaaaaggacaacccatatgttccaaaggctgaatgcccaaggttgttttagaggattggatagacttgcacgtctcaggtttttgccatgcagaatcaatggatttatgcggataacagtgccttctgttgtacatgaattatcagaaaaaaatttttggagtgcattgcaattttttttaaagcataaaacatatttctagatacaacataaaccttggttatatgtcaactattctgcattttactctgtgaatttattgttaggcagttactgcaagtcactctggtttcaaaatcttcacggctccctctgctcaccctgctgctggggggcttttttcaggggttgtattataaaatatgcactggctgtggtttttcataagatgttttgtggctttttaaagaagtgtcttactccctcttctctcatttttttctgccttgaaaaggggtggtatttcttttggggtcaacaaatacacatatcagtttcactcctaaccttgtaagttcaggactcattttcttggcagcaagtggcaggggctctttagtcactggagttaacagtaagtctgagtatattctgaataatgtaattatgcaattaattgataatcatacctaaagcacattgaacttctaagagacaggtgctacgtaagcacactgtctttctggatggggacttgtattttaaataacttatcattccagctatgttggactagggtccaaagcattttataatatttttttttaatctaggaaaaagacccaaacaaatctaacttcttgctttctcacctatttgaattttctcctacctaatttgtttgtgtctttattatagctcagtttgacttctcaaacttttcaagggttggggcagctgcacttttaggttgcctataggaaatattgcatatggagattacagtgtttttctgacctagttcaagaccagaacatgggtcatagggtttttattcagcaaaatgaaaacgtatcttcagaacttaacatattactggatgtgatacagattttgctttctgtggaattgaaaattcacaaaaattcacagcttaaatttcccatcagtgactggaggaatttttttcaggtgcttcctatattaccatccctcatgcatattaactctttagaattttaggttaagtgatgtctatagaagtagcctggaaaaccatgagttttggagttcagtgaccccctgctttcctctgctcctcccttcccaaggcattgaagctgaatgtgccaactggcagttagaagcgaaagatggcattgggagaaattttagagagctttcaaactctttattctcatgttccacatggtctaattttaacataaataatatgccttcacactggattgtaaaaggcatgtgatttttgagattttattttgtgatgtattgtcttctgcagtattaaagggaaagagatattaatgtgcattaccctatcttgtttttgaagccagggtagttgtatgattttgttaccagcagtgctaacctgaatgtgacctggttaccttggaaatgcaggaacttatatgaatgtactataaaataaaatgcggactgattcccaggattctgaaaaaaaaaaaaaaaaaaaaaaaaaa

SEQ ID NO: 33 - DNA, 1086 bp, Homo sapiens
gaaggctgggctgggggaagaggcgtggcggcgctgtgcgcgtgcacaaaagagagctgaggggcgggggcgctgcggcacagctggtttgagcaactgaactggaaacaagatgcaggaccccaacgcagacactgaatggaatgacatcttacgcaaaaagggtatcttaccccccaaggaaagtctgaaagaattggaagaggaggcagaagaggagcagcgcatcctccagcagtcagtggtgaaaacatatgaagatatgactttggaagagctggaggatcatgaagacgagtttaatgaggaggatgaacgtgctattgaaatgtacagacggcggagactggctgagtggaaagcaactaaactgaagaataaattcggagaagttttggagatctcagggaaggattatgttcaagaagttaccaaagctggcgagggcttgtgggtcatcttgcacctttacaaacaaggaattcccctctgtgccctgataaatcagcacctcagtggacttgccaggaagtttcctgatgtcaaatttatcaaagccatttcaacaacctgcatacccaattatcctgataggaatctgcccacgatatttgtttacctggaaggagatatcaaggctcagtttattggtcctctggtgtttggcggcatgaacctgacaagagatgagttggaatggaaactgtctgaatctggagcaattatgacagacctggaggaaaaccctaagaagccgattgaagacgtgttgctgtcctcagtgcggcgctctgtcctcatgaagagggacagcgattccgagggtgactgaggctacagcttctatcacatgccgaactttcttgtgacaaattgtctggattttttaaaaaaggaaaaagcaagaatgaatccttgtggtttttagttttgtataaattatgtttcaaatctttacattttggaaataatcattgctggagattctgttaaatattttggaactctttttttttttaaattatagtatttcctctaaaaaaaattaaaaccagccatttgtatggcaaatgtcaaaaaaaaaaa

SEQ ID NO: 34 - DNA, 994 bp, Homo sapiens
gcgcacgcagggtggggggagggagcgcacgacgtgcgcgcaccctctcccctcgtccaccgctgccgcctccttcttctgccgctcctggtgctgcttgtgtgctcgtttggtgcggacctggtacctcttttgtgaagcggcagctgaggagactccggcgctcgccatggccgacgaaaagcccaaggaaggagtcaagactgagaacaacgatcatattaatttgaaggtggcggggcaggatggttctgtggtgcagtttaagattaagaggcatacaccacttagtaaactaatgaaagcctattgtgaacgacagttggaaatggaggatgaagatacaattgatgtgttccaacagcagacgggaggtgtctactgaaaagggaacctgcttctttactccagaactctgttctttaaagaccaagattacattctcaattagaaaactgcaatttggttccaccacatcctgactactaccgtatagttttctctattctttcatttcccccttccccattcctttattgtacataaagtaactggtatatgtgcacaagcatattgcattttttttttttttaactaaacagccaatggtatgttttgattgacatcaagtggagacgggatggggaaaaatactgattctgtgaaaataccccctttctccattagtggcatgctcattcagctcttatctttatattccagtaagttattttgctctcactgttttaacaaaaaaaaaaaacaacaacataaaaatccttgcataccttgttcaattggagaattttaatgtttttcatttatcattgtaaaaccaaggacaattttataacttttttgtacgtagctgttacatgtagggcaatctgtctttaagtagggataaattactctaaaacaaaaaagaatcctagatagttttcccttcaagtcaagcgtcttgttgtttaaataaacttcttgtttaaaatga

SEQ ID NO: 35 - DNA, 2758 bp, Homo sapiens
gaaaatcatgaagggctttttgttttcttttgtttgtatatatgtttattggtaacaggtgacactggaagcaatgaacaccacagtgatgcaaggcttcaacagatctgagcggtgccccagagacactcggatagtacagctggtattcccagccctctacacagtggttttcttgaccggcatcctgctgaatactttggctctgtgggtgtttgttcacatccccagctcctccaccttcatcatctacctcaaaaacactttggtggccgacttgataatgacactcatgcttcctttcaaaatcctctctgactcacacctggcaccctggcagctcagagcttttgtgtgtcgtttttcttcggtgatattttatgagaccatgtatgtgggcatcgtgctgttagggctcatagcctttgacagattcctcaagatcatcagacctttgagaaatatttttctaaaaaaacctgtttttgcaaaaacggtctcaatcttcatctggttctttttgttcttcatctccctgccaaatacgatcttgagcaacaaggaagcaacaccatcgtctgtgaaaaagtgtgcttccttaaaggggcctctggggctgaaatggcatcaaatggtaaataacatatgccagtttattttctggactgtttttatcctaatgcttgtgttttatgtggttattgcaaaaaaagtatatgattcttatagaaagtccaaaagtaaggacagaaaaaacaacaaaaagctggaaggcaaagtatttgttgtcgtggctgtcttctttgtgtgttttgctccatttcattttgccagagttccatatactcacagtcaaaccaacaataagactgactgtagactgcaaaatcaactgtttattgctaaagaaacaactctctttttggcagcaactaacatttgtatggatcccttaatatacatattcttatgtaaaaaattcacagaaaagctaccatgtatgcaagggagaaagaccacagcatcaagccaagaaaatcatagcagtcagacagacaacataaccttaggctgacaactgtacatagggttaacttctatttattgatgagacttccgtagataatgtggaaatcaaatttaaccaagaaaaaaagattggaacaaatgctctcttacattttattatcctcgtgtacagaaaagattatataaaatttaaatccacatagatctattcataagctgaatgaaccattactaagagaatgcaacaggatacaaatggccactagaggtcattatttctttctttctttttttttttttttaatttcaagagcatttcactttaacattttggaaaagactaaggagaaacgtatatccctacaaacctcccctccaaacaccttctcacattcttttccacaattcacataacactactgcttttgtgccccttaaatgtagatatgtgctgaaagaaaaaaaaaacgcccaactcttgaagtccattgctgaaaactgcagccaggggttgaaagggatgcagacttgaagagtctgaggaactgaagtgggtcagcaagacctctgaaatcctgggtaaaggattttctccttacaattacaaacagcctctttcacattacaataatataccataggaggcacaagcaccattattaagccactttgcttacaccttaagtgtgtacaattcaagtgtgagaatgctgtgttaactattctttggaattctccttctgtccagcaaatactctaatgatggttaaacatggcacctactcagcaatgccttcctggaccacaacccctatccccctgccccaccctcctcattaaaaacaaatacttctactgtttgggtgtgtgatagggttctcaatgcagatctcccttttctagttagctatattcttgactgcatccgctaaaaatgttaaagcttcttgagagacagacatgccagattttcttggtatctcccataatacgacctacagtccatggtctacagatgttttaaatagaattgctattctcgatacatacaaagacgtaattgctgacccacaatcagtaacatccatattgagagatttttcaaaggatggtgaccctgcttgtatttatttaccttggtattttttcttgcatccttctgtgattcaaaaaagtaaaatgtggctttctgaaatgatggataagagtctacatcttctagaaaaaatacataaaggagtagttaagctctgtaaatgtgccacgagctccaacacgaccatcgtagggtgaagcccacgttttcttccatggcctcaaaggccctagaacttgcctacctttctggccttacctcctagctacttatccatctcttgaactttatactcttgtataaatttctaactttcagaaaatgccatactctgttttggcaccacacatgtatatttccccctggtacacttggaagactcttatccatctgtgaaaccctatgttgtcatcacttggtccatgaaatattacctggccaatatcccaccatcacctcaaacccaatcaccccctcctctgtatgctgtcacacctatattattaaacttatcacattgcattgtaattacttcctgacctttgtatctactcttttagtaactgatgtatatatctgaaaggagagattgtttcattgtgcaatcaataaatgtttgataaaataaagccc

SEQ ID NO: 36 - DNA, 7553 bp, Homo sapiens
agatgccaccaccactgccaagcagctgcattcctcgccgggaaattcctccaggcaagagaacgcagagacgcccgcccgcagtccgggggaggacgcttcaccaggtgctggccacgaacaggaggctttcctgggtgtgaggggtgcgccagggtcgcccacccaggagcggcccgcgggaggactaggcgaggcccctaacggagcccccagtgtgtgtgccgaagaaggctccctggggccccgcaacgcccgcagccagccccccaagggcgcgtctgatttgccaggtgagcctccggccgagggcgcagcgcacacggccagctccgcgcaggcagactgcacagcccgccccaagggtcacgcccaccctgctaaggtgctaactttggacatctacttgagtaagactgagggggcacaagtggacgagccggtcgtgattactcccagagcggaagattgcggtgactgggacgacatggagaagaggtccagcggccgtaggtcggggaggcggagggggtcgcagaaatccaccgactcccccggcgcggacgccgagctccctgagagcgctgccagggacgacgcggtgttcgacgacgaggtggcgccaaacgcggccagcgataacgcctcggcggaaaagaaagtgaaatctccgcgggcagccctcgacgggggcgttgcctccgctgcgagcccagagtccaagcccagccccggtaccaaagggcagctccgaggggagtcggaccggagcaaacagccacccccggcttcgtcccccacgaagaggaagggcaggagccgtgccctcgaggccgtgcccgccccgcccgccagcggcccccgggctcccgccaaggagtccccacccaagagggtgcccgatcccagcccagtcaccaagggcactgcggccgagagcggggaggaggcggcgcgggccatcccccgcgagctcccggtcaagagcagctcgctgctgccggagatcaagcccgagcacaagaggggcccgctccccaaccacttcaacggccgggcagagggaggtcgaagcagagagctgggcagagcggccggagcgcctggagcttctgacgccgacggcttgaagcccaggaaccatttcggcgtgggcaggtcgacagtgaccactaaagtgaccctccctgccaagcccaaacatgtggaactaaatcttaaaacccctaagaatcttgacagtttgggaaatgagcacaatccatttagccagccagttcacaaaggcaacactgccaccaaaatctccttatttgaaaacaaacggacaaacagtagcccaagacacactgacattcgaggccaaaggaatactcctgcctctagtaaaacgtttgttgggagggcaaagctgaatttagccaaaaaagccaaagaaatggagcaacctgaaaagaaagtaatgccaaacagtccccagaatggtgtgctggttaaggaaactgctatagaaaccaaagttaccgtctcggaagaagagattctgccagcaaccagaggaatgaatggagactcttctgagaatcaagctcttggtcctcagcctaaccaagatgataaagcagatgtacaaacagatgctggctgcctttcagaaccagtggcttctgctctgattcctgtcaaggatcataagctcttagagaaggaggactcagaggctgcagacagcaaaagccttgtacttgaaaatgtaaccgatacagcacaagacatccccaccactgtggataccaaagatttacctccaacggccatgccaaagccacagcatacattttctgactcacagtcccctgctgagtcatctcctgggccttctctttcactgtctgcacccgctcctggggatgttcccaaagacacatgtgttcaatcacccataagcagtttcccatgcactgatctaaaagtgtcagaaaaccataaaggatgtgttttgcctgtgtctcgtcagaacaatgagaaaatgccacttttagaacttggaggagaaacaacccctcctttgtccacagagcgtagtccagaagctgtgggaagtgagtgtccatccagagtcctcgtccaggtcaggtccttcgtgctccccgtggagagcacccaggatgtgagctcccaggtcatcccagagagctctgaagttagagaagtgcagttgccaacttgtcacagtaatgaacctgaagtggtttccgttgcaagttgtgctcccccacaagaggaagtactgggcaatgaacactctcattgcacagcagagctcgcggcaaaatctggcccacaagtcataccgccagcatcagagaaaactctgcctattcaggctcaaagtcagggcagcagaacacccctgatggctgaatccagtcccaccaactctcccagcagcggaaatcacttagccactcctcaaaggccagatcagactgttacaaatggccaggatagccctgccagccttttgaacatttctgctggtagtgatgatagtgtatttgattcttcttctgatatggaaaaattcactgaaattataaaacagatggatagcgcagtttgtatgcccatgaaaagaaagaaggccaggatgccaaactctcctgctcctcactttgccatgcctcctattcacgaagaccatttagaaaaggtgtttgatcccaaagtgtttacctttggtttggggaagaagaaggaaagtcagccagaaatgtcaccggctttacatttgatgcagaaccttgacacaaaatccaaactgagacccaaacgtgcatctgctgaacagagcgtcctcttcaagtccctgcacaccaacactaatgggaacagtgagcctctggtgatgccggaaatcaatgacaaagagaacagggacgtcacaaatggtggcattaagagatcgagactagaaaaaagtgcacttttctcaagcttgttatcttctttaccacaagacaaaatcttttctccttctgtgacatcagtcaacactatgaccacggctttcagtacttctcagaacggttccctatctcagtcttcagtgtcacagcccacgactgagggtgccccgccctgtggtttgaacaaagaacagtcaaatcttctgcccgacaactccttaaaggtcttcaatttcaactcgtcaagtacatcacactccagtttgaaaagtccaagccacatggaaaaatacccgcaaaaagagaaaaccaaagaagatctggattcacgaagcaacctacacttgccagaaactaaattttctgaattgtcaaaactgaagaatgatgatatggaaaaggctaatcatattgaaagtgttattaaatcaaacttgccaaactgtgcaaacagtgacaccgacttcatgggtcttttcaaatcaagccggtatgacccaagcatttctttttctggaatgtcattatcagacacaatgacacttagaggaagtgtccaaaataaactcaatccccgacctggaaaggtagtgatatatagtgaacccgacgtctctgagaagtgcattgaagttttcagtgacattcaggattgcagttcttggagcctctctccagtgatactcataaaagttgttagaggatgttggattttgtatgagcaaccaaattttgaagggcactccatccccttagaagaaggagaattggaactctctggtctctggggtatagaagacattttggaaaggcacgaagaagcagagtctgataagccagtggtgattggttccatcagacatgtggttcaggattacagagttagtcacattgacttatttactgaaccagaagggttaggaatcctaagttcctactttgatgatactgaagaaatgcagggatttggtgtaatgcagaagacttgttccatgaaagtacattggggcacgtggctgatttatgaagaacctggatttcagggtgttcctttcatcctggaacctggtgaataccctgacttgtccttctgggatacagaagcagcgtacattggatccatgcggcctctgaaaatgggtggccgtaaagttgaattccctacagatccaaaggtagttgtttatgaaaagcctttctttgaaggaaaatgtgtggaactagaaacaggaatgtgtagttttgtcatggagggaggtgaaacagaagaggcgactggagacgatcatttgccgtttacgtcagtggggtctatgaaagttctaagaggcatttgggttgcatatgagaaacctggatttaccggtcatcagtatttgctagaagaaggagaatacagggactggaaagcctggggaggttacaatggagagcttcagtctttacgacctatattaggtgatttttcaaatgctcacatgataatgtacagtgaaaaaaactttggatccaaaggttccagtattgatgtattgggaattgttgctaatttaaaggagactggatatggagtgaagacacagtctattaatgtactgagtggagtatgggtagcctatgaaaatcctgacttcacaggagaacagtatatactggataaaggattttataccagttttgaggactggggaggcaaaaattgtaagatctcttctgttcaacctatatgtttggattctttcactggcccaaggagacgaaatcagattcacttgttttcagaaccacagtttcaaggtcacagtcaaagttttgaagaaacaacaagtcaaattgatgattcattttctaccaagtcttgcagagtttcaggaggcagctgggttgtatatgatggagaaaatttcactggtaatcaatacgtgttggaagaaggccattatccttgtctgtctgcaatgggatgcccgcctggagcaactttcaagtctcttcgttttatagatgttgaattttctgaaccaacaattattctctttgaaagagaagacttcaaaggaaaaaagattgaacttaatgcagaaactgtcaatctccgatccctgggattcaacacacaaatacgctctgttcaggttattggtggcatatgggttacttatgaatatggcagttacagagggcgacagttcctattgtcacctgcagaagtacctaattggtatgaattcagtggctgtcgccaaataggttctctacgaccttttgttcagaagcgaatttatttcagacttcgaaacaaagcaacagggttattcatgtcaaccaatggaaacttagaggatctgaagcttctgaggatacaggtcatggaggatgtcggggccgatgatcagatttggatctatcaagaaggatgtatcaaatgcaggatagcagaagactgctgcctgacgattgtgggcagcctggtaacatctggctccaagctaggcctggccctggaccagaatgctgacagccagttctggagcttgaagtccgatggcaggatttacagcaagttgaagccaaatttagttttagacattaaagggggcacacagtatgatcaaaatcacattatcctcaacactgtcagcaaagagaagtttacacaagtgtgggaagccatggtcctatatacctgaacaaagaaggaagaagaatcttctggaggtccttccagccaccttatttcttaaaaaggacaatgctgatggaagaccagactggaaagtggatcgactcctccttcattgattctaaattcaaccttaaatcatgctgccatgactcagagaacttactcatcgtttcaaaagactatcatagctttaaaccaataatttgtcctcctttcatttcttgcctttcatttttggtagctgcttaaacaggttgcctaattagcagcttttgggtgattttgtaaaatgttatatcaagatttcaagactgtgtacattttaaattatttccaaagatagtgacaggagagaactggaacaaatttaccaactttgtggacctacaaagcccttacactttaaagggtaagacaaaggcttaagtttgaaaggtagagaactgtttagcatctgagaagaaatactttattaggcctgtaattttggttcttggccttaaacactttctggaacctttaaatatgctgcatagcacaatgggaaagccttaggtattcacacatttaaggaactctaaacaaaatactattttcctttagttcatattaaaaattaatacattttaaaaatttaatgtcaaagtctggtaacatttgttagtaggatttgagttattattttttgagacaggatctcaggctggagtgcagtggcacaatcacggctcactgcagcctctacctccccaggctcaggtgatcctcccacctcagcctcccaagtagctgggactataggcacacatcaccaagcccagccaaattttgttttttttttgtagagatggggtttcatcacgttgcccaggctgatctcgaacctctgggctcaagcaattcactcgcctcggcctcccaaaatgctgggattacaggcctgagccactgcgcccagccaggatttgaattattttaactcatccatgggctgccctagaatgtcacaaatgagggttgtttaatgcctttcttatagctgctactggaacactattatgacctaatttatgagccatccttactcatctacaagtgctgaagcaatgttacatacttttttgctaaactcagattttttagcctaatttcttgtcctcctatccacctgcatccacacatggcctgcatggggctgccttccctgcagtgttctgcagccatgcttcagggtatagctgttggtggacagcctcaggtcttgggggcactatagccactaaacgaggtgtgaaaggctcaagaggatgaccagcaattaattatccccagaaagtgaaggaaaagagacctttagggatgttgctggtcaagtcttgatttgaccggagtcaaatcaatcttcaagcaatcttggaatcctcaactgcagtaagcatttcaaaatgcaaacaaactgcttaacaactgacaagacaccagcccatacgctgctcttccaacagtgggttctagctttgaacaaaagtgctaaacatttccttgaatatattcttcctctttttgtcctcatcactcaatactggtgctcttgtcacaggtagaacagcttgtttcttttccatctattcaagtgtgtttctaattctaaaatgctgatcttctctggagtctatggtaggcaattatggtcactggaatagtttgtcttgttttaaaatattattggtgcatgtacaacagcatccaacatatctgtcttgttcctagatatatagctctgattttaggccttttgtgcataccattacaatatggtggggtaagacattctacagtagcctgtgctgaactgatctcttaaataaacttgcttctggttaactatgttgatgaaa

SEQ ID NO: 37 - DNA, 354 bp, Homo sapiens
atgtctggccgcggcaaaggcgggaagggtcttggcaaaggcggcgctaagcgccaccgtaaagtactgcgcgacaatatccagggcatcaccaagccggccatccggcgccttgctcgccgcggcggcgtgaagcgcatctccggcctcatctacgaggagactcgcggggtgctgaaggtgttcctggagaacgtgatccgggacgccgtgacctatacagagcacgccaagcgcaagacggtcaccgccatggatgtggtctacgcgctcaagcgccagggccgcaccctctacggtttcggtggttgagcgtccctttctatcaacaaaaggccctttttagggccccca

SEQ ID NO: 38 - DNA, 1152 bp, Homo sapiens
cccctcgcacccccgcgcccccagtccccgcgtccccggcgccgccggcccggagctgcccggaagtctcggttccgccgccggcgctcgccaggggaagcccggggccgcccgggacctcggcccgttcctccggacccgagaggccgccgcacgggctgccgctccagatgctgctgctgccgccgcggccaccccaccctcggtcctcctctccggaggccatggacccaccgccccccaaggctccccctttccccaaggcggaaggcccctcctccactccttcctcggcggcggggccccgacccccgcggctgggccgccacctcctcatcgacgccaatggggtcccctacacatacacggtgcagctggaggaggagccccggggcccgccccagcgcgaggcgcccccaggagagcccggccctcgcaagggctacagctgcccggagtgcgcccgtgtctttgccagccctctgcggctgcagagccaccgcgtgtcgcactcggacctcaagcccttcacgtgcggcgcctgcggcaaggccttcaagcgctccagccacctgtcgcggcatcgcgccacgcaccgcgcccgcgccgggccgccgcacacctgcccgctctgcccacgccgcttccaggacgccgcggagctggcgcagcacgtgcgcctccactaagctcgagacccggcctgtgctgccctgcccgtctcagggccaccaagtctgacccacacagcgtcactcactcccacacacaccccctggctctgctgaggttactgccttaccctgggcctcagtttccccaccttccaaagggaggagcatcattccttccttaccccctttctagctgtgtgatgtagaccaaagtcgttgcccctccctgggcctgggaaccagtcggaactgggttccagtccagctgtgctgtgtgagcctgtgcaagtgacatgacctctctaaaccttggttttctgctctctggagcggtgaaccggtggttgtctgcggggaagagatgataaagagcacgggcacggtctggttcatttctgtatctaccccccttccgcccacgcccccgaccctttgctcaataaacattccgcactccaaaaaaaaaaaaaaaaaaaaa

SEQ ID NO: 39 - DNA, 1836 bp, Homo sapiens
gcaaagagccgaggccgggcgcgcgaccctcgtccttctgcccctggccgcacactttgcgcacatctctttttctgcatggtggatattatttttcattatccttttctgggtgctatgggtgatcattccaagaagaagcccgggacggccatgtgcgtgggctgcgggagtcagatccacgaccagtttatcctgcgggtgtcgcccgacctcgagtggcacgcggcctgcctcaagtgtgccgagtgcagccagtacctggacgagacgtgcacgtgcttcgtgagagacgggaagacctactgcaagcgggactacgtcaggctgttcggcatcaagtgcgccaagtgccaggtgggcttcagcagcagcgacctggtgatgagggcgcgggacagcgtgtaccacatcgagtgcttccgctgctccgtgtgcagccgccagctgctgcctggggacgagttctcgctgcgggagcacgagctgctctgccgcgccgaccacggcctcctgctcgagcgcgccgcggccggcagcccgcgcagccccggcccgcttcccggcgcccgcggcctgcatctgcccgacgctgggtcgggccggcagcccgcgttgcgcccgcacgtgcacaagcagacggagaagacgacccgcgtgcggactgtgctgaacgagaagcagctgcacactctgcggacctgctacgccgccaacccgcggcccgacgctctcatgaaggagcagctggtggagatgaccggcctgagcccgcgggtcatccgcgtctggttccagaacaagcgctgcaaggacaagaagaaatccattctcatgaagcagctgcagcagcagcagcacagcgacaagacgagccttcagggactgactgggacgcccctggtggcgggcagtcccatccgccatgagaacgccgtgcagggcagcgcagtggaggtgcagacgtaccagccgccgtggaaggcgctcagcgagtttgccctccagagcgacctggaccaacccgccttccaacagctggtctccttctccgagtccggctccctaggcaactcctccggcagcgacgtgacctccctgtcctcgcagctcccggacacccccaacagtatggtgccgagtcccgtggagacgtgagggggacccctccctgccagcccgcggacctcgcatgctccctgcatgagactcacccatgctcaggccattccagttccgaaagctctctcgccttcgtaattattctattgttatttatgagagagtaccgagagacacggtctggacagcccaaggcgccaggatgcaacctgctttcaccagactgcagacccctgctccgaggactcttagtttttcaaaaccagaatctgggacttaccagggttagctctgccctctcctctcctctctacgtggccgccgctctgtctctccacgccccacctgtgtccccatctcggccggcccggagctcgcccacgcggacccccgccctgccccagctcagcgctccctggcggcttcgcccgggctcctagcggggaaaaggaaggggataactcagaggaacagacactcaaactcccaaagcgcatgattgctgggaaacagtagaaaccagacttgccttgaaagtgtttaagttattcgacggaggacagagtatgtgagcctttgccgaacaaacaaacgtaagttattgttatttattgtgagaacagccagttcatagtgggacttgtattttgatcttaataaaaaataataacccgggaaaaaaaaaaaaaaaaaaaaaaaaaaaaaaaaaaaaaa

SEQ ID NO: 40 - DNA, 3505 bp, Homo sapiens
cgtcaggggcaggggagggacggcgcaggcgcagaaaagggggcggcggactcggcttgttgtgttgctgcctgagtgccggagacggtcctgctgctgccgcagtcctgccagctgtccgacaatgtcgtcccacctagtcgagccgccgccgcccctgcacaacaacaacaacaactgcgaggaaaatgagcagtctctgcccccgccggccggcctcaacagttcctgggtggagctacccatgaacagcagcaatggcaatgataatggcaatgggaaaaatggggggctggaacacgtaccatcctcatcctccatccacaatggagacatggagaagattcttttggatgcacaacatgaatcaggacagagtagttccagaggcagttctcactgtgacagcccttcgccacaagaagatgggcagatcatgtttgatgtggaaatgcacaccagcagggaccatagctctcagtcagaagaagaagttgtagaaggagagaaggaagtcgaggctttgaagaaaagtgcggactgggtatcagactggtccagtagacccgaaaacattccacccaaggagttccacttcagacaccctaaacgttctgtgtctttaagcatgaggaaaagtggagccatgaagaaagggggtattttctccgcagaatttctgaaggtgttcattccatctctcttcctttctcatgttttggctttggggctaggcatctatattggaaagcgactgagcacaccctctgccagcacctactgagggaaaggaaaagcccctggaaatgcgtgtgacctgtgaagtggtgtattgtcacagtagcttatttgaacttgagaccattgtaagcatgacccaacctaccaccctgtttttacatatccaattccagtaactctcaaattcaatattttattcaaactctgttgaggcattttactaaccttataccctttttggcctgaagacattttagaatttcctaacagagtttactgttgtttagaaatttgcaagggcttcttttccgcaaatgccaccagcagattataattttgtcagcaatgctattatctctaattagtgccaccagactagacctgtatcattcatggtataaattttactcttgcaacataactaccatctctctcttaaaacgagatcaggttagcaaatgatgtaaaagaagctttattgtctagttgttttttttcccccaagacaaaggcaagtttccctaagtttgagttgatagttattaaaaagaaaacaaaacaaaaaaaaaaggcaaggcacaacaaaaaaatatcctgggcaataaaaaaaatattttaaaccagctttggagccacttttttgtctaagcctcctaatagcgtcttttaatttataggaggcaaactgtataaatgataggtatgaaatagaataagaagtaaaatacatcagcagattttcatactagtatgttgtaatgctgtcttttctatggtgtagaatctttctttctgataaggaacgtctcaggcttagaaatatatgaaattgctttttgagatttttgcgtgtgtgtttgatattttttacgataattagctgcatgtgaatttttcatgaccttctttacattttttattttttatttctttatttttttttctctaagaagaggctttggaatgagttccaatttgtgatgttaatacaggcttcttgttttaggaagcatcacctatactctgaagcctttaaactctgaagagaattgtttcagagttattccaagcacttgtgcaacttggaaaaacagacttgggttgtgggaacagttgacagcgttctgaaaagatgccatttgtttccttctgatctctcactgaataatgtttactgtacagtcttcccaaggtgattcctgcgactgcaggcactggtcattttctcatgtagctgtcttttcagttatggtaaactcttaaagttcagaacactcaacagattccttcagtgatatacttgttcgttcatttctaaaatgtgaagctttaggaccaaattgttagaaagcatcaggatgaccagttatctcgagtagattttcttggatttcagaacatctagcatgactctgaaggataccacatgttttatatataaataattactgtttatgatatagacattgatattgactatttagagaaccgttgttaattttaaaactagcaatctataaagtgcaccaggtcaacttgaataaaaacactatgacagacaggtttgccagtttgcagaaactaactcttttctcacatcaacatttgtaaaattgatgtgttatagtggaaaataacatatagattaaacaaaatttttatcttttttcaagaatatagctggctatctttaagaaagatgatatatcctagttttgaaagtaattttcttttttctttctagcatttgatgtctaaataattttggacatctttttcctagaccatgtttctgtcttactcttaaacctggtaacacttgatttgccttctataacctatttatttcaagtgttcatatttgaatttctttgggaagaaagtaaatctgatggctcactgatttttgaaaagcctgaataaaattggaaagactggaaagttaggagaactgactagctaaactgctacagtatgcaatttctattacaattggtattacaggggggaaaagtaaaattacactttacctgaaagtgacttcttacagctagtgcattgtgctctttccaagttcagcagcagttctatcagtggtgccactgaaactgggtatatttatgatttctttcagcgttaaaaagaaacatagtgttgccctttttcttaaagcatcagtgaaattatggaaaattacttaaaacgtgaatacatcatcacagtagaatttattatgagagcatgtagtatgtatctgtagccctaacacatgggatgaacgttttactgctacacccagatttgtgttgaacgaaaacattgtggtttggaaaggagaattcaacaattaatagttgaaattgtgaggttaatgtttaaaaagctttacacctgtttacaatttggggacaaaaaggcaggcttcatttttcatatgtttgatgaaaactggctcaagatgtttgtaaatagaatcaagagcaaaactgcacaaacttgcacattggaaagtgcaacaagttcccgtgattgcagtaaaaatatttactattctaaaaaaatgagaattgaagacttagccagtcagataagttttttcatgaacccgttgtggaaattattggaattaactgagccaaagtgattatgcattcttcatctattttagttagcactttgtatcgttatatacagtttacaatacatgtataacttgtagctataaacattttgtgccattaaagctctcacaaaactttaaaaa

SEQ ID NO: 41 - DNA, 1344 bp, Homo sapiens
agagagggcggggacgtgtttggcagcgggacgcaccatttcagttgtgttcttggttcatttcgtgtctcggcgatgtttcctagagtctcgacgttcctacctcttcgccccctttcccgccaccctttgtcctctggaagcccggagacatcagcggctgcgattatgctactcactgttcggcacggaacagtcaggtaccgcagttcagcgctgttggcccggacaaaaaataacatccaaagatattttggcactaacagtgtgatctgtagcaagaaagataagcagtctgttcgaactgaggagacttccaaggagacttcagagagccaagacagtgaaaaggaaaatacgaaaaaagacttgttaggcattattaagggcatgaaagttgaattaagcacagtaaatgtacgaacaacaaagccccccaaaagaagaccacttaaaagtttggaagctacacttggcaggcttcgaagagctacagaatatgctccaaagaagagaattgagcccctgagtcctgagttggtggcagctgcatctgctgtggcagattctctcccttttgataagcaaacaaccaagtcagagctgctgagccagctccagcagcatgaggaagagtcaagggcacagagagatgcaaagcgacctaaaattagtttcagtaacataatatcagatatgaaagttgccagatctgctacagctagagttcgttcaagaccagagcttcggattcagtttgatgaaggctatgacaattatcctggccaggagaagacggatgatcttaaaaaaaggaaaaatatattcacagggaaaagacttaatatttttgacatgatggcagttactaaagaagcacctgaaacagacacatcaccttcactttgggatgtggaatttgctaagcagttagccacagtaaatgaacaaccccttcagaatggatttgaagagctgatccagtggacaaaagaggggaaactatgggagttcccaattaacaatgaagcaggttttgatgatgatggttcagaatttcatgaacatatatttctggagaaacacctggagagctttccaaaacaaggaccaattcgccacttcatggagctggtgacttgtggcctttccaaaaacccatatcttagtgttaaacagaaggttgaacacatagagtggtttagaaattattttaatgaaaaaaaggatattctaaaagaaagtaacatacagttcaattaagaccatggaaatttttatttcaaacaattagagatggatattacaactaaataaaataattttactagagtttgtaaaaaa

SEQ ID NO: 42 - DNA, 2103 bp, Homo sapiens
aaagtccatgggagccggagcgccgggacgccaagcacttcctgccgcgggcggcgcgccgcagctgcccaggccggaccgggccgggcgcccgcagatgagccccgctagggccgccccgcgctgagagcccagccccgccgctgcccgcccgccatgtctcagatgctgcacatcgagatccccaacttcgggaacacagtgctgggctgcctgaacgagcagcgcctgctgggcctctactgcgatgtgtccatcgtggtcaagggccaggccttcaaggcccaccgggcggtgctggccgccagcagcctctacttccgcgacctgttcagcggcaacagcaagagcgccttcgagctgcccggctccgtgccgcccgcctgcttccagcagatcctgtccttctgctacacgggcaggctcaccatgacggccagcgagcagctcgtggtcatgtacacggccggcttcctgcagatccagcacatcgtggagcgcggcaccgacctcatgttcaaggtgagctcgccccactgcgactcgcagaccgctgtgatcgaggacgccggctccgagccccagagcccctgcaaccagctgcagccggccgccgccgccgcggccccctacgtcgtgtccccctcggtgcccatcccgctgctgacccgagtaaagcatgaagccatggagctgccgccggccggcccaggcctggcccccaagcgcccgctggagacggggccccgggacggcgtggcggtggccgcgggggctgcggtggcggcgggcacagcccctctcaaactgccccgtgtctcctactacggggtgcccagcctggccaccctcatccccggcatccagcagatgccctacccccagggggagcggaccagtccaggcgccagcagcctgcccaccaccgacagccccacctcgtaccacaacgaggaggacgaggaggacgacgaggcctacgacaccatggtggaggagcagtacggccagatgtacatcaaggcctccggcagctatgcagtgcaagagaagcctgagccagtgccgctggagagccgctcctgcgtcctcatccgccgcgacctcgtggccctacctgccagcctcatcagccagatcggataccgctgccatcccaagctctactcggaaggggaccccggggagaagctggagctggtggcaggctctggggtctacatcacacgcggccagctgatgaactgccacctgtgtgcaggggtgaagcataaggtcttgctgcggaggctcctggccaccttctttgacaggaacacgctggccaacagctgcgggactggcatccgctcgtccaccagcgaccccagccggaagccgctggacagccgggtcctgaacgctgtgaaattgtactgtcagaacttcgcccccagcttcaaggagagcgagatgaacgtgatcgccgcggacatgtgcaccaacgcccgccgcgttcgcaagcgctggctgcccaagatcaagtccatgctgccggagggcgtggagatgtaccgcacggtcatgggctccgccgccgccagcgtgcccctcgaccccgagttcccgcctgccgcggcacaggtgttcgagcaacgcatctacgccgagcggcggggcgacgccgccaccatcgtggctctgagaactgacgccgtgaatgttgacctgagtgccgccgccaaccccgccttcgacgccggcgaggaggtggacggggctggctcggtcatccaggaggtggccgcccccgagccgctgcccgccgatggccagagccccccacagccctttgagcagggcgggggcggccccagcaggccccagacgccggcggccgcggcccggaggccggagggcacctatgcagggaccttgtaagcggagctgggtggctgcgcgagggaccgagtactagagctgcttgcatgcgttactaatacaaacaaatgtgatcaagccacttacctactgaactgctactgttgcctgagaaaaatgtgatttttattctgcttgtatttaaaattgatgaaggaaaaaaaaaaaaaaaaaaaaaaaaaa

SEQ ID NO: 43 - DNA, 1355 bp, Homo sapiens
cagtggctggtaggcagtggctgggaggcagcggcccaattagtgtcgtgcggcccgtggcgaggcgaggtccggggagcgagcgagcaagcaaggcgggaggggtggccggagctgcggcggctggcacaggaggaggagcccgggcgggcgaggggcggccggagagcgccagggcctgagctgccggagcggcgcctgtgagtgagtgcagaaagcaggcgcccgcgcgctagccgtggcaggagcagcccgcacgccgcgctctctccctgggcgacctgcagtttgcaatatgactttggaggaattctcggctggagagcagaagaccgaaaggatggataaggtgggggatgccctggaggaagtgctcagcaaagccctgagtcagcgcacgatcactgtcggggtgtacgaagcggccaagctgctcaacgtcgaccccgataacgtggtgttgtgcctgctggcggcggacgaggacgacgacagagatgtggctctgcagatccacttcaccctgatccaggcgttttgctgcgagaacgacatcaacatcctgcgcgtcagcaacccgggccggctggcggagctcctgctcttggagaccgacgctggccccgcggcgagcgagggcgccgagcagcccccggacctgcactgcgtgctggtgacgaatccacattcatctcaatggaaggatcctgccttaagtcaacttatttgtttttgccgggaaagtcgctacatggatcaatgggttccagtgattaatctccctgaacggtgatggcatctgaatgaaaataactgaaccaaattgcactgaagtttttgaaatacctttgtagttactcaagcagttactccctacactgatgcaaggattacagaaactgatgccaaggggctgagtgagttcaactacatgttctgggggcccggagatagatgactttgcagatggaaagaggtgaaaatgaagaaggaagctgtgttgaaacagaaaaataagtcaaaaggaacaaaaattacaaagaaccatgcaggaaggaaaactatgtattaatttagaatggttgagttacattaaaataaaccaaatatgttaaagtttaagtgtgcagccatagtttgggtatttttggtttatatgccctcaagtaaaagaaaagccgaaagggttaatcatatttgaaaaccatattttattgtattttgatgagatattaaattctcaaagttttattataaattctactaagttattttatgacatgaaaagttatttatgctataaattttttgaaacacaatacctacaataaactggtatgaataattgcatcatt

SEQ ID NO: 44 - DNA, 2099 bp, Homo sapiens
aaactaaatcaaacttgagtatgaaacttctttttttttaagtgcctaagtcctgaatgacaacaaaagactgaagaactgacaacgattagaggacactaaggagacttaacaactaaatgcaaaatgggaccctgaatctgatcctggaacacaaaaactaaattagtagaaaagtggtaaaataggtggtcgcgcgcccgaccgccgcagtcccagtcgagccgcgacccttccggctgcccccaccccacctcgccgccatgtgcctccgccgcccagcgctgttcccgggcgtggcgctgcttctcgccgcggcccgcctcgcggctgcctccgacgtgctaggactcagggacgacaacttggagagtcgcatctccgacacgggctctgcgggcctcatgctcgtcgagttcttcgccccctggtgtggacactgcaagagacttgctcctgagtatgaagctgcagctaccagattaaaaggaatagtcccattagcaaaggctgattgcactgccaacactaacacctgtaataaatatggagtcagtggatatccaaccctgaatatgtttagagatggtgaagaagcaggtgcttatgatggacctaggactgctgatggaattgtcagccacctgaagaagcaggcaggcccagcttcagtgcctctcaggactgaggaagaatttaagaaattcattagtgataaagatgcctctatagtaggttttttcgatgattcattcagtgaagctcactccgagttcctaaaagcagccagcaacttgagggataactaccgatttgcacatacgaatgttgagtctctggtgaacgagtatgatgataacggagatggtatcatcttatttcgtccttcacatctcactaacaagttggaggacaagactgtggcatatacagtgcaaaaaatgaccagtggcaaaattaaaaagtttatccaggaaaacatttttggtatctgccctcacatgacagaagacaataaagatttgatacagggcaaggacttacttattgcttactatgatgtggactatgaaaagaatgctaaaggttccaactactggagaaacagggtaatgatggtggcaaagaaattcctggatgctgggcacaaactcaactttgctgtagctagccgcaaaacctttagccatgaactttctgattttggcttggagagcactgctggagagattcctgttgttgctatcagaactgctaaaggagagaagtttgtcatgcaggaggatttctcgcgtgatgggaatgctctggagaggttcctgcaggattactttgatggcaatctgaagagatacctgaagtctgaacctatcccagagagcaatgatgggcctgtgaaggtagtggtagcagagaattttgatgaaatagtgaataatgaaaataaagatgtgctgattgaattttatgccccttggtgtggtcactgtaagaacctggagcccaagtataaagaacttggcgagaagctcagcaaagacctgaatatcgtcatagccaagatggatgccacagccaatgatgtgccttctccatatgaagtcagagttttcctaccatatacttctctccagccaacaagaagctaaatccaaagaaatatgaaggtggccatgaattaagtgattttattagctatctacaacgagaagctacaaacccccctgtaattcaagaagaaaaacccaagaagaagaaggcacaggaggatctctaaagcagtaggcaaacaccactttgtaaaaggactcttccaccagagatgggaaaaccactggggaggactaggacccatatgggaattattacgtctcagggccgagaggacagaatggatataatctgaatcctgttaaattttctctaagccatttcttagctgcactgttatggaaataccaggaccagtttatgtttgtggttttgggaaaaattatttgtgttgggggaaatgttgtgggagtcgggttgagttgggggtattttctaatttttttgtgcatttggaacagtgacaataaataagacccctttaaact

SEQ ID NO: 45 - DNA, 1038 bp, Homo sapiens
atgccgatgcagctgctgcttacagattttattatcttttccatcagattcatcatcaacagcatggaagcgagaaaccaaacagctatttcaaaattccttctcctgggactgatagaggatccggaactgcagcccgtccttttcagcctgttcctgtccatgtacttggtcaccatcctggggaacctgctcatcctcttggctgtcatctctgactctcacctccacacccccatgtacttcttcctctccaatctctcctttttggacatttgtttaagcacaaccacgatcccaaagatgctggtgaacatccaagctcagaatcggagcatcacgtactcaggctgcctcacccagatctgctttgtcttgttttttgctggcttggaaaattgtctccttgcagcaatggcctatgaccgctatgtggccatttgtcacccccttagatacacagtcatcatgaacccccgcctctgtggcctgctgattcttctctctctgttgactagtgttgtgaatgcccttcttctcagcctgatggtgttgaggctgtccttctgcacagacctggaaatcccgctcttcttctgtgaactggctcaggtcatccaactcacctgttcagacaccctcatcaataacatcctgatatattttgcagcttgcatatttggtggtgttcctctgtctggaatcattttgtcttacactcagatcacctcctgtgttttgagaatgccatcagcaagtggaaagcacaaagcagtttccacctgtgggtctcacctctccattgttctcttgttctatggggcaggtttgggggtgtacattagttctgtggttactgactcacctaggaagactgcagtggcttcagtgatgtattctgtgttccctcaaatggtgaacccctttatctatagtctgaggaataaggacatgaaaggaaccttgaggaagttcatagggaggataccttctcttctgtggtgtgccatttgctttggattcaggtttctagagtaa

SEQ ID NO: 46 - DNA, 924 bp, Homo sapiens
gaggtcagagacttaagtctaaggcactgagcgtatcatgttaaagatgagcgggtggcagcgacagagccaaaatcagagctggaacctgaggagagagtgttcaagaaggaagtgtatcttcatacatcaccacacctgaaagcagatgtgcttttccagactgatccaactgcagagatggcagctgagtcattgcctttctccttcgggacactgtccagctgggagctggaagcctggtatgaggacctgcaagaggtcctgtcttcagatgaaaatgggggtacctatgtttcacctcctggaaatgaagaggaagaatcaaaaatcttcaccactcttgaccctgcttctctggcttggctgactgaggaggagccagaaccagcagaggtcacaagcacctcccagagccctcactctccagattccagtcagagctccctggctcaggaggaagaggaggaagaccaagggagaaccaggaaacggaaacagagtggtcattccccagcccgggctggaaagcagcgcatgaaggagaaagaacaggagaatgaaaggaaagtggcacagctagctgaagagaatgaacggctcaagcaggaaatcgagcgcctgaccagggaagtagaggcgactcgccgagctctgattgaccgaatggtgaatctgcaccaagcatgaacaattgggagcatcagtcccccacttgggccacactacccacctttcccagaagtggctactgactaccctctcactagtgccaatgatgtgaccctcaatcccacatacgcagggggaaggcttggagtagacaaaaggaaaggtctcagcttgtatatagagattgtacatttatttattactgtccctatctattaaagtgactttctatgagccaaaaaaaaaaaaaaa

SEQ ID NO: 47 - DNA, 2596 bp, Homo sapiens
gcttcttctgcccggagaggacgtcatttccgccgagtccctgacctgctgctaggatcgcgacgggaactggagcccgaggtccccgcgcggcccgggcctggcgccctgaggggaagagcggcccggcccgagccatgacggacgggatcctagggaaggcagccacaatggagatccctatccacgggaacggcgaagccaggcagcttcctgaagatgatgggctggagcaggacctccagcaggtgatggtgtcaggacccaacctcaatgaaaccagcattgtgtctggtggctatgggggctctggtgatggactcatccccacagggtctggccgccatccatctcacagcaccactccttctggccctggagatgaggtggctcggggcattgctggagaaaagtttgacatcgtcaagaaatggggcatcaacacctataagtgcacaaagcaactgttatcagaacgatttggtcgaggctcacggactgtggacctggagctagagctgcagattgagttgctgcgtgagacgaagcgcaagtatgagagtgtcctgcagctgggccgggcactgacagcccacctctacagcctgctgcagacccagcatgcactgggtgatgcctttgctgacctcagccagaagtccccagagcttcaggaggaatttggctacaatgcagagacacagaaactactatgcaagaatggggaaacgctgctaggagccgtgaacttctttgtctctagcatcaacacattggtcaccaagaccatggaagacacgctcatgactgtgaaacagtatgaggctgccaggctggaatatgatgcctaccgaacagacttagaggagctgagtctaggcccccgggatgcagggacacgtggtcgacttgagagtgcccaggccactttccaggcccatcgggacaagtatgagaagctgcggggagatgtggccatcaagctcaagttcctggaagaaaacaagatcaaggtgatgcacaagcagctgctgctcttccacaatgctgtgtccgcctactttgctgggaaccagaaacagctggagcagaccctgcagcagttcaacatcaagctgcggcctccaggagctgagaaaccctcctggctagaggagcagtgagctgctcccagcccaacttggctatcaagaaagacattgggaagggcagccccagggtgtgggagattggacatggtacatcctttgtcacttgccctctggcttgggctcctttttctggctggggcctgacaccagttttgcccacattgctatggtgggaagagggcctggaggcccagaagttgctgccctgtctatcttcctggccacagggcttcattcccagatcttttccttccacttcacagccaacggctatgacaaaaccactccctggccaatggcatcactcttcaggctggggtgtgctccctgaccaatgacagagcctgaaaatgccctgtcagccaatggcagctcttctcggactcccctgggccaatgatgttgcgtctaataccctttgtctctcctctatgcgtgcccattgcagagaaggggactgggaccaaaggggtggggataatggggagccccattgctggccttgcatctgaataggcctaccctcacccacccacccagtttaattgtgcttagagcccaagaagattgggatctagcactaggaataaacctttcataaaagcaggcccagcgaggtcaatttgtcggggactctaggagggtggcctgggtggagacaagctcagtctaatcaaacaccagaaccctatcaagtcaaaagagctggggccaggcagctgaagtcacaggtttcagagatggtttgaaggcccagtcttctctcccagcctcagttggagccaaagctttgtcctttagccagcaccaagatagctatggatcttaagagcaccagatccagagggggttgggtttgctgaccttcatcatgcattcattcatacagcaaatatttactgagtgctttcatttgccagggactgcgttaggccctggggaaacatcagtgaataaaacacggtccctgcccacagtgcttagggcctactgagggaaagaagtaaccaggcaactacaaaacagtgataagtattaggatacagaagtacagagggcgctgtgggagcacaaaggaggggcatctggcatggactggggtggaaatggggatgtcagtttgaaagctgagacctggccaggtgcggtggctcactcctgtaatcccagcactttgggaggccgaggcgggcggatcaccaggtcaggagatcaagaccatcctggctaacacggtgaaaacccatctctactaaaaatgcaagaaaattagcccggcacggtggctggcgcctgtagtcctgtagtcccagctactcgggaggctgaggcaggagaatggtgtgaacccgggaggcggagcttgcagtggagccaagattgcgccactgcactccagcctgggcaacagagcgggactccatctcaaaaaaaaaaaaaaaaaa

SEQ ID NO: 48 - DNA, 4269 bp, Homo sapiens
agggtgccccgcgcggcgtggactcgggccgctgccgccatcccgctggagagagggagagagaggcccgcccgctcgccggccgggccagtgtgagccagtgcgtgagggcgcggggggccgtgtcagcgagacgcagagcgcagccgccaccaccaaacggacatgttgaagaccagcgctgccgccgcctccttttcctcatcctgcgaacgggactgagagggggcccgccacctctccgcctctgcctcggccgcccgcctcgccgcttcgggcgcagcctcttcctgcccgggcctcggactccgccgctcgtcgcctccccccggccaccaggcccggctggtttcccagccccgctccgccgcggcgcgaggtctatgtgaccggcgggcccggagcagccgccgccgcagcgcgaacatggacgccgtcaacgccttcaaccaggagctcttttcgcttatggatatgaaacctcccatctctagagccaagatgattctcatcactaaagctgctattaaagctattaagctttataagcatgtagttcaaatagtagaaaagttcatcaaaaagtgtaaaccagaatacaaggttccgggattatatgtaattgactcaattgtgcgacagtctcgtcatcagtttggaactgataaagatgtttttgggccaagattctctaaaaacataactgccacattccaatatttatatctttgtccatctgaagataagagtaaaatagttcgtgtgctgaacctttggcaaaaaaatggagtgttcaaaattgaaattattcaacctcttttggacatggcagcgggaaccagtaatgcagccccagtagcagaaaatgttaccaataatgaaggctcacctccacctccagtaaaagtttcttctgaacctcccacacaagccactccaaactccgtcccagctgtaccacagttgcccagctctgatgcttttgctgctgtggctcagctgtttcagacaactcaaggccaacagcttcagcagatccttcagacttttcaacagcctccaaaaccacagtctcctgcccttgacaatgctgtgatggctcaggttcaggctatcacagctcagttaaagacaactcctacacaaccatctgaacaaaaagctgctttccccccacctgaacagaaaactgcatttgacaagaagttgcttgatagatttgactatgatgatgagccagaagctgtggaagaatcaaagaaagaggataccactgccgtcaccacgacagcacctgctgccgcagtaccccctgcacccaccgccaccgtgcctgctgctgctgcacccgctgctgcctctcctcctcctccacaggcaccatttggctttcctggagatggcatgcagcagccagcatacacacagcatcaaaatatggatcagtttcagccacgaatgatgggaatacaacaggatccaatgcaccatcaggttccacttcctcctaatggacaaatgccaggatttggacttcttcctacacctccatttcctcccatggctcagcctgtgattcctccaactccaccagtgcagcagcctttccaagcttcttttcaggcacaaaatgaaccacttacacagaagccgcatcagcaggaaatggaagtagaacaaccttgtattcaagaggttaagcgacatatgtctgataacagaaagtcaagatctaggtcagcatccaggtcaccaaaaaggaggcgatctagatctggttctagatctcgaaggtctcggcatcgacgttctcgatctcggtccagggatagacgccgacattctccccgatctcgatctcaagaaagacgggatcgagaaaaagagagagaacgtcgacaaaaaggcctccctcaagtgaaaccggaaactgcaagtgtttgcagtactaccctctgggtggggcagctggacaaaagaactactcagcaggatgttgccagtctcttggaagagtttggtccaattgaatcaattaatatgattcctcccaggggttgtgcctatattgttatggttcataggcaagatgcctatcgtgccctgcagaaactgagccgaggaaactataaagtgaaccagaaatccataaagattgcctgggccttaaacaaaggaataaaggcagattataagcagtattgggatgtagaacttggtgttacttatattccatgggacaaagtcaagcctgaggaactggagagtttttgtgaaggaggaatgttggacagtgacacacttaacccagattggaaaggaattcctaagaagcctgaaaatgaagttgctcaaaatggaggtgctgaaacctcacacacagaaccagtatcacccatacctaaaccattacctgtgcctgtccctcctattcctgttcctgcacctataacagtgccacctccacaggtcccaccacatcaaccgggtccacctgtagttggtgctctccagccgcctgctttcacgcctcctctgggaataccgcctccaggctttggtcctggtgttcctcctccccctcctcctccaccatttttgcgcccaggattcaacccaatgcatttaccaccaggttttctgcctcctggacccccacctcctataactccaccagtatccattcctcctcctcacactccaccaataagcatcccaaactctactatcgctggtataaatgaagacactacaaaagacttatctattggaaatcccattccaacagtggtgtctggggctagaggaaacgccgagtctggtgacagcgtgaaaatgtatggctctgccgtgccacctgctgcacccacgaatctgcccacccctcctgtaacccagcctgtttcacttcttggcactcaaggagttgcccctggtcctgtaattggacttcaggcaccatctactggtcttcttggcgcccggcccggtctcatcccactccagcgccctccaggaatgcccccacctcacttacagcggttccctttgatgccgccccgtcccatgccaccgcacatgatgcacagaggcccaccgccaggaccagggggctttgcgatgcctccacctcatggaatgaaaggtcccttcccaccgcatggcccctttgttaggcctggtggaatgccagggctcgggggcccagggccaggcccagggggtcctgaagacagagacggaaggcaacagccgccgcagcagccacagcagcagccacagccgcaggcgccccagcaaccacagcagcagcagcagcagcagccaccaccatcacaacagcctccaccaacacagcagcagccacagcagtttagaaatgataacaggcagcagttcaattcaggtagagaccaagaaaggtttggaagaagatcttttggaaatagggtggaaaatgaccgggaacggtatgggaaccgtaatgatgatagagataatagtaaccgtgacaggagagagtggggaaggaggagccctgaccgggacaggcacagagacttggaagagagaaatagacgctctagtgggcatcgagacagagagagagattctagagatagagagtctcgtagagagaaggaagaagcccgaggaaaggaaaagcctgaggtgacagacagggcaggtggtaacaaaaccgttgaacctcccattagccaagtgggaaatgtagacactgcttcagaacttgagaagggggtgtctgaggctgcagtcctaaagccttctgaagagttacctgctgaggctacctcatccgttgaacccgaaaaggattctggctcagcagcagaggctcctcgttagagactggaatttgtgaaaatgtgacagtgacacttcctggagtgtagagcttgaggtgtacagatgctgtattatatccgctcccgctgtactgcagccccgcgccagctggtggggaactgtaagcaatttgattgcttcccttctatttaaaaatagccacaaaataacaaaaaatactgaaaatatgaataaatattaccctttttgctgtaactttttaaaagttttgactttaaaaagtttacaaatcgtaattagaagtgctctctatttttttttttttttttaatttaagacaaggtaacggtgaaagctcctcaaaacaatagggatgtttttaataaactctattttcgtaacaaactttaatgtgtgctattcttcctacactgcatt

SEQ ID NO: 49 - DNA, 434 bp, Homo sapiens
acttccgctcgtccgcctaataccgcgcctgcgcaccgcgtctcttcctttctgggctcggacctaggtcgcggcgacatggccaaacgtaccaagaaagtcgggatcgtcggtaaatacgggacccgctatggggcctccctccggaaaatggtgaagaaaattgaaatcagccagcacgccaagtacacttgctctttctgtggcaaaaccaagatgaagagacgagctgtggggatctggcactgtggttcctgcatgaagacagtggctggcggtgcctggacgtacaataccacttccgctgtcacggtaaagtccgccatcagaagactgaaggagttgaaagaccagtagacgctcctctactctttgagacatcactggcctataataaatgggttaatttatgtaacaaaaaaaaaaaaaaaaaa

SEQ ID NO: 50 - DNA, 2811 bp, Homo sapiens
gcagtccagatgtcgtcagcaccagcgcctgggctggaggacagagaagccttttccgttgccggtgccggcctagcgtcctggaattacttcaatcaacaggagcgagaacccgagcagcgccatgagcaacactaccgtcgtccccagcactgcaggtccgggccccagcggcgggcccggtggcggaggtggtggtggcggcggaggcggcggcaccgaggtaatccaggtgactaatgtctccccgagcgctagctctgagcagatgcggactctcttcggtttcctaggcaagatcgacgaactgcgcctcttcccgccggatgattcgcctttgccagtctcatctcgtgtctgctttgttaagttccatgatccagactcagcagttgtggcacagcatctgacaaacactgtattcgttgacagagctttgatagtcgtaccatatgcagaaggagttattcctgatgaagctaaagctttgtctctgttggcaccagctaatgcagtggcaggtcttctgcctggtggtggactcctgcctactcctaacccacttacccagattggcgctgttccactggctgctttgggggctcctactcttgatcctgcccttgctgcacttgggcttcctggagcaaacttgaactctcagtctcttgctgcagatcagttgctgaagcttatgagtactgttgatcccaagttgaatcatgtagctgctggtctcgtttcaccaagtctgaaatcggatacctctagtaaagaaatagaggaagctatgaaaagagtacgagaagcacagtccctaatttctgctgctatagaaccagataagaaagaagaaaaaagaaggcattcaagatcaagatcacgttctaggaggaggaggactccctcatcttctagacacaggcggtcaagaagcagatcgagacggcggtcacattctaagtctaggagtcggcgacgatccaaaagcccaaggcggagaagatctcattccagagaaagaggtagaaggtcaaggagcacatcaaaaacaagagacaaaaagaaagaagacaaagaaaagaaacgttctaaaacaccaccaaaaagttacagcacagccagacgttctagaagtgcaagcagagagagacgacgacgaagaagcaggagtggcacaagatctcctaaaaagcctcggtctcctaaaagaaaattgtcccgctcaccatcccctaggagacataaaaaggagaagaagaaagataaagacaaagaaagaagtagggatgaaagagaacgatcaacaagcaagaagaagaagagtaaagataaggaaaaggaccgggaaagaaaatcagagagtgataaagatgtaaaacaggttacacgggattatgatgaagaggaacaggggtatgacagtgagaaagagaaaaaagaagagaagaaaccaatagaaacaggttcccctaaaacaaaggaatgttctgtggaaaagggaactggtgattcactaagagaatccaaagtgaatggggatgatcatcatgaagaagacatggatatgagtgactgaatattgcctctgagggagtccaactgtatacctgcatcagtgtcattcctttgtgtgatttcttaatgctgtatttgttcatctcaaacctagatgtatacagctctgagttataaatggttataaagctcctgttactcatattagttatttacatcaaaaagcttttagaaaatggtacgaggtaaccaattcttgtcatggtgaaatctgattgagtaaccaagcagttttactattctggtgctgcttcataacaaaaatgaaaagctgcatgcatctacagcaggcatggattgtttatgtcgtatgatatcctttattaagtaagttcacttatagtatttctataatttgattcattgccgtaatagagccatgtaggaaatgcactgattgcatgttattgtggcaagaatatcctaaatgtcattaaaatcctccaacatgatggatctacttatggtcttgtttgttgacatgacaaattaacattcttatagttacatctggaaatgagcatttgaaatagataatcctttaagccttgtggcaaaatttttgtggcttttgtttaactttgaaaggttattatgcactaaccttttttggtggctaattagggtttaaatacagaaacaagatttcaaataaaactgtctttggcagtgagtaaatagcatattttgaagtagagttgtatactttttcataagatgtttgggaatttttttcctgaagtaataatttattccacatctacatcagtgaaagctatctacctatcctgagtctatcttaaaggaaaaaaagaaaaaaaccttatctcttgcccttattttgaattttccactctttcattaatttgttttaagctccgtgttggaaaaaaggggtagtgcattttaaattgaccttcatacgcttttaaaataagacaaatctacttgataatgtacctttatttgatctcaagttgtataaaaccaataaatttgtgttactgcagtagtaatcttatgcacacggtgatttcatgttatatatgcaaagtaggcaactgttttcttagttacagaagtttcaagcttcacttttgtgcagtagaaacaaaagtaggctacagtctgtgccatgttgatgtacagtttctgaaattgttttacaagactttgataataaaacccttaaacttatgttcatgttcctgtaaaaaaaaaaaaaaaaaaaaa

SEQ ID NO: 51 - DNA, 3822 bp, Homo sapiens
tggctcagccgcggcggtggcgggggcgcaaccagcgggccgaggcggcggcgccagcggcgccttaaatagcatccagagccggcgcggggcagggagtgggctgcagtgacagccggcggcggagcggccggtccacggaggagaattcagcttagagaactatcaacacaggacaatgcaagcccatgagctgttccggtattttcgaatgccagagctggttgacttccgacagtacgtgcgtactcttccgaccaacacgcttatgggcttcggagcttttgcagcactcaccaccttctggtacgccacgagacccaaacccctgaagccgccatgcgacctctccatgcagtcagtggaagtggcgggtagtggtggtgcacgaagatccgcactacttgacagcgacgagcccttggtgtatttctatgatgatgtcacaacattatacgaaggtttccagaggggaatacaggtgtcaaataatggcccttgtttaggctctcggaaaccagaccaaccctatgaatggctttcatataaacaggttgcagaattgtcggagtgcataggctcagcactgatccagaagggcttcaagactgccccagatcagttcattggcatctttgctcaaaatagacctgagtgggtgattattgaacaaggatgctttgcttattcgatggtgatcgttccactttatgatacccttggaaatgaagccatcacgtacatagtcaacaaagctgaactctctctggtttttgttgacaagccagagaaggccaaactcttattagagggtgtagaaaataagttaataccaggccttaaaatcatagttgtcatggatgcctacggcagtgaactggtggaacgaggccagaggtgtggggtggaagtcaccagcatgaaggcgatggaggacctgggaagagccaacagacggaagcccaagcctccagcacctgaagatcttgcagtaatttgtttcacaagtggaactacaggcaaccccaaaggagcaatggtcactcaccgaaacatagtgagcgattgttcagcttttgtgaaagcaacagagaatacagtcaatccttgcccagatgatactttgatatctttcttgcctctcgcccatatgtttgagagagttgtagagtgtgtaatgctgtgtcatggagctaaaatcggatttttccaaggagatatcaggctgctcatggatgacctcaaggtgcttcaacccactgtcttccccgtggttccaagactgctgaaccggatgtttgaccgaattttcggacaagcaaacaccacgctgaagcgatggctcttggactttgcctccaagaggaaagaagcagagcttcgcagcggcatcatcagaaacaacagcctgtgggaccggctgatcttccacaaagtacagtcgagcctgggcggaagagtccggctgatggtgacaggagccgccccggtgtctgccactgtgctgacgttcctcagagcagccctgggctgtcagttttatgaaggatacggacagacagagtgcactgccgggtgctgcctgaccatgcctggagactggaccgcaggccatgttggggccccgatgccgtgcaatttgataaaacttgttgatgtggaagaaatgaattacatggctgccgagggcgagggcgaggtgtgtgtgaaagggccaaatgtatttcagggctacttgaaggacccagcgaaaacagcagaagctttggacaaagacggctggttacacacaggggacattggaaaatggttaccaaatggcaccttgaaaattatcgaccggaaaaagcacatatttaagctggcacaaggagaatacatagcccctgaaaagattgaaaatatctacatgcgaagtgagcctgttgctcaggtgtttgtccacggagaaagcctgcaggcatttctcattgcaattgtggtaccagatgttgagacattatgttcctgggcccaaaagagaggatttgaagggtcgtttgaggaactgtgcagaaataaggatgtcaaaaaagctatcctcgaagatatggtgagacttgggaaggattctggtctgaaaccatttgaacaggtcaaaggcatcacattgcaccctgaattattttctatcgacaatggccttctgactccaacaatgaaggcgaaaaggccagagctgcggaactatttcaggtcgcagatagatgacctctattccactatcaaggtttagtgtgaagaagaaagctcagaggaaatggcacagttccacaatctcttctcctgctgatggccttcatgttgttaattttgaatacagcaagtgtagggaaggaagcgttcgtgtttgacttgtccattcggggttcttctcataggaatgctagaggaaacagaacactgccttacagtcacctcatgttgcagaccatgtttatggtaatacacactttccaaaatgagccttaaaaattgtaaaggggatactataaatgtgctaagttatttgagacttcctcagtttaaaaagtgggttttaaatcttctgtctccctgtttttctaatcaaggggttaggactttgctatctctgagatgtctgctacttgctgcaaattctgcagctgtctgctgctctaaagagtacagtgcactagagggaagtgttccctttaaaaataagaacaactgtcctggctggagaatctcacaagcggaccagagatctttttaaatccctgctactgtcccttctcacaggcattcacagaacccttctgattcgtaagggttacgaaactcatgttcttctccagtcccctgtggtttctgttggagcataaggtttccagtaagcgggagggcagatccaactcagaaccatgcagataaggagcctctggcaaatgggtgctcatcagaacgcgtggattctctttcatggcagaatgctcttggactcggttctccaggcctgattccccgactccatcctttttcaggggttatttaaaaatctgccttagattctatagtgaagacaagcatttcaagaaagagttacctggatcagccatgctcagctgtgacgcctgaataactgtctactttatcttcactgaaccactcactctgtgtaaaggccaacagatttttaatgtggttttcatatcaaaagatcatgttgggattaacttgcctttttccccaaaaaataaactctcaggcaagcatttctttaaagctattaagggagtatatacttgagtacttattgaaatggacagtaataagcaaatgttcttataatgctacctgatttctatgaaatgtgtttgacaagccaaaattctaggatgtagaaatctggaaagttcatttcctgggattcacttctccagggattttttaaagttaatttgggaaattaacagcagttcactttattgtgagtctttgccacatttgactgaattgagctgtcatttgtacatttaaagcagctgttttggggtctgtgagagtacatgtattatatacaagcacaacagggcttgcactaaagaattgtcattgtaataacactacttggtagcctaacttcatatatgtattcttaattgcacaaaaagtcaataatttgtcaccttggggttttgaatgtttgctttaagtgttggctatttctatgttttataaaccaaaacaaaatttccaaaaacaatgaaggaaaccaaaataaatatttctgcatttcaggtgaaaaaaaaaaaaaaaaaa

SEQ ID NO: 52 - DNA, 1326 bp, Homo sapiens
cagagtggagcggccgccggagatgcctgacgcatctgtctgaggagcggtcagtgacgcgatggagcgggcaagggatcgcttacacctgagacgaactacagaacagcacgtaccagaggtggaagtccaagtcaaacgcagaaggactgcctcactgagcaaccaagagtgtcagttgtacccgaggcgttctcagcagcagcaagtacctgtggtggatttccaggctgaactgaggcaggcattcttagctgagacaccaagaggtggttaaagccatattggagtagcgaggaatctgattccaagcaaaaaccaggctccatctactctttgaagcttctgcccagcttgcattgtttctaggagaacctgcgtcatacctttatctatagccttcccctaggtcttcagaagcatcaagttttaactgtggacattggatttggtggaacagcaatcatgactgttggcaagagtagcaagatgctgcagcacattgactatagaatgagatgtatcctgcaagatggccgaatcttcattggcacctttaaggcttttgacaagcatatgaatttgatcctctgtgattgtgatgagttcagaaagatcaagccaaagaatgcgaagcaaccagagcgtgaagaaaagcgggttttgggtctggtgttgctgcgtggggagaacttggtatccatgactgtggaggggccaccccccaaagatactggcattgctcgggtaccacttgctggagctgctggaggccctggggttggtagggcagctggtagaggagtaccagctggtgtgccaattccccaggcccctgctggattggcaggccctgtccgaggagttgggggaccatcccagcaggtaatgactccacagggaagaggcactgtagcagctgctgctgttgctgcgactgccagtattgctggagccccaacacagtacccaccaggacggggcactccgcccccacccgtcggcagagcaaccccacctccaggcattatggctcctccacctggtatgagaccacccatgggcccaccaattgggcttccccctgctcgagggacgccaataggcatgccgcctccgggaatgagaccccctccaccaggcattagaggtccacctcccccaggaatgcgtccaccaagaccttagcatactgttgatccatctcagtcactttttcccctgcaatgcgtcttgtgaaattgtgtagagtgtttgtgagctttttgttccctcattctgcattaataatagctaataataaatgcatagagcaattaaactgtg

SEQ ID NO: 53 - DNA, 1764 bp, Homo sapiens
gcaggtgccccgaaaagggggcggggtcaggggtgccctgaactccgaatgcgaagttctgtcttgtcatagccaagcacgctgcttcttggattgacctggcaggatggcgccaccaccagctagagtacatctaggtgcgttcctggcagtgactccgaatcccgggagcgcagcgagtgggacagaggcagccgcggccacacccagcaaagtgtggggctcttccgcggggaggattgaaccacgaggcgggggccgaggagcgctccctacctccatgggacagcacggacccagtgcccgggcccgggcagggcgcgccccaggacccaggccggcgcgggaagccagccctcggctccgggtccacaagaccttcaagtttgtcgtcgtcggggtcctgctgcaggtcgtacctagctcagctgcaaccatcaaacttcatgatcaatcaattggcacacagcaatgggaacatagccctttgggagagttgtgtccaccaggatctcatagatcagaacatcctggagcctgtaaccggtgcacagagggtgtgggttacaccaatgcttccaacaatttgtttgcttgcctcccatgtacagcttgtaaatcagatgaagaagagagaagtccctgcaccacgaccaggaacacagcatgtcagtgcaaaccaggaactttccggaatgacaattctgctgagatgtgccggaagtgcagcagagggtgccccagagggatggtcaaggtcaaggattgtacgccctggagtgacatcgagtgtgtccacaaagaatcaggcaatggacataatatatgggtgattttggttgtgactttggttgttccgttgctgttggtggctgtgctgattgtctgttgttgcatcggctcaggttgtggaggggaccccaagtgcatggacagggtgtgtttctggcgcttgggtctcctacgagggcctggggctgaggacaatgctcacaacgagattctgagcaacgcagactcgctgtccactttcgtctctgagcagcaaatggaaagccaggagccggcagatttgacaggtgtcactgtacagtccccaggggaggcacagtgtctgctgggaccggcagaagctgaagggtctcagaggaggaggctgctggttccagcaaatggtgctgaccccactgagactctgatgctgttctttgacaagtttgcaaacatcgtgccctttgactcctgggaccagctcatgaggcagctggacctcacgaaaaatgagatcgatgtggtcagagctggtacagcaggcccaggggatgccttgtatgcaatgctgatgaaatgggtcaacaaaactggacggaacgcctcgatccacaccctgctggatgccttggagaggatggaagagagacatgcaagagagaagattcaggacctcttggtggactctggaaagttcatctacttagaagatggcacaggctctgccgtgtccttggagtgaaagactctttttaccagaggtttcctcttaggtgttaggagttaatacatattaggttttttttttttttaacatgtatacaaagtaaattcttagccaggtgtagtggctcatgcctgtaatcccagcactttgggaggctgaggcgggtggatcacttgaggtcagaagttcaagaccagcctgaccaacatcgtgaaatgccgtctttacaaaaaaatacaaaaattaactggaaaaaaaaaaaaaaa

SEQ ID NO: 54 - DNA, 7616 bp, Homo sapiens
cggcgggtggcggcggcccccagcacggccggtgcaaggcctcgggttaagcggcggccgagcggggctcggcccggggtgctcggggagctcgccgcggcgggcagcaggaggaagcggcggcggcgcgtcccgagcggtgcgcgccatggcgggcgggccccccaaggccctgccgtccacggggccccactccctgcgcgacatgccgcacccgctggccggctccagcagcgaggaggccgtgggtggtgacagcacgcccagcccggacctgctgatggcccgcagcttcggtgacaaggatctcattttgcccaacggtggtactccagcaggtacttcaagtccagcttcttcatcttcccttctcaacagacttcagcttgatgatgatattgatggtgagactagagatctcttcgttatagttgatgatcccaagaagcatgtgtgtacaatggagacttacatcacctataggatcaccaccaaaagtactcgggtggagtttgacctgccagaatattctgttcgtcgaagataccaggattttgactggttgaggagcaaactggaagaatcccagcccactcatctcattccccctcttcccgagaagtttgtggtaaaaggtgttgtggatcgtttttcagaagagtttgtggagaccagaagaaaagctttggataaatttctaaaaagaattacggaccatcctgtgctgtctttcaatgaacactttaatattttccttactgctaaggacctgaacgcctacaagaagcaagggatagcattgctgaccagaatgggcgagtcagtcaagcacgtcactggcggctacaagctgaggactcggccgcttgagtttgctgccataggtgactacttagatacatttgcactcaaactgggaaccattgatcgaatagcccagcggatcatcaaagaagaaatagagtaccttgtggagctgagagaatacgggcctgtgtactccacatggagcgccttggagggtgagctggctgaacccctggagggtgtgtcagcttgcattgggaactgctctacagccttagaagagctgacagatgacatgacagaagacttcctacctgtgctcagggaatatattttatactctgactccatgaagagtgtattgaagaagagggaccaagttcaagcagagtatgaagccaaactggaagctgtggctctgcggaaggaagaccgccccaaggtaccggcggacgtcgagaaatgtcaggatcggatggagtgtttcaatgctgacctgaaagctgacatggagaggtggcagaacaacaagaggcaggacttccggcagctactcatggggatggctgacaagaacatccagtattatgagaagtgcctcatggcgtgggagtcgattattccactactgcaggagaaacaagaggccaagtaaagttctttcttgggacggagactcttctacctacacagggcctggcaccctataccggaatgtccctgcagtgccagagacgcagtgctgggaaaacaaccacagaaacatctctcctttgtgtatttttccctcccccacctttcaccccacagtggttttcaattagtatttattccatggtggagtctgtgaggctagaatatctctcagcaagagcagcatacctccatgttgtgaaggcatctgttcagtgaagcactacgaaaatttgaaaccaagggacaagacaacctgcagctgacgctctgacatttcatgacagtttcctctttagggacagctgagttgccagttgtgggagagaacccggggcctgcttttcaaggatgaggaggaggcaggaacagaaggcagctgctgctttctgtggaaacctggcccctctggaattggcctctgtgggcattgactcgtcttggcctaggaggcattggtgcctccctggcaagtccttaacgtacagtacctgtagctgtgagtgtggcctgctgcctgcttgtgatgagtgataccgtcttactgtttctgtttcacatagggacatttaaatcaatgtcaatgtgcgtccatgcttgagtgagcaagccagcgtccttgtcctcctgcaatgcctttgggaagctcaggggaatgctccccaagcttgtttctgacactagaatgcaacagattggaaactttttgtgtaaaatgaaaaaaacaaagtgctggttttttttttttttctgtgaaggtcttcagtgttttgcttgttcactgtcatcagagcagggattagacctgttagggaatatctattgtcttgaagtcagagtagctccccattgttgagatcagtgggcatataccaagctccacccccagtgtcagctttgtgcaatttgcctttacctcaccaaaaatacctactttaatatttcctcctgtgtcctctgaatgtctgggcgagcttttggtgagagggctggtatgtcatgttgttatgatacagtcgaaatttgtcaatgcagtgtgaatgttctacataaagtgctttaacccttaacatttcctggtcaggaaggaaaatcagtacctggacgggcctcgaaaatgacaaatgcaacagcgagccctttgtgtccagctaagctaaagtctcctcagtgtgcagccagattcctggggactgctgagtgtggttacaggctgcatttcagacaatgaccaggtttacttttcagatcacaaagcaaacagtcaccaaggatctgtcttccaactcttttttttttctgctgaaatgaagctacatgtcatgtttgtgttctttcatctgtggctcatccctgtaaaactacgaatctgagcctcaaataagcagtagtttttttgttgtttatttttaatgaaacagctgtgttaaggcgctgcttcagatgcaagttcacctggaaatactggtcagcgggcagcacgtcaaggtcacttaagcccacttttaactgcaggtcatcctcgcatcagccaaggctgtggtgctgttgatgccgcagttggacagcataggacggcttggttctgtttcattgtgtttgacaatgttgcagtttaaatgataatgtttaaatcaattggtacttgcctgtagtgttaaaccctatttgtgccattctcaagtcctttgatgtgaattttcagtttggtacagttagaaatgactcattgatgcggacaggtaagaacaacccatgtacccccgagtgattgcatgctttattctacctctaagccatcgtgttgacgtgggtatggacgcctgggtctgacctgacactgtgctgggagaatcaggatgtgtgtctaatggcgagctgacagccctctgctgatatttggcagaaggcaccagaccagcccagcagcaaatgctcatctttgggaacataggaagctttaccttggggaaggtatgctttacaaatgtccagtgtaatgaatgtttggaaaaaactggagttacaggaaaatgaaatctgactatctgctagttgccaaaacccagaaacattcctgtgtaatggttagttgggaaagaaggcagcacttgaaaaaatttaccaggttcctcactgggagatgtgggaaggggcgtgggacgcacgcggtcactccctctcctagtgagaggcagatggctggctctgaagggaggcaggcaccgtgggatttgggcttgctctgcttggtccccatgtgatgccctgtgctgtaagatatcagaaagacctggaacaaggcaaactttatgtcctcctggcatgttattgataacagagccaggaagtccagtgtacattacagattttctgggagaaatagtccttccagagaaaggattccttcccagcctccaggctggtgtctcatgaggtgaggaggctggcccagaaggaaggggacgttaggtggtgaagcaggctcccctgggcctctgagggccagcagtcccaaccatttgcctcttcgttttgaccaagcacaaaagagatattccctagaagtgtcacacggaggcttctgtgccaaagactgccttgtagaggtctcatcacctcacacttcttgacttcacaaaattgtggccctgagatcagtactcctctcttaagtatttattattattattatttactttacctcaagcagacagacataggttttgaggcttgaatacatggcagtggaatacaaggccctccctagcagccgccccaggcctggaaagtgggagatttcattcgcccgggttaaaaatccagaggaagacagaagagaggagtcctaggaactgagcagattttagagacgcaaatgatgtttaagagagccttgtgatttgtagcaagcatgggcactgctttttcttactaatgtggtagatctacacgaacattctaggctgttctgctcagagcgaggaaccactgctcctcaatggggagggaacataccacccagccaggcttagcattgggttttatcctttaataaaagttttataatgaatcctgttcaccttaaagtgtgattatggagatgattggctccatattccaccacgtcattccttcaactcaccagacacctttctttagttgaaataaaccagcatgacctggagatcatggtgactgtaagctaagtctgttttcatgccagatttcagccccacccagagtgtgctctagatgttgttgatttgaatggttttcccagttcccactccacatggggaagttgaatgaatgcacacctgctgctcacttcttgtgaggctgccttttgtgatcaaataacaggaagttctgctttagaggagggcacgatgaccatgtggcagtctgcaagtggaattttgggatggcagcccgaggaacatccagagttactgtgtgacttggtcctgccatcgttagctttgaaatcacaggcattgggctctgttttgacaccattcattggactgcgggacagtcattctttacgttctctcttgagctggtgagagaggaggaagagggaagtcaagagcaacctccaaggcctatgtcagcctcttctccttgggtcttggggtgggttagaactgggttccagtctggccagatgggttgctggctgcactgagggtgattcttctcagaagatgggctgcctgtggtcaggacagggcataccagtctggactccaccttcccagacacctactttaaggacctgtggaaactgggtgatccaattatagggctggggcaaccctgctttggccaccctcatttacaaacttaggttgggagcttgggtttcctgtctcacttccaaaagccttcaagatggcagcagatggacacaccctctcatttcttgtgtcttgtctgtcagatggcaggaggcctgtatcagtaaatttgaggaaaatgttctctcctgggccagcctcacagcttgcgttgggtgtgttggaattgttctcttcggccttgttctgccttgtgatcttttcaattcagtgaataaaccaggaatccattttttcaccaacccaccctgtagattgtcagctttttgtttgagagatgcctggtctcacagttacatgtatcagagtgtgtgtaagttgtctgtgttagaaaggttggggtgggggctttgttgcaggggattagactgttctttcttcatcataatttgagatacatcctgagtatgactgtctaaccctttctgtgtggcagaaaaatatgttttccaggtagtttttactactacagagagtctgtaaataagtgctttaaaaaaataacaaaccaataagatatttgtctcctatataaacattctgtgtatttagcacttgaaaatcaacaaatccagaatttaaaaaaatgccacagacttttcaaagcccaactctacttttttgagaatttgtccgtacctactaatatgccttattcttcttcacctagtgttttaaaagtcctgggtagaaagagttttagaaatgtaatcagttgttcagcttcaataatatagagatctaacatagtcagtcctcaggccccctaaagaaacaagcaagaaagtgagggccatcactagggttggctttggggaggggaaaactaaggactgcttttgccaaatgatatttttgataatgtaaggaaacacagggaccacaaaaccttttttttttttttaagtgtgaaagattagtgccttttggcatacttttgattttagaggatatagtatcggcattgacaaatcacgtagaaacaaagaatgctatagatgacaacagtattaaatgttactcctgattctgcagaacagcttttgaagatactggggggtatcttcaagcctcagagcagcttgtttcagatagaaattctctatgggttgaaatgccaaaaacagaaaacatgatgttgactcatgtaatttagtccattttagcagagcctttagtgttaacaccagtggcgaggagcattgcatattctctgtcagcagcagcactcccacaccaggtggttctgggctctctgtaggctggtcctagtaggtgacacccagcaacacccctgttggacaggattgattgttcgcagtcttagaccaacacttcagtcagaaatgttactgggaggaggaaaggaaaatcactttttttcctccatgtggaaatgaggagagaggaaagtggattgcaaaccaaaatgtgagtcagtgtgatgaagcagtggctctgtcatctcggcctttatccaataacaaaccagcatctcttaaaggcgcttttggcctagacacccctgaagtttggatgaagtctggtggattccctgtctgttgtatttctgtgtgcctgttcccttcattgctgtgagttgggagtgcattgagagatgatgtccatctgatatattcctgtgaaataaactgccagcaaactttctaacttgtattttaactgttaaagaagagattaaaaacttcggctttggacatgtccacattatggactgtcatcttatttttaaaagtcattctttacgtttaaaattttaaaataaaaaccttctgaggtattgatgtagtccaccgtgtaaatgttaccttctctccatgctgccattatgccaaaacaaaagctgtgataaaaaaagtgcttgagagagtgtgttgataagaaagtgatttatttacagatggaagtctttgtttcatgaagctaccaaactttaaaaagaatgtcacccttttttttgtttgttatggaaaccagagattgtaaaatggaaaaagaatcgtttttttgttgactttttgatgctggcacgaggtttttgtccacttttttcatatatctgtgtataaaaaaattgttgtttactatggaattagtattacattttgaggtaaacaaaagaatttgtattgcttgataaatattagcttgtaaatttaaagtttctttacttcaattaacttaaaggaccaataaacccataaaagatgctttctttaaaaaaaaaaa

SEQ ID NO: 55 - DNA, 8211 bp, Homo sapiens
gtcccccgcctgcctgaggacccccgcgcaccccagagacggcgcgcgcccagagcgcgggagcccggagcgccgggcgcctgggaccccgcggagccgctgcccagcccgtggggctcggcgggaatgcaggctgcgctgtgaacccgggcgccaaggccatgtccggcgctcgctgccggaccctgtaccccttctccggggagcggcacggccaggggctgcgcttcgccgcgggcgagctgatcacgctgctgcaggtcccggacggcggctggtgggaaggcgagaaggaggacgggctccgtggctggttcccggcgagctacgtgcagttgctggagaagcctggaatggtcccccctccgccgggagaagaaagccagacggtcatccttccacctggctggcagagctacctgtcgcctcagggccggcggtactatgtcaacacgaccaccaatgagaccacctgggaacgtcccagcagttctcctgggattccagccagccctggctctcacaggagctctctgcctccaacagtgaatggataccacgcatcagggaccccagcgcaccctccagagactgcccacatgagtgtccgaaaatccaccggtgattcccagaacctgggatcctcatcgccaagcaaaaagcagagcaaggaaaacaccatcacaataaactgtgtgacgttccctcacccagacacgatgccggaacagcagctgctgaaaccaaccgagtggagctactgcgactacttctgggctgataagaaggacccccaaggcaacggcaccgtggctgggtttgaactactgctccagaaacagctgaagggcaaacaaatgcagaaggaaatgtcagaattcatccgggaaaggataaagattgaagaagactatgcgaagaacttagctaagctctctcagaactccttggcttcacaggaggaaggctccttgggagaggcgtgggcccaggtgaagaagagcctggcggacgaagcagaagttcacctcaagttctctgccaagcttcacagcgaggtggagaagcccctgatgaacttccgtgagaacttcaagaaagacatgaagaagtgcgaccaccacattgccgaccttcgcaagcagctcgccagccgctatgcctcggtggagaaggcccggaaagccctcacagagcggcagagagacctggagatgaagacccagcagctggagatcaagctgagcaacaagacagaggaggacatcaagaaggcgcggagaaagtccacacaggctggagacgacctcatgcgctgtgtggatctctacaaccaggcccagtccaaatggtttgaagagatggtgaccaccacattggagctagagcggctggaggtggagagggtagagatgatccggcagcacctgtgccagtacacgcagctgcggcatgaaacagacatgttcaaccaaagcacagtcgagcccgtggatcagctgcttcgaaaagtggacccggccaaagacagggagctgtgggtcagagagcacaagacgggcaacatccgccctgtggacatggagatctagatgggcctgtgcagcttcggggggtcctgctggggaggggggctgggctcccaccatggggcccatgccgagtggatgccccccaccctctctcctgggccactgaggagaggggagagagctggtgattccagaagggtgacccggacagcctagctgggggctcccccatattcccaggcccagaagacagacccacagccctgcccttgtctctgaggctgaagaccccctgactcccatgctgtgcttgccgctctgaaacaaacagaggctggaactttgtggtccttgccgagttttgtaggggtcactgtcacatgcttgtgccctggaagccccaaggctcttcctccagctggctcccttgtctccagggctttggaggatcagggtagggagggctctgtctctaagccaggtgtcaggatcagaatcatgggtagaaggtgccattcagctcacagccgcacccagaatcctttgcagccctccttctttatttttttcccattgcattctgggagtccacatctggctttctcagccactgttcatcaccaggggttttaggaggaaggcttggctcctgtcttcccagacccaccatgcctggagaggtcaggatggaactacctcattcggcaaattagccccaaattgagcgctgaatcgtgtcccatgagatcaggcgccatctgtaaagtctcctctggaaatgccaatccatccttcccccagctgcttcctcggggaggcccctgcccccaccctgccagcccttcccagtctcattagaggaagctttccaaagttctcagttatcaagacctcatccagctcgtccaaaggcttcagggatggaaacaaaccagctcgtctcagaggccagcaagctggggcctgtccgccacggtgccctgtgcacctttgggctgccctggcccccactctcccgggccgcccaccacaggctcttaatggggccgggtcagtcctacatgtgagatgggttagggcaagtctttgccatcccccagatggctctgtcttcttgtgtatggcagggctgggactgctgtcccttgtacagttttctgtcactggtgggcactggacaggcatagcagactctcttgtggccacactaggttgtcgcctttcaggcagtgtcccgccacctttgcttcccgctccttctggacattccagagccctgcaccaaacccttacttggtgtctgcacctcctttccctctctccatcttccaatccctggaaaagtctggtctgagtgtgacttgggaagctttcagtgctgctgtttggcccagctcattactttctccctttctctaccacagcaaacacattctccaccatgtcagtctaaagagtctaaaggggccgggagaagcatgagcgaggggcagattctagtcgggagcccatgccctggaaatccatctttcttcatctttcccattgaccactttgggtttgacctgcacatctgcagtgagggcagaattcaacaagcacaactcactggtctttcagtcaacgtgctagaaaccgatgacttattaatctctaattttttggcgcctctttcattgaatgagaattgctttcgtatagttcacattagaaaaatgcctaatatactaaagtaaaccaaacgttgtcacttttctcttgttcttgaaacattgcaaccaaaaaggtcagcacaaaggccttcacctacgtgaagacctcctggtaggatctgtccatgggatggagaaccactctgtccagatctggggttgggtcatgacaccagctaccaattttagaatattatttcttggtttctttatgaaaaatgggtgctagtggtaattgctttgtggcttagtaaactactctgtggatgatttccaaacattcaaagccaatagccttgttattaacaagatattttgagtacaatatggctcattgacttttccattacatctgaggattccagagtcctctgttcatccctgggatagagtgagccctcttgcgtcttccagggtagctcaggttggcccagtttgggccagtccatttttggaggtcactctttcccccctcatcccctcacctccttctctttacccccttcacgtacttcctttctttcttccctctgttattcattcatcaagcaggttaaagccattgtgctaagatctaatctgaggacactataatggccctgtcgtcagggaagcccgtgatcgctcgttttcaggggtcttaccggtcagcaaccttggcattgatacataggcactctacagaatttaagttttcagaggtaagtctgttgttctgattaatctgcattcattcagcgaatgctcaagacaagccaggcatgctgagaagcggcgctctagttgtatgtaagatgggcattcctctgctctcctctattctccatgtcgactgagaagagtataataagaacattgtaccctctccacacttaaccctctgggattctttattataatataaaccaccgtcgtgaggcatttacctgttggatggaaggtagacagcaacaagattttaatcacctggtcaccagaccctcacggcccatatccaattcgaatttcagaaatttctctgtttgctttaaataactctttacaaataagggtcgggcacggtggctcacgcctgtaatcccagctctttgggaggccgaggtgggcagatcacgaggtcaggagatcgagaccatcctggctaacatggtgaaaccccgtctctgctaaaaatacaaaaaattagccagatgtggtggtgcacacctgtagtcccaactattcggcaggctgaggcagtagaatcgcttgaacctgggaggcggagattgcagtgaaccaagatcgggccactgcactccagcttgggtgacagagcaagactccatctcaaaaaaattataaataactctttgcaaataggaaagtgaagctcaagggtaaccagtgaggctatgaaattgccagtgaattaagaccagggctagagtcaacagtccagaacccctatccgtatgaacaggggcccgtttctggttgaaatcaaggttaggatgcaactgagaaaataaaagactgcactttggagaggcaagcacgctatccgggttgttgttttgttttatgtcttggtgcttaggtgaggacttagctgggtttattcaaagtgggcgggtctgggctattcttgagaatgtcccttccatttctgagaacaagtcagccccttctacctgcctccacccaggagactgatgcacaagatctgtttgtgaaagcctgatttaaaaagaaaaaaaaaattccttaagccaaatggtgttccaagttggttgctgtgacaacctccaggaagagccacttgttaccctctattctttctagtgctttcagtcagtggcaacacataggccccttggaccgtggggatggcggccctgagattctgtcagtgggaccaccctgggcctcctttctacctccactcagcaccctgttggccaaggagaatttctgcggtgggaggcagtgctctgctagtcaggattgataaacagctgggcacaccgaaacagtgtaccaacgaattcaccaaccaggggtttctttccctaccctttgtgaaaaccaatcaattactagatgagtggatggatgcagaaaaatctgggctgagccaaagtcccttttggaaatacaagccataacattcgaaggacatcagcgaccttggcttgtttaggtgattttacttccagctgcaggtagtcttgacaaggagtgtttaaacagaaggctcaagatgcattccttgtgtaggtcggagagagcacttctaatgttaagtggggtacagatcagctgcccccccacgtagcctggacatcgtcttatccccataatccttgccatccctacaaggcccatcgccaccaccttttcccaggtttattgaggtatgattgacatccagtaaaattcaccctttggaaatatacagctctgtgaattttgacaaatttagtgtcttgtgaccatcaccaagatcaacctgtttttaaccctccaaaaaattcccttctcctgccctctttccctggcaaccctgattgattatctgatcctataattttgccttttctagaatgtcatataaatggagtcacactgatgtcgccttttgagtctggcatctttccctcagcttaatgcttttgagtcattcatgatgtgtgcgtgtggtttgttccttctccttgccgggaagtatttcattgcatgggcgtactactctgcttctttatttttacactgagcctttcgccctggaagttcttggcccagggtcttcaacttgtttgcacgaccacttccagcttgctgcttccttcagttccccaggctcctcctccaaatgccagctgtgcccacaagctgttcttagggctcacactcgccttttggcgcgtggtgggtttttggtagtgcagaaagaatccagggatgggaggggaagggacggatgggtgctcaattgctgctcacgtctgctgcaacctgaagcttgcatctcagccagcagatctgctcccttctgggacccaggcttcagtgtcacacggtccttggctatgtattgggcgttggaggctttgaaaggcgagcagaagcagcatggacaagaaggctggggctggccctggggctcatcatgatgctttcctggatctgttgcttcatctgcaagctgagggtgtttgttctagatgagtgtctcaggccaccggcaactgcatgtacctcctccctttctcatttccaatgatgtaccctgtacacgtgttcatgctgtgtctggctctcatctgcacaatcgtgcatagaattgcctcaagtcctggtgagagagatgccgtggtacttttccatttagattcaaatggagctaaaattaagagttttatgagctgttaagaatgaggtagtttctcctaggaccccccaaagacagtgcaagtaatgaccgtttggatctcattcgtcgatctttgatagtatgttctggagtctactccccaggagccaggacaggcgtgaagatggagtccttgtcgcagctggagccttgcctagctggtgatcacacagcctggcctgtacctgcaccccactggatggtggtacatggtggcagggacaggaccacacccagttaaggccagaccaggctgagtgtgacccctgaggtaaacactccactaagctgtgtcttgttcatgccccctgctcagtgaaaggtgagtcccgagaccagttgggtacctctctatgcgaaccagagacatttctggatccaggccaggtgaagattagggccaggaagcctgagcccccggggcctcaaggtagggagccgaagaggctgccaggactctgctgggttgaaatttgccggggaggactcttgtctccccctcaggagtatttttgttgaggctttcctggaggtgaagaagcaattcccattgcagcaggttagagcgagaatcagacagagggcaaaaaccaattcgcttctccccacgttctaaatgctggggcatggctgtcaggagggcttcctgggaggtgtctctgggggtggggtgaggttggggcgatggcctttggagattgcgtgtggtgttcaggactgttccttggtgtttgagggaaactttagtgggattgcagtggaatgtaaggtcagggcacgtgggtgctctctcggggtggggtgactgggagacctagagggaaagcctgctatgcagggggagagcacaggactggccctgctctgcggcctcctttgtcccataacctgaagttaagtcacatcccctgtcgggacctccgtgcactcatctgtcaagtgggggcgcttcccttccagcatcacctgcagcagacgggctctcgggagtcgtgggttccaggcagctgtgtggacccagggacagacattcaaagggacgccagccatccttagtgacaggggccccaacttagcatcccttcccttccgttaggaaggagatgaccggaagcaaccccttcacagacacgagcacatcggcaaaccctatgaaagtggaattttctaacaaaataaacttgcttgtttgatctgttttctgtaacttttgctaaatactttatacatttttcatgttaaagagccgtgtctcccgccagcactcctcaccccggtatgaatgtgtttcctccacattgtatatccttccaccctctggctgcctagatcagtaaataaaattgatgtaatataatttataagtaacactgttgaaaccctgatcccagtggaggctgtaacccacctgcccccgcaccacccccctgacccctgttaccgcatttgtgtgtattaatgctgaagaattaaatgtttaaagagtttaaattttgaaggcgtttgctatatacagttgtcctgcattattataaagagttttcaggaagtt

SEQ ID NO: 56 - DNA, 3137 bp, Homo sapiens
gcgcccgccggtcccgtcgccgccgccccgcactcgggcgagcgcgggagccgcgcagtagacggagcgcgcccggccgagcgggccatggccgcgggggccgccgccgcaggtggtggcgcgcggtgaggagagcgcggcgccccctccggggcggatggaacgcggctcggcgggcgggcagtgccggcgtccgcggctggaatggtgctggctgtgttggtcggtgcctgcgttctgaagcccgagaggagccacaatggagacgccgccgctgcctcccgcatgcacaaagcagggtcatcagaagcctctcgattcaaaagatgataataccgaaaaacactgcccagtgacagtgaatccttggcatatgaagaaagctttcaaagtcatgaacgaattaagaagtcaaaatttgctgtgcgatgtcacaattgtggcagaagacatggaaatttctgctcatagagtggtgctggccgcctgtagtccttattttcatgccatgtttacaggtgagatgagtgagagccgagcaaagagagttagaataaaagaggtagatggctggaccctgaggatgctaattgattatgtttacactgcagaaattcaggttacagaagaaaatgtacaggtacttctcccagcagctggtctcttacagttacaggatgtgaagaagacttgttgtgaatttttggaatcccagcttcaccctgtcaactgcttaggaatccgggcttttgctgatatgcatgcatgtaccgaccttctgaacaaggccaacacctatgcagagcaacattttgcagatgttgtacttagtgaagaatttctcaatcttggcatcgaacaagtgtgcagcttaatctcaagtgacaaacttaccatttcttcagaagagaaggtatttgaagcagtaatagcatgggtgaaccatgacaaggatgtgaggcaagagtttatggcccgactgatggaacatgtacggttacctttgcttcctcgggaatatttagttcagagggttgaagaggaagcattggtcaagaatagcagtgcttgcaaagattacctcattgaagcaatgaagtaccatttgctgccaacagagcagcgtatattaatgaagagtgtccggacccggctgaggacacccatgaaccttcccaaattgatggtggtggttgggggccaagcaccaaaggctatccggagtgtggaatgctatgactttaaagaagaaaggtggcaccaagtagcagagttgccttccaggaggtgcagggcaggcatggtctacatggctggacttgtttttgctgttggtggctttaatggctcattaagagttcgcactgtagattcctacgaccctgtgaaggaccagtggaccagcgttgctaacatgagagaccggagaagcactttgggagctgctgtgttaaatggattattatacgctgtgggaggctttgatgggagtacaggtttgtcatctgtggaagcatacaacataaagtctaatgagtggtttcatgtagctcccatgaatacaaggaggagcagtgttggtgtgggtgttgttggaggtttgctctatgctgtaggaggttatgatggagcatcacgtcagtgtcttagcacagtagaatgctataatgctacaacaaatgagtggacctatatagcagaaatgagcaccaggcggagtggagcaggtgttggtgtgttaaacaatttattgtatgctgtaggaggtcatgatggccctttagtacgaaaaagtgttgaagtatatgatcccaccactaacgcatggagacaggttgcagatatgaacatgtgcagaagaaatgcaggagtttgtgcagttaatggtctgttatatgttgttggaggggatgatggttcctgtaacttggcgtcagtagaatattataacccaacaaccgataaatggacagttgtgtcatcgtgtatgagcacagggagaagttatgcaggggtcacagttattgataaaccattatgagcctgaaggacattttcagcatatttatacatgagaaacagccttcaacaagtatttgtgaagtgactgagaatctagcacttctccacttgtagctgcactttaagtctcagcagaagatacgatcgtctgcctttataggcctcagatactgaagattatttttggtagaagcaccgtgtaggctttttctgcaatgagcagcagctgactgaattttcataagaaacttggactgcaggacttaatctgtagtctttagacaacagttgctttcataaagactagttcttatcaaccttgaatgactacagattattttgtgaaggaggatgaagtaatgtgtgttcttgtaaaattaaattttatctttatttcttctaaaaatctgtataccaggaactgaaaatctttgaacagatattaaaatctacgtaagtatacaaactagttgagggatacactgtttgcttttataaaataactttgattacatgaatataataaattatgtgcatataaatgtgtgtctatatgctttcctttaaatatgtttgaaaagatgtttgaaacttgattatactatttataattggcacagtactttgaattatgccagtactacattgtaaaacagagttgtattttttgatatttaacaatgcttaacactttaaatgccacttctgaggaatggacctggtgtaacacacttgaatatgtgtgatgccaaactttttaaaatacaatataaattatgcttatttattattttctttagtttaatcttggtcatgttttggtgtgtatttttaatttttttcttaaattaacactttggcatgaacattactgcaggtttttgatgaatataatgaatgtatggaattcaattgaatttgcatggtcttcggaattttttctgtgtgtataaatttagctgctattaacagaagagagaactttctgtgagtagccatgtgtgttgatcagatacagtttttctgagatcttcaattaatctcactttaaaaatgaccaaaacatgtctttcttgaattaactttgaataaaagtttgtatattatttgtttca

SEQ ID NO: 57 - DNA, 1311 bp, Homo sapiens
agtctagctgctgcacaggctggctggctggctggctgctaagggctgctccacgcttttgccggaggacagagactgacatggaacaggggaagggcctggctgtcctcatcctggctatcattcttcttcaaggtactttggcccagtcaatcaaaggaaaccacttggttaaggtgtatgactatcaagaagatggttcggtacttctgacttgtgatgcagaagccaaaaatatcacatggtttaaagatgggaagatgatcggcttcctaactgaagataaaaaaaaatggaatctgggaagtaatgccaaggaccctcgagggatgtatcagtgtaaaggatcacagaacaagtcaaaaccactccaagtgtattacagaatgtgtcagaactgcattgaactaaatgcagccaccatatctggctttctctttgctgaaatcgtcagcattttcgtccttgctgttggggtctacttcattgctggacaggatggagttcgccagtcgagagcttcagacaagcagactctgttgcccaatgaccagctctaccagcccctcaaggatcgagaagatgaccagtacagccaccttcaaggaaaccagttgaggaggaattgaactcaggactcagagtagtccaggtgttctcctcctattcagttcccagaatcaaagcaatgcattttggaaagctcctagcagagagactttcagccctaaatctagactcaaggttcccagagatgacaaatggagaagaaaggccatcagagcaaatttgggggtttctcaaataaaataaaaataaaaacaaatactgtgtttcagaagcgccacctattggggaaaattgtaaaagaaaaatgaaaagatcaaataaccccctggatttgaatataattttttgtgttgtaatttttatttcgtttttgtataggttataattcacatggctcaaatattcagtgaaagctctccctccaccgccatcccctgctacccagtgaccctgttgccctcttcagagacaaattagtttctcttttttttttttttttttttttttttgagacagtctggctctgtcacccaggctgaaatgcagtggcaccatctcggctcactgcaacctctgcctcctgggttcaagcgattctcctgcctcagcctcccgggcagctgggattacaggcacacactaccacacctggctaatttttgtatttttagtagagacagggttttgctctgttggccaagctggtctcgaactcctgacctcaagtgatccgcccgcctc

SEQ ID NO: 58 - DNA, 396 bp, Homo sapiens
actccgccttccacgtgcacccactgcctcttcccttctcgcttgggaactctagtctcgcctcgggttgcaatggaccccaactgctcctgtgccgctggtgtctcctgcacctgcgccagctcctgcaagtgcaaagagtgcaaatgcacctcctgcaagaagagctgctgctcctgctgccctgtgggctgtgccaagtgtgcccaaggctgcatctgcaaaggggcatcggagaagtgcagctgctgcgcctgatgtcgggacagccctgctcccaagtacaaatagagtgacccgtaaaatctaggattttttgttttttgctacaatcttgacccctttgctacattcccttttttctgtgaaatatgtgaataataattaaacacttag

SEQ ID NO: 59 - DNA, 21283 bp, Homo sapiens
cggtccctcgccgcgccgccccgaggggcacttccggcggcggttcacttcctggttgggtggatggagccgggcgggagcgcgcgcgggggaggggcggcgggtcagtctccgcccggcgctcccgggatcagctggcgggcgggcgggagccgagcgcggccccggctctcgctgcagcgccgcctcttctctgcgtcgcaggccggcccggcggccgtgacaatgtcgcggggctggtagcagggcgccggccgccgagccgtctcaagtttaaacttacacgaatcgctttctggaggaggaggggacccgctgcgcgattgacacgcatattcctataggcatcctccctcagcccccacccccacggccggattcgggtggctcctctccgaggtgaaatctgagaagaaatccttggatctcttttcttaaaaaaaaaaaaaaaaaaaaaaaatctagaaaccatcggtattttgctttgctgctccctattcgcaagatgaagaagtttttcgactcccggcgagagcagggcggctctggcctgggctccggctccagcggaggagggggcagcacctcgggcctgggcagtggctacatcggaagagtcttcggcatcgggcgacagcaggtcacagtggacgaggtgttggcggaaggtggatttgctattgtatttctggtgaggacaagcaatgggatgaaatgtgccttgaaacgcatgtttgtcaacaatgagcatgatctccaggtgtgcaagagagaaatccagataatgagggatctttcagggcacaagaatattgtgggttacattgattctagtatcaacaacgtgagtagcggtgatgtatgggaagtgctcattctgatggacttttgtagaggtggccaggtggtaaacctgatgaaccagcgcctgcaaacaggctttacagagaatgaagtgctccagatattttgtgatacctgtgaagctgttgcccgcctgcatcagtgcaaaactcctattatccaccgggacctgaaggttgaaaacatcctcttgcatgaccgaggccactatgtcctgtgtgactttggaagcgccaccaacaaattccagaatccacaaactgagggagtcaatgcagtagaagatgagattaagaaatacacaacgctgtcctatcgagcaccagaaatggtcaacctgtacagtggcaaaatcatcactacgaaggcagacatttgggctcttggatgtttgttgtataaattatgctacttcactttgccatttggggaaagtcaggtggcaatttgtgatggaaacttcacaattcctgataattctcgatattctcaagacatgcactgcctaattaggtatatgttggaaccagaccctgacaaaaggccggatatttaccaggtgtcctacttctcatttaagctactcaagaaagagtgcccaattccaaatgtacagaactctcccattcctgcaaagcttcctgaaccagtgaaagccagtgaggcagctgcaaaaaagacccagccaaaggccagactgacagatcccattcccaccacagagacttcaattgcaccccgccagaggcctaaagctgggcagactcagccgaacccaggaatccttcccatccagccagcgctgacaccccggaagagggccactgttcagcccccacctcaggctgcaggatccagcaatcagcctggccttttagccagtgttccccaaccaaaaccccaagccccacccagccagcctctgccgcaaactcaggccaagcagccacaggctcctcccactccacagcagacgccttctactcaggcccagggtctgcccgctcaggcccaggccacaccccagcaccagcagcaactcttcctcaagcagcaacagcagcagcaacagccaccgccagcacagcagcagccggcaggcacgttttaccagcagcagcaggcccagactcagcagtttcaggcagtacatccagcaacccagcaaccagcaattgctcagttccctgtggtgtcccaaggaggctctcaacagcagctaatgcagaatttctaccagcagcagcagcagcagcaacaacaacagcaacagcaacagctggccacagccctgcatcaacaacagctgatgactcagcaggctgccttgcagcaaaagcccactatggcagcaggacagcagccccagccacagccagctgcagccccacagccagcccctgcccaggagccagcgattcaagccccagtaagacaacagccaaaggttcagacaaccccacctcctgccgtccaggggcagaaagttggatctctcactccaccctcatcccccaaaacccaacgtgctgggcacaggcgtattctcagtgacgtaacccacagtgcagtctttggggtccctgccagcaaatcaacccagctgctccaggcagctgcagctgaggccagtctcaataagtccaagtctgcaaccaccactccatcaggctctcctcggacctctcaacaaaacgtttataatccttcagaagggtctacgtggaatccctttgatgacgataatttctccaaactcacagctgaagaactgctaaacaaggactttgccaagcttggggaaggcaaacatcccgagaagcttggaggctcagctgagagtttgatcccaggctttcaatcaacccaaggtgatgcttttgctacgacctcattttctgctggaactgctgaaaaaaggaagggtgggcagactgtggactctggcctcccgcttctaagcgtgtctgatcctttcattcctcttcaagtacctgatgcaccagaaaaactaattgagggactcaaatctcctgacacttctcttctgctccctgacctcttgcctatgacagatccttttggtagcacttctgatgctgtaattgaaaaagctgatgttgctgttgagagtctcataccaggactggagcccccagttccccagcgcctcccatctcagacggaatctgtgacctcgaatcgcacagattctctcaccggggaagattccctgcttgattgctctctgctctctaaccctactactgaccttctggaagagtttgcccccacagcaatctctgctccagtccataaagctgcagaagatagtaatctcatctcaggttttgatgtccctgagggctcggacaaggtggctgaagatgagtttgaccctattcctgtattgataaccaaaaacccacaaggtgggcactctagaaacagcagtgggagctctgagtccagtcttcccaacctagccaggtctttactgctggtggatcagctcatagacctgtagccgtgacccagtagcagatgcagttctgtaaccttcataccgtaaaatacattttcattacggagttatgaaaaaaatgatttttttaaaaaaatctgcaaataaggggccctccagcccttttctcctaccccttgccttctcctgtagaaatgataaggaaagaaaatcactttggccctccagatattccttggccagttcctccttgttagtttgctgtgttttctcattacccttcttcaatagcattatcttaaatcaagcactagatgccatgagcttcacctctgctggaatcaactccaccaaaagcttaactgtaactgaaactagtgaattgacacttttgtctcgttcttgctaggaatggcctcccagatcaattctcccaacccccgtctcctttggccagatgctgatgaatgtatttccctgtttttgctttttatcctgatgcattatcatgaggacatggctacttcagttggtcttaactctaggcagtagcctggagatgggtgtgtggtttaagaaagggtaaaacttactgactggtagtatatatttgagaagagaaattgagcccagctctagccaaccaactttgaccttgtttgatcatagacttagccaagggattttacaccccatgcaacctgcccagcattcgtccagctttctggcttccattgaaccgtgatttctcagatctggagacgtgactgcaagtatttgagatccttggatacaatgtgtacgttatataaatcccaagtattgccattccttttcatgttaactgttccaagtgggatctcagaattagaccaaaacaagacggtggtaatatgataccttttattagaagacttttcactggggcgggggtggggggaggatggggaggggaaggaattgtagcagaaacagatgtatttttcttgtgatttttattttgaatcaaatattgtaaattgtgtataaatgaagatgctgaatagttctgtttccacttggcatttcaagtctgatatcaggtgtctgtacagggttttgatttctttcccttgtataactacacaacaatcctacagtgtaacatatggaatcattttgaatagacttgtgtgctataagctttcagcaggtcctctgtctctagaataagcatgttgtttattttcagataatcagaaataagtgtgctgacaagctggacacaatctgggtgtgcccagcttacctttctttctgatgtttaaattgaaggctgcagccaatggaatatgttcagctggttttccttggcttcctagattaaaaaaaaataataaagcatagttctttattaactttaggatattgttcataaaataaataaaggcccctgcactaacatgacaacatgcctcatggtcaccctctctatatgtacttactcattaaagtgtattttatttccttatgtggaaagcacttttataaaatcacccttttgaaaagaagtgggcacagagaaccccactcctgttcttttcctctagtgccattgtccatcatcaaaagggaaactcttagttaatcagatctgtacaaataaaattccaagtccatttgcttgttttgctatctagtacttttgtttcttcttcctcacatttgcactttatgggggaaaaaagtttaacagcaacaacagcctataaaacactgcattctggagggcaaggtttgaccctaggaatgtgcgagtagcctttgaaaggcattggaggaaaagtctgaatcttccagccttccttctgtctttaaatacttcccgtgctggctgaaacaagatgagctaggtaaaggcctctagttgaataacagaccatttccaaaactgagagaggcacaagcttcctgccgaggattaaaaagcaaaagatatccacgaagggctctctgtggttggatagcagtgaaaataggacttggtttacccctttatggacaggaaaattgctgcaggtcagaattgtattctctttcctggacatagaaagaatgtataaattaatgaaggaaatgtttatttttaaataagaataatgtttgagttctatgttttcatatttgatttttttcgtatatacatgttagaaatataatgaaatatctagtttctcaatttaattgaaactatgaagagtacagtttagaaattaggtatctctaaattgttcttttcatatattacccataattacattgaaatatattatctagtcatttggctcagtaaagcttaatggaggcagttaatgaaaatgagcagactagaagccagagacggcagtagaagcctaagggagataatgacaagaaattgtcttgggcttatttagagtaaggcctcctcaaaggggagaactatttttctgttaaggaacacatatgagtgctttggtaaacggagccttccttggtttagagcatcatccctgagctgaaagagtttatttgagttgagcatagtgtcctggtacctgtggaatcatagcctgagctacaaagggacctttgagaccatcctctagtccaccatcctcttcattttacaggtgtgggacctgagctggattgaacagggtcgggggagaagaggcctgggcaggacaggccacctgggatctcatcctggcccttgccagccactggctgagtgaccttcagcaggcacttcacctctcagagttgctgttccttagagttatacgatgggtttggactagatggtctttaagattatagaagtatagggtcctaagtatatattattatattgagaagggctatgaaggatttatataatcctgatgttcttcagttatcttctgtagttcctgctattacggtagcagtgtttacattttaaagaattataatgggcttttactaacttgctctttcttgattatctgaatagaagcctaaatcataatcttagagattttcctttttaagtattacagaaacacatgcgtggacacacacctacctattctaataaaatggtatcagaagatttctttttaaatgtataatcaggcatctaccagtttaaaacgggcaaatactataagcatatgtttctgatttgcttttattccagctatgtaagaggagtaactatagcagaaaacatgacaaattgatttttccctttacaacattcaaatgagtcccaatgttttcaaaaatacatacctcagaggagataaggcttaagtggacacttctaagtatgattataattattataattaatgatttctttagcagacatatcagaattttgacatctaattaagtgttgttcccctcaatgtcatctagttttacttaagaagttaatacttattctaatgatgctgccatccttaaagttatttttgaaactcctctccttagaaataatatcaaggaaggtaataaggtataagaaaatcagctatattatttaattagtatcactttgagaaagcacctggaagtatattctttctttgtctactttttctactactcttggttctgagtaacatttagccatttccagaaagcaaattcaaccctgtaagatgaagagtggttactgttgaagacagtaaaaaggataatccacaaaaaattctcagagaggaccttataatagaaagtgaacatgattaagacttaatttctgtaattttctgaataaggaaacttctgtgattccttagtctttagaatggtttaaaacattgaaagatatgggtattaaaacacctctgaaagaagttgtcactttgttcagtgttatttgatattggacttcgctcttcctgaattagaattacacaacttggattgctaatacttgtggaaaaacaaacccaagaaacgaactactttctcaagatgtaatatttgttttattattaatacttttggttgttttgattacttatttcctactctcctgacagataattgatcaaccaatataaccttccccaggttaggaacagttctgccttcagcagtgctgtgggaatgaagggatctttggggctgacagcctatgatgtggagggatctgcactcagctaaataaatacatgctatagataccttgggccaaaataaagtctctcttgataaggtttttctgtgatttcccagagtccttaaccttctctgtctgcaagattatcaggctcccatagccactaactttgagctttgggatgaaaatgacaggattgcccagtgtgccgggttaagcaaattagaggctgcctggcagaacagaaaaactatcacatgaatatttagaatggaagctttcctgaaacactccagatactgcaaagctatctttattcctctctaaaggctataattttatcaacacaaagtcagccttttctttttccacattagtaatgtttctgaagttggatgtgcttagatttcttaaatcagaatgagtgctaggaaatctataacaagaaacctcttttgcttctcccagatttcctttcactaatacgggatagggaggctccttgggtaatgctaacctatgcaaagaagttaccaaatggtggtagttgctagaattaaagacacgttcttggttcacactttgatgtagtgacctgaatttactcttttcctgtgagtattctactctgccctattgcactctcctttgtcatgtggatgtgtgtttatcataggtctttaacgcgtccttcccaagaagacaaagcatacagttgtacatgaagatatcttatgcagtaaaaacgtgaaatttgaacattgctgcacaagtattgtataaaaaaaagtctgtaaagaactttcttatgtaaacatacaggggaataaagacttttatctgttcaaatgggagcatgatgtttagagatgtaaataacttaaaataagttgctcttttcctgagctgaaaacccacttttttgcagaaaggatttaatcacagtattgagtgacaataagtacctgggcacaagaaaagtatagctacacactgaggacatattaatgaatcatggctacctgagagagtaaaacccctgttttagtctcaaggagaataagacgcctgccagcctacactggatatgaccagactcagggttgtaaaatggagcgcaggtttgcagcttccctcctctaacttaatccctaatatacccaggccaacttaattaaacattttgtgttggcaagaataattttatccccagtgagaaaactcactcatttaattgcctcattggcctgagaggcacagctggccatttttggcttccatgaggtccctcatttcccagtcgtgggttttaatgcagctacctaatatatggtggaaccaaatgcttaattttgttatgtgagctagaaggtcatggtaattattagtttgatgtacgtctcttgatttccccagtttggttctaaaattttacgtttcaattgctgctgcatttccaagttcttgtgaagggatattttgctttctgtttactaactatatgtgagaaggcttcttctcaatgctccaagtcttcgttttctgtttttggcaagaatcatatctttgatactccctgtaaccgttctttcagtttttggtatgaggaaaagtaaacttctggtgttgtgtgatgtatttcattaaggaatatccagcctgacatttaagtcttcagattttaattctgtagggagcattctgatggccctcactatgtcaatcagatggagtttccaggggaaacccatcctaaatgattcagcactttgggttgctttggaagtgaatagggagctggtgaggatagttgccaagttgtcaggtattttaggaactccttctcttccctgaagcatgtgagttcttgctgaaatctacataatttggagcctcaaaatagactaatatggagttacccatattgaaagtgtcaacgtgcctaacctggcacacagtcctacatcagagcaagaaaaagaagtatgttttgacttcttgcttaattttatgtgtgaaaccaaaataaaaagaggcatgatccagtttgagggaattataacaaaaccctacgttaggctctatgataagtaagaccctgtgcagactatgaagccaggccctgggctttagcccctgaggtacaacaggcagtgtttactgagctctatggccacagggtatctgctatgacgtgccattggttaccaaaggaactgggtcaaggcatgtggttaggttagtataaatccttcaatgctagtaaagagactgcttcaaacacgttttcttgttgacacaatgctaccttcatataaaggaactgttcaccctgaaaacacattttccctgtaagaacacattcacatactcaaaaaaagacttttatctgccaacaagatttaatggttaccttctgtttctagtatatttggaatttatccttctctcgactaccttgtttctggtgctgccaccaccagaattccttaagggaatgtggaggtctgggcttcccccatattctctggcatttctttgcccttcagagtgccaggcctggagagttgcaaagtgtggttgctctccgcctcagccacactgtacctcctctaacaagaatagaaaggttaagggacttggccttctcaggacaaccctttaaatgtacttttccattcctacaaagcctgttgatgctgaaagaaagataggaaatagctcttgtccttgttttgaaggacaggagactaattttcccttcaaacttgatattctggtgtttttgtgactgtttttgtaaattattcaaagttgttggaattttaagtctgattttcccagtactcatcatgaaggtcatagaatatgctctgagttggaaggttttccaaatgggttctcgaccaaaaacccactttttaacaaataattttgatgggttagacatgttcttccatcctctccaaccctgaatatgggcacatacacacaccccttggtacttcctagttctcaaaatgtaatctagcacttcaggcatccaaagtgcccctggttcaatagatagctgcttttttgccagtctctgtgcacaaattgttttaactgaattcagtttaaatttccaaaaaacactgactctgttcaaactagtgttcattggattattgacctgtatgatgccagagttggtcactggcttgactaagttttccattttttttccctaagagatattttgctctcctgcagaacaagcttaataacatcaactttcaaggtagttttggaagatgagaaattgtgcttttgttttggcaactgaaaactttgtccaactgatactatgtgaggaaggtggttcaaggagttttagggccctcttgtccttctttaaggctctgcaaaccttattttggaaaacttatttttctcccttttatttgaatttcctcccagaaattatcatcttggtatcactgagacaaatctaatatcaatttacttgcctgagaaattaggattatgtctgtccacataaatcgcaaggaagaaggtattctgtttatttcctgtccactgactgatgctttcgtatcaccatgtagctgcacatactaaaattataatacaaggaaaaatttattcttttcaaaatcttattcttcaaatactattctgaaagccatttggcaccagtacagaatttaacttaacgccccaatctggaattcactgaacgcattcaaactgttagaaaggaaaataaaaatggaggacaaacacatttttgttctgtttctgaaaacaatatttaaggtcagaactgtttaaaaagaagcactgctaaaaagttataggattcagagaaacatagtatttttgtacagtatcttataaaatgttcagacctctctctacattctctttacaatgtaatgtctctaagtgactggtttcccaataaactgattttaatgcctcttctgctgtggtctgtgtgcttaattcatgcagaaactttagcaggggataatttttggcagaaatttctgctagctaatggtttgcataggaggggagagggtcagtatgggaaggggatcattgagttccatctctacagaggttctgggtcatctatggctccaaatcattgtatctaatattcttatcctggtgggttgggaaactccagtagtatctctttactgagcccatgatgaaatgatacctttacccccaaccaccctttctctggattcttcttgcttagttacatatgcctttttcctgccctcttgctaacatgtgcccaatgacatacttctaacctgctaatatttcttggaaggtaagctctcttgcattctgataattgtctatttgattttaaaagccagagcaccctgaggcacctctacctagatagaaatagactagtatattggagtttgctaatgcttctgtaatggcccatgcattttactccttctgcttaaagaactttatggcagattcatttaagcagaggagatctttatgaacttagaagactgaaaacaaaattctggggcaactccagctgaaggtgatttatttggtctgattttgatgctgtatgctcccctcagaaggtaccttcagtatttatattttgggcactcgtatgctctttgagtagtgcttgtgatgtaagtcatcaagtaaacttgcatttatcaagcagccacattctgcttcttttcagagagtttgtccctctgcatgtggcgcggatgaccacatgccagattctgaattgagtcatccccagacagtgtttctacataatccaaaactgtcatggtatatgtggagatgaatgactgggtttgttttcattccataatgagccagtgccaggtagagcaggtgtccgtgcctggccctgtgtgtaggagcattgcatagttacgctgaatgtctgtgtgcctaacatcttcatctcctttcctgtacgtcgtgcctatcatgttccaaaacgtgagacagtggttgattgtgttccagtttgtgtgcagtttccttgcctgacttttatttttatgtttttcctgttgcattttcaacatctattatttggtcccacaatgtttttgccgcgggttgaccattaaatgttccaaatagagttgaattgacctacacattaattctgcattttatgcttttctagatctccagagggagtccaatccctgtcctgtaataactgtagagcactttaaagaatcactgggtgttaaaggccttccgctgtatccagacccctccagagtacctggcacaaagactcagaacaacttagaatctgactacttggccagagatggcccttcaagcaacagctcattccacagcagcgaagaggaagggactgaccttgaaggagacatgctggactgcagtgggtctcggcctctccttatggagtctgaagaagaagatgagagctgcagaccccccccggggaagctgggaggagccgttccattcgctccaccagaagtctctcctgagcaagcaaagacagtgcaaggtggaagaaagaaccagtttcaagccttcacacagccagccactgatgggctcagtgagccagatgtttttgccatagctcccttcaggagctcaagggttccaaatgatgacatggacattttctccaaagccccatttgtctccaagagcagtatggctccttcccagccagaggagtcagacgtgtttttgagagctcctttcactaagaagaaaagcatggaggagttaacagttatccaatgcacctcccaggagctgcctgcacagaccggtctcctcagtcagacaggtgatgtccccctgcccgcgggccgtgagagagctgtgtacacctctgtccaagctcagtattccacagctggttttgtgcaacagtctaacctcctgtcccattctgtacaagcagcagaccatctggacagcatctctcccaggggatcctgcctggaatctgggggtcattctaatgacagaaacaaaggacctcagctccagaaagaagctgtctcaggccccatggctggcaaaccattccgcccccagtccttatccaagtattcccgtcactatagcccagaagacgagccaagtccagaagcccagcccattgctgcctacaaaattgtttcacaaaccaacaagcagtcgatagctgggtctgtttctatcacatccctttcctccaggactacggagctgccagctgctgatccatttgctctagcacccttcccttcaaaatcaggcaagaaaccctaggagcaaaacctgagcctcaagcctcttgtctctatcccaccctcaatacccgccatggcactcccagcttagccttctgaagaagaaatattatcagttcttatatttcaattccctgcgtcagagcagaatttcttgagtcaacaaactcagttgcagtgatatttagttgaagcccctttaagttatgttcatttttgtttgtttgtttgtttgtttatattgatttctggacttggaggcattttcatctccttcacagaggtcatccacttccaccaagaactctgctttccccccgccccacccacagaaactgtttaaatcctgaaatacttcttcaccccaatcccaaaggggccctattgttgctagttttaattcctgtagctcctgttctaagtcatgcccatcgaagaatcaagattagtccctccactaaatcaagatttagtactcttgaaaaggggagatgtctggaaagaagagcaagataaaaaccctgcacatcaacaggaagtataatcctgcagttactaataattcctgtagaagcagcagctctaggagtctccagatctgattctcagtctgtgtgcaagccaggctggctctcgtgcatgactgtctatgggtgtggaatgtacgtcagagcctgtgtagagatacaggcagatgggctaactcctcatgtctagtcatgctggcagggctttccccacatccatgcttttgaaattagtgtgagtgtacaggtttgtgtgtgcatgtatacgtgtgtgtgcacaggaagcatttccacttgagggaaatcctgccccatcatgcctacctccacaatgaaatcactcgttttttggtgtttgctcgcctaactgacttgaaccccattttatttatttagtttttttctcatggcaaagtagaatacgttggaaggtgtagggaaatcctgctggaactggtgtttcagagtaaatcttttttctctccggaatttcttgttttgctattaacaaattatatttacctgattatgaaaaattaattttccttatacattttccccttacaacactagaaaagagcaccttgttacagttccggcctctcagtatgtgggctaaatgccagcattagggaattcattaatcatgagactaggctacaaactaggcttgcttgttttggggtggttttgttgttgttgttgttgttgttgttgttgtttccaaatctctactgccttttgaggaaatgtaaatctgagacatggaaataagtgtttgggagaatggaaaagagctgaatcaggtaggcatgaaaacttttacattctctatcctctttagatgttgaaataggccagacaggttaactgatgttttttaaaattgtcttttatttctggaaagatctgacttattcctagcttttttcataccctttattattagtgccttaaaataaagctggccaggtgcagtgccacacacctgtaataccagcattttggaaggctgaggcaggaggatcagttgagcccaggaagttcaagaccaactctggcaacacagcgagaccctgtcccttcaaaaaataaataaaaaaataggctgggcatggtggctcacacctgtaatcccagcactttgggaggccaaggtgggcagatcacaaggtcaggagtttgagaccagcctggccaacatggtgaaaccccatctctactaaaaatacaaaaaattagctggacgtggtggtgcacacctgtagtcccagctactcaggaggctgaggcaggagaatcgcttgaacccgggaggcagaggttgcagtgagcagagattgcgccactgcactctggcctgggcgacagagcgagtctaaaaaataaaattaaataaaataatgaaaaaaattagctgggtatggtgacatatgcctgtagctactcaggaggctgagctggaaggatcacttgagcccaggagtttgaggctgcagtgagttgtgagtccagcctgggtgacagagtgagacactgtctccaaaaatataataataaaaataaagcctgtatctcaatgggaagatttctgctaaggcagttcaactcactggaaagaactgctgcattaggtttcaactttaatgctttctgttacttctagtaaaggttaagtgatttttccattagctgtagaagtttggagagctatttaccaagccagatcaatgatttaaaaattattggaaattcatctaagaatcaagtctgaatgcccaattctattgcggttgattaggtgtgatattctttaaagttcaggaatattggcagtaaaaaatgagcagctacttttcaatactttgtccttttttggtggtctctgcctatttcaaatgtcctgatcaaaagataaataattggcactgtgccaaggtttggttttccaactaaggtttcaactgtgccagaaacctatgtccttcactttggtggatgctaaatgttattctaagaatatgctttttcccaattctcctttctgatttttatgtattagtggatgcaaaattgtctttctagttgaatgaataatttcggctaatgcacgtggaactttgcaccccagattcttcccatggtcattatcaagtgaagccctcaaaaacatgagcgaagagcctagaaatactcagggagatttctcaccccaactcagaaattttttttttttttttcaagacggcgtcttgctctgtcgctcaggcgggagtgcagtggtgtgatctcggctcactgcaacctccattttccgagttcaagcgattctgcctcagcctcccgagtagctgggattataggcacacaccaccgcgcctggctaatttttgtattcttagtagagatggggtttcaccatgttggccaggttggtcttgaactcttgaccttgtgatccacccaccttggcttcccaaagtgctaggattacaggcgtgagccaccgcacctggcccagaaattctttttttttttttaaattattattatactttaagttttagggtacatgtgcacaatgtgcaggttagttacatatgtatacatgtgccatgctcgtgtgctgcacccactaactcgtcatttagcattaggtatatctcctaatgctatcccgcccccctccccccaccccacaacagtccccagagtgtgatgttccccttactgtgtccatgtgttctctttgttcaattcccacctatgagtgagaacatgcggtgtttggttcagaaattcttaaagtaagagatcattctaattcccctttccaaatattcaggattatctctgtaacagcccagcaaaatgtttttcctttggttatttgataattcccttctaatcaagtgactattttaattctcaaggtgcaaatcaggataaaatcatggtgattttactacatagttgaatacttcgtcaagtatgagcttgtatcctttttaaatttttcactggaggccaggcgcggtggctcacgcttgtaatcccagcactttgggaggccgaggtgggtggatcacttgagggtaggagtttgagaccagcctggccaacatggtgaaaccctgtctctaccaaaaatacaaaaagtagctgggcgtgatggcacgcacctgtagtcccagttactagggaggctgaggcagaattgcttgacccagggaggcagactttgcagtgagccaagattgtgtcattgcactccagcctgggcgagaagagcaaaactccgcctcaaaaaaaaaaaaaaaattgtcactggagacatgatgggtggagactctacataccttctttgaatacagaaacggatgcaaacacatgcaaattacttttttttttttttttggtgatgcatgaaaaaactttgacttgtggattacattaattattagtaacagttagattctgccgacttgtattacagtagggtcttatttccttaaagagaaaaaaaaatacagtcatgccccacttaatgatgagggagacattcagagaaatgcatccttaggtgattttgtcattgtgtgaacatcacagagtgtacttaacacaaacctagatggcacggcctactacctacctaggctatatggtccagcctgttgctcctgggctacaaacctgtacagcatgttactgtactgaatactgtaggcagttgtaacacaatggtaagtatttctgtatccaaacattttagacatagaaaaggtacagtaaaaatatggtataatcttatgggaccatcatggtatatgtggtccatcattgatggaatcgtttttatgcagcacatgactgtatataatcaacaaacaactctactttcttgttttcgtttgttgtgtttttgctttacacatttgatagggaacatagaagttgtgacctttcatttcagtggaaagcattgagccagaatatatttattcctaaaccatcgagccacacatgcattgatgaaccctgaaagaatccacagtaattgactaacaggcagtactgaatgaaagatgtcatatgtggtgaaaaatatttaatatatcagtttcttgggctcacatacagccctttagttccaagtgcttggttagattagaaaatgggatgaacacaatttgatgctgaagcagctgctgagcagcacccagggagtctaggtcatacgccctatattgttttcggcccacttattgttgagttgaaaagtctcatatttgtagactagagtgtatgtgtttagaggctcatgttgtatctgagttttctctggcaactaagatctctttctaaacgttctagaaagatactggtatcttactggcccattatttagtaagttttagaatacatgtacatcagtgttttcaactgcttggtggacatttcactgatgcataatcaaagtagcagattataatcatcagagtgatctgacaaggaaattctgtatttgcttccataaagaaaaataatcaaaacatatatcagatataatatatatgcagtatatcacataggaaattttattgtaggaaattagagaaggatgctactcaattcattctctagcaggaagaatacagcttaaaaatcacttgggtccctttaataaagaaaagtgtgattctgtgttgtgtgtttggaactgaaattggagaacacgtgccagtcgactgtgaaatggttgctggataaaaccacagatgtggttttatccgagaaatgtgggactgaaattattttgatgagaggtacataagagagctgcagaaaagactgtagcttctgaggaggcaggagtaccttgttaatatccaaaccacccctgagttctaatgttccaactccacctaaacgaggaattggaaactttaaatggaattatctaatttaaattcttagttttttctttgtctttctcagctgatacttgtagttttgttttgttttttaaccaccaagaacacttgcaagtttgttactgaaaacatcactaaaggaaaagaagagtttcaaaatgcttgaaaagtagtatgtggttgggaattgtttttgttcaagtccctggaagtcctcttggcttagctcccttgttcctgttcccacttcatttccttacttaacattcccctattttgagcatgtcaataagtgcatgatgaatggcacagttgaatgatcatgttaactttaattgcttcctttgttgctgtaaacagtttcttgttaagtttcagccaagtctgtgacaatctcaccaaataagaatgaaatgggcggggtgtggtggctcacacttggaatcccagcactctgggaggctgtgttgggccgatcgcttgagctcatgagttcaagaccaacctgggcaacatggcaaaaccttgtctctacaaaaaatacaaaaattagccaggcatggtggtgcacacctgtagtcccagctacttgggaggcttaggtgggaggatggcttgagcacgggaggcagaggttgcactaagccaagatcgtgtcactgcactccagcccaggcaatagagccagaccctgtctcaaaaaaacaaaacaaacaaaacatgaatgaatgaaatggctcaccttccctattatgaactagaagaaaggatgaaggaaggttggcaggaccccagccttactctgtagtgacaacccagaggtacttttcccggaatgcagggtcaagtttatgtgtgaagggactctagaatagctggtaaaaatggctacatggtaaccattcttgacttagtccagtattcccataatttgtaattccataaatttattctcagctgtcccccagccatttctaatagaaggatgtgtaccccagttttgacaatgttcttgaaatcaagttagtgttacctgcattgcattataatggaactatatgtacatgttaaagggatccgtttgattcctttcggcaaggaattgcaaaaatagtttttaccaataccagttaaaataggataggttagactttgggggcagggtgagacagtgcagccttttcactctgaaatggcaaatcagctgtactctttgagtctaccagagattcctatttgagtgtgaatggggtgtgtgtgtgtgtgtgtgtgctcattcatcttcatgctttcttccatggtgttaattcaagctctcctaataaaggtatccaaagagtactgagaagtgaccataggtatttggcatgagtaaatgtagttccttttgccaaaaaaactctcaaaagttacaactggagttcttcgcgataaaaggttggggaaatcagccatggctttagccttgttcccaagtacacatcttcttatccacaaggatgaaactctgtagggctcaccctgagggctcatgtgtggcattgagagggtagcagtgaccagaacaccacaaggcccacaagatgttttgaatgagggaacatttaatgtcatttgttaggagatagaaaccaaataataaaggacaaggaccacgctcattccgtggagaagaggtgaactccctctgctgactatttggaatggactgaatgaggaggtctctccagccagaaggagtattgaggtcatcaggcctcagaaaacaatgtacacataatctcgggctgtgaacaagagaaaggagggggggaaacatgaaagtcaatcttaacaatttttgcaatacctcttatttgcagaccattggatttatgttattgcactctcggtgtgatttatcgtatgtatctgataggttttatgaattgttttgagttgtaaactcctataccctttattaaaatggacctaattaagtgattaaaaaaaaaaaaaaaaaa

SEQ ID NO: 60 - DNA, 987 bp, Homo sapiens
gtgggcggaagtcgcggccgctgttttgaaatcgggccgcggggggtctctcaagctggttccaacgctgaggccccacagcctcccaattccgggcagacccctgacacctgctgtctggccccttccggcctgaagctgcagccgcgccatgtccacccctccgttggccgcgtcggggatggcgcccgggcccttcgccgggccccaggctcagcaggccgcccgggaagtcaacacggcgtcgctgtgccgcatcgggcaggagacagtgcaggacatcgtgtaccgcaccatggagatcttccagctcctgaggaacatgcagctgccaaatggtgtcacttaccacactggaacatatcaagaccggttaacaaagctacaggataatcttcgccaactttcagttctcttcaggaagctgagattggtatatgacaaatgcaatgaaaactgtggtgggatggatcccattccagtcgagcaacttattccatatgtggaagaagatggctcaaagaatgatgatcgggctggcccacctcgttttgctagtgaagagaggcgagaaattgctgaagtaaataaaaaactcaaacagaagaatcaacagctgaaacaaattatggatcaattacgaaatctcatctgggatataaatgccatgttggcaatgaggaactaagctgatatttaaatttcctgctttacacatgttataccattgttttttccctcaagtattttttccctgtgaagaagattatttatctgcttttattttagtcactaaaactaaagtttttatttttacattgtgatttttacattaaaatattaactttttttaatgctattttatgaaagattattgtaataaactttgatggggtttgtattttggttaatcttcatgaattgaataattgtttttttaaagcaaaataaagttttttaaataaatgttaaaaaaaaaaaaaaaaa

SEQ ID NO: 61 - DNA, 3535 bp, Homo sapiens
gcagtacacgggaggcttttaattccattgtggagaggacggcgttatttttattaactggaggcgacggcggctgcggcggcggcgggacccgcctcctccggggtatgaaaatcggcagtgggttcctgagtggcggcggaggtaccggcagtagcggtggtagcggctccggcggcggtggtagtggcggcggcggcggcggcggcagcagcggcaggagggcagagatggaacccacctttccccagggtatggttatgttcaaccaccgtcttcccccggtcaccagcttcacccggccggcggggtcggccgcccctcccccgcaatgcgtgttatcctcctctacctccgcagccccggccgctgagcccccccctccgccagccccggacatgactttcaagaaggagccggcggcgtcagccgcggccttcccctcgcagaggacctcctgggggttcttgcagtctttggttagcatcaaacaggagaaacccgcggatcctgaggagcagcagtcccaccaccaccatcaccaccaccactatggggggctgttcgctggagctgaagagaggtctccaggcctaggaggcggtgaaggggggagtcacggcgtcatccaggacctcagtattctccaccagcatgtccagcagcaaccagcccagcaccaccgtgacgtattactcagcagcagtagcaggactgatgaccaccatggcactgaggagccaaagcaggacactaatgtcaaaaaggcaaaaaggccaaagccagaatctcagggaatcaaagccaagaggaagccaagtgcatcttccaaaccttctttggttggagatggagaaggtgccatcctctccccaagtcagaaacctcatatctgtgatcactgtagtgctgctttccgaagctcctatcacctgcggagacatgtcctcattcatacaggagaaagacctttccagtgcagccagtgtagtatgggtttcattcagaaatacctactacagagacatgagaaaattcatagtagagagaagccatttggatgtgatcagtgcagcatgaagtttattcagaagtaccatatggagagacacaagaggacacatagtggagaaaagccatataagtgtgacacttgccaacagtatttttcaaggactgatagattgttgaagcacaggcgcacatgtggtgaagtcatagttaaaggagccactagtgcagaacctgggtcatcaaaccataccaatatgggtaatctggctgtgttgtctcagggaaatacaagttcttcaaggagaaaaacaaagtcaaaaagcatagctattgaaaataaggaacagaagaccggtaaaacaaatgaatcacaaatttcaaataatataaacatgcagagttactcagtagaaatgcctaccgtgtcttccagtggaggcataattggcactggaatagatgaactgcagaagagggtgccaaaattgatctttaagaaaggaagcagaaagaatacagataaaaactaccttaactttgtgtcaccattaccagacatagtaggacagaaatccttgtctggaaaaccaagtggctcacttggcatagtatcaaataatagtgtggagaccattggtcttctccaaagtacaagtggcaaacaaggtcagataagtagtaattatgatgatgccatgcagttttcaaagaaaagaagatatttaccaactgccagcagcaacagtgccttttctataaacgtaggacacatggtctcccaacagtctgtcattcagtctgcaggtgtcagtgttttggacaatgaggcaccattgtcacttattgactcctcagctctaaatgctgaaattaaatcttgtcatgacaagtctggaattcctgatgaggttttacaaagtattttggatcaatactccaacaaatcagaaagccagaaagaggatcctttcaatattgcagaaccacgagtggatttacacacctcaggagaacactcagaattggttcaagaagaaaatttgagcccaggcacccaaacaccttcaaatgataaagcaagtatgttgcaagaatactccaaatacctccaacaggcttttgaaaaatccactaatgcaagttttactcttggacacggtttccaatttgtcagtttgtcttcacctctccacaaccacactttgtttccagaaaaacaaatatacactacgtctcctttggagtgtggtttcggccaatctgttacctcagtgttgccatcttcattgccaaagcctccttttgggatgttgtttggatctcagccaggtctttatttgtctgctttggatgctacacatcagcagttgacaccttcccaggagctggatgatctgatagattctcagaagaacttagagacttcatcagccttccagtcctcatctcagaaattgactagccagaaggaacagaaaaacttagagtcttcaacaggctttcagattccatctcaggagttagctagccagatagatcctcagaaagacatagagcctagaacaacgtatcagattgagaactttgcacaagcgtttggttctcagtttaagtcgggcagcagggtgccaatgacctttatcactaactctaatggagaagtggaccatagagtaaggacttcagtgtcagatttctcagggtatacaaatatgatgtctgatgtaagtgagccatgtagtacaagagtaaagacacccaccagccagagttacaggtaaggtcccaaaagtggccaggctggaggtcttctaatgtaattttgttttattttgagaacactgccattggaatgtttctacacgatcctattaagaataatgtgatgccctttcaatgcaacttttcatatttagtttattttgttagcgtgattttagctctgtttgtattatgatttttaatcaaaatcaatagattaaaaatagtttgacattcaaagtgacaatgtttagcaatcaaatttacatgtatagatcgtcagggaatagcccaaatgttttaaacgcaaaaaaaaagacaaaaaaaaaccaaaaaaaaaaaacctacaaaaaaaactttgttgctaggattaaggttattctaattgctttactctcaggaaagtgtaataacgcatgggaattctgtacgttatcactgtaatggaatatccaatttacagatagtatgatatacatttcatcatttaagtaagggatcgaaaacatttcaaattgctctatctgggctgatagacatttcgtcatttaagtaagggatcgaagacatttcaaattgctatctccatctgggctgatccaaaattctgagattgttggctacctatattttgttgcagcttttaaatgtactctgaacttccaaaccacattcattccagcctggtagaacaaatattcttggatctttgatcaaagcctggaatgatagctttaataaaagaaaaaaaaaaaaaaaa

SEQ ID NO: 62 - DNA, 6855 bp, Homo sapiens
gacagaagcagagaatacatagacttccgttaaaaccagaatgaggaaaatacttttctctagcatcgtaggaggaagaaaacaaacacatcagatattttcagcactaaaagagatggttttccccacatatatgtaaaagaaatttgcaagactactggattttgatctcatggttgcagtgggtgaataggtggccttttgtgatctcctacatcaccctggaagtgagacttcttcggtttcttctagagtcagtttggtatcagaatggcaaagcaacttaaccttccagaaaatacagatgattggacaaaagaggatgtaaatcagtggttagaaagtcataagattgaccaaaaacacagggaaattttgactgaacaagacgtgaatggagcagtcttgaagtggttaaaaaaagaacatcttgttgatatgggcatcacacatggaccagctattcaaatagaagaactattcaaagaattgcggaaaacagccattgaagattcgattcagacatctaagatgggaaagcccagtaaaaatgctcctaaagaccaaactgtgtctcaaaaggaacgtagagaaacttcaaagcaaaaacaaaagggtaaagagaacccagatatggctaatccgtctgcaatgagtacaactgctaaaggttctaagtcactaaaagttgagctcatagaagataaaatagattatacaaaggaaaggcaaccatccatagacctgacatgtgtatcatatccatttgatgaattcagtaatccatatcgttacaagttggattttagtctacagcctgaaacaggaccaggcaatctcattgatccgatacatgaattcaaagccttcacaaatacagcaacagccacagaagaggatgtcaagatgaaatttagcaatgaggttttccgatttgcttcagcttgtatgaattcacgtaccaatggcactattcattttggagtcaaagacaaaccccatgggaaaattgttggcatcaaagtcaccaatgataccaaggaagccctcattaaccatttcaatctgatgataaacaagtattttgaagaccatcaagtccaacaagcaaagaagtgcattcgagagccaagatttgtggaagttttactgccaaatagtactctatctgacagatttgttattgaagtggacattattccacagttctctgaatgccaatatgattatttccagattaaaatgcaaaattacaacaacaaaatatgggaacaaagtaaaaaattctcactatttgtgcgagatgggaccagctctaaggacattacgaaaaataaagttgatttcagagcatttaaagcagattttaaaacactggcagagtccagaaaagcagcagaagaaaaattcagagcaaaaacaaataaaaaagaaagagagggaccaaagttggttaaattattgacaggaaatcaagatttgttagataattcatactatgaacagtacattcttgtaacaaataaatgccacccagatcaaacaaaacacttagatttcctgaaggaaattaaatggtttgctgtattggagtttgatcctgagtctaacatcaatggagtggtcaaagcttacaaagaaagccgagtagcaaaccttcactttccaagtgtatatgtagaacagaaaaccacaccaaatgagacgatttctactctaaatctttaccatcaacccagctggattttctgcaatggcaggttagaccttgacagtgaaaaatataaaccctttgatccaagttcctggcaaagagaaagagcttctgatgtcaggaaactgatttcatttcttacacatgaagacataatgccaagagggaagtttttggtggtatttctattactgtcctctgtggatgacccaagagatcccctcattgagactttctgtgctttctaccaggatctcaaaggaatggaaaatatactgtgtatttgtgtgcacccacacatatttcagggatggaaagatctacttgaagcaagattaataaaacaccaagatgaaatttcaagccaatgtatttctgctttaagccttgaagagatcaatggcactattcttaaactaaaatctgtgactcaatcttcaaaaaggcttttgccatctattggtttatcgactgtccttctgaaaaaggaagaagatatcatgactgctctggaaattatctgtgaaaatgaatgtgagggtacactgttagagaaggacaaaaataaattccttgaattcaaggcatcaaaagaggaagacttctatcgaggtggcaaagtgtcatggtggaacttctacttctcttctgaaagttattcttcaccttttgtcaaaagggataaatatgaaagacttgaagcaatgattcaaaactgtgcagattcttctaaaccaacaagtaccaaaattattcatctgtatcatcatccaggctgtgggggaactaccttggctatgcacattctctgggaactaaggaagaaattcagatgtgctgtgctgaaaaacaagacagtggatttttctgaaattggagaacaggtaaccagtttaatcacctatggggcaatgaaccgtcaggaatacgtacctgtactactccttgttgatgattttgaagaacaagataatgtctatcttctgcagtactctattcaaacagctatagctaaaaagtacattcgatatgaaaaacctctggtgattatcctaaattgtatgagatcacaaaatcctgaaaaaagtgcaaggatcccagacagtattgccgtaatacagcaactctctcccaaagaacagagagcttttgagcttaaattgaaagaaatcaaagaacagcataaaaactttgaggatttttattcctttatgatcatgaaaaccaattttaataaagaatacatagaaaatgtggtccggaatatcctgaaagggcagaatattttcaccaaggaagcaaagctcttttcttttctggctcttcttaattcatatgtgcctgataccaccatttcactatcacagtgtgaaaaattcttaggaattggaaacaagaaggctttctgggggacagaaaaatttgaagacaagatgggcacctactctacaattctgataaaaacagaggtcatcgaatgtgggaactactgtggagtacgcatcattcactctttgattgcagagttctcactggaagaattgaagaaaagctatcacctgaataaaagtcaaattatgttggatatgctaactgagaatttgttcttcgatactggtatgggaaaaagtaaatttttgcaagatatgcacacactcctactcacaagacaccgcgatgaacatgaaggtgaaacaggaaattggttttccccatttattgaagcattacataaagatgaaggaaatgaagcagttgaagctgtattgcttgaaagtatccatcggttcaacccaaatgcattcatttgccaagcgttggcaagacatttctacattaaaaagaaggactttggcaatgctctaaactgggcaaaacaagcaaaaatcatagaacctgacaattcttatatctcagatacactgggtcaagtctacaaaagtaaaataagatggtggatagaggaaaacggaggaaacgggaacatttcagttgatgatctaattgctcttttggatttagcagaacatgcctcaagtgcattcaaagaatctcaacagcaaagtgaagatagagagtatgaagtgaaggaaagattgtatccgaagtcaaaaaggcggtatgatacttacaatatagctggttatcaaggagagatagaagttgggctttacacaatccaaattctccagctcattcctttttttgataataaaaatgagctatctaaaagatatatggtcaattttgtatcaggaagtagtgatattccaggggatccaaacaatgaatataaattagccctcaaaaactatattccttatttaactaaattgaaattttctttgaaaaagtcctttgatttttttgatgaatactttgtcctgctaaaacccaggaacaatattaagcaaaatgaagaggccaaaactcggagaaaggtggctggatattttaagaaatatgtagatatattttgtctcttagaagaatcacaaaacaacacaggtcttggatcaaagttcagtgagccacttcaagtagagagatgcaggagaaacctagtagctttaaaagcagacaagttttctgggctcttggaatatcttatcaaaagtcaagaggatgctataagcactatgaaatgtatagtgaacgaatatacttttctcttagaacaatgcactgtcaaaatccagtcaaaagaaaagctaaatttcatcttggccaacattattctctcctgtatccaacctacctccagattagtaaagccagttgaaaaactaaaagatcagcttcgagaagtcttgcaaccaataggactgacttatcagttttcagaaccgtattttctagcttccctcttattctggccagaaaatcaacaactagatcaacattctgaacaaatgaaagagtatgctcaagcactaaaaaattctttcaaggggcaatataaacatatgcatcgtacaaagcaaccaattgcatatttctttcttggaaaaggtaaaagactggaaagacttgttcacaaaggaaaaattgaccagtgctttaagaagacaccagatattaattccttgtggcagagtggagatgtgtggaaggaggaaaaagtccaagaacttttgcttcgtttacaaggtcgagctgaaaacaattgtttatatatagaatatggaatcaatgaaaaaatcacaatacccatcactcccgcttttttaggtcaacttagaagtggcagaagcatagagaaggtgtctttttacctgggattttccattggaggcccacttgcttatgacattgaaattgtttaagagcctgatattcttcctccaagaatttgatctcagtacccatttaatttttttggactcaagatctatgctttaaaccggcaaggttatagatacagcctctagctcttcagatctgtacatgcagtatttaatttcctcttaaacatgttatgagttctacaaagacaatagtgaaaaaggaaggagtgagatatatgaaaagtagcaaatatgttccttggtttggttaacatcattgatgacaaaataataaggagctatgactggagtcaggagaagttagtgtaataagctggctacacagaaccccactacttaccaggcatggattgaagaagattgtctactcaaatggcatttagacattagaatgtctgggaaaatatttctcaaagacagcaaaaacctctcaaactgaggagcaacatttattcttactaagcagatcatcaatgtatcatgtgcttggcactcaaggatcttccaaaacagaggaccaaccagtcttctgaaggtcatgcccacagaagtcatcagaccttaccaaagtaggttggagaattagattgccttttcatgcagtgagattcagttaagcaaaaatgaaatttgtctctatagctaattagcttatcaactcccctccaaacaaacaattaaaaaaaaaacatacagacactcaaattccacaagctaatgaacaaaagggactcttgtgagaagactaatgagtccctcatccagaagatgccaatgtactggcagattaacatacaacctatgttttgaacaaaaacaaccagcgatacgtaatcaaaatgtaattttcccctaataaaattatggatatgggcagtcatcaatggctgccaaaaccattaagtggaaagctgattaaaaaacaaaaatttctaatggatttatcaaactgtcccaaatcctgataaatattaacatcacagaggaagaccagacattatgggcctggaagtactataggagtgcacacatcacccgtgacatggtcttgccaaataattaaacctgaatttgatcaggtctctggatcttatttgcaattcaaaagaaattttaaaaaaatcctactaacaccaccacaaatatgcaatcagcaatatccagaaaggggaaattcacaggacaaaaacctggttttcttttttggtttcttcaaccaaaaaagaaagaaattgcaaaggaccaaaaaaatgttggggaatctatacattataagggacttaacaactaaagggcaacatatagactttagatcctaatttgagcaaaatctaaaatcaattattaggcaatcagaaaaatttgaacacagactagatatttgaggatattaaggtactatattattgaagattccatggttatgttttttaaagagttcatgccttttagagatacatactaaagtatttgtaaataaatgacatgatctagaatcagtaattttgtgtttggggtgtgggggtggtgaaagggaagtagaaccgaaacaagattagtcctgagttaacaatggctgcaagctggatacatggaattcagcacacttttctccctcttactgattatgcttttgaaattttctcttgtaaaacatttagaaaacaaaaacaaaaaaaatgtgatttgtttctgtcttcaaaatctcattagaattttttcactggaggaagattttcccttgcttctgcataaaattttaactccataacttataagctcactctttattgttactttctaattgacaaataaaaattgtatattatttat

SEQ ID NO: 63 - DNA, 2921 bp, Homo sapiens
ccccgctggcagacgctggcggcgtaaggcgcgcgggccccggagcgggcgcggcggagcgcggcgagcccggcgcctcccgtcccgaacatgcggaggccggcccaggcggcgcgggagccggagcgggggcccaagcgggcaccggagccggagcgcgagggggcgcggggcccggagcgggggtccgcgctgcgctgctgaggccgggccggccgcccagacgctgcccgcgggcccggccacggcggagccaagctgtgagccgtgagctttgaggcggtgggatgtgtcagcagaatgtctcctgcccccgagagcgaccccgaggccactgagaagagcagcgcggcctggccggcccgaacgcctgcgtctcagtagctgggagccacgggcccacgcccgcccaccggccgcagtgatgttctagccacagaggagccaagacctcaggtttccagagacttgggatttgcacggcagcagagtcaccgtggagaggccagggtatcacaaacttatggattttgacaagaaaggagggaaaggggagacggaggagggccggagaatgtccaaggccggcgggggccggagcagccacggcatccggagctcggggaccagctcgggggtcctgatggtgggccccaacttccgcgtcggcaagaagatcggctgcggcaacttcggggagctccgcctaggaaagaatctctatacaaatgaatacgtggctatcaaattggagccgatcaagtcccgggccccgcagctgcacctggagtaccggttctacaagcagctcagcgccacagagggcgtccctcaggtctactacttcggtccgtgcgggaagtacaacgccatggtgctggagctgctggggcccagcctggaggacctgttcgacctgtgcgaccggaccttcacgctcaagacggtgctgatgatcgccatccagctgatcacgcgcatggagtatgtgcacaccaagagcctaatctaccgggacgtgaagcccgagaacttcctggtgggccgcccggggaccaagcggcagcatgccatccacatcatcgacttcgggctggccaaggagtacatcgaccccgagaccaagaagcacatcccgtaccgcgagcacaagagcctgacgggcacggcgcgctacatgagcatcaacacgcacctgggcaaggagcagagccgccgcgacgacctggaggcgctgggccacatgttcatgtacttcctgcgcggcagcctcccctggcaggggctcaaggccgacacgctcaaggagcggtaccagaagatcggggacaccaaacgcgccacgcccatcgaggtgctctgcgagaacttcccagaggagatggccacgtacctgcgctatgtgcggcgcctggacttcttcgagaagcccgactatgactacctgcggaagctcttcaccgacctcttcgaccgcagtggcttcgtgttcgactatgagtacgactgggccgggaagcccctgccgacccccatcggcaccgtccacaccgacctgccctcccagcctcagctccgggacaaaacccagccgcacagcaaaaaccaggcgttgaactccaccaacggggagctgaatgcggacgaccccacggccggccactccaacgccccgatcacagcgcctgcagaggtggaggtggccgatgaaaccaaatgctgctgtttcttcaagaggagaaagagaaaatcgctgcagcgacacaagtgaccctgggcgcgtgcagccccctgaatcttctccgtgcagccccttggggcgcgaccttgtgcgaggccctcggggcccacccacagcggcccagggccagaccctggctggaagccagaacgcagactgcaggggccgcgcctggctcaggcggccccacccccgggacgtggggtcacttccttcatgtaagactttggccgaaatttctacacctgtgtctagtcctcccctccaagagcattaactatttaaaacaaggaaaagaggaaaaaaaaaacagaggcccgccctaccccactcctgcccctccgtttctttgctgaagtgagtagtgtgatcctggaggccccccggcctggccccgccccgccagccgcccccgttagcgtcataaagtccagcttgtctccctcgatccaaaggccgttttctcgaggggagggcaggcccggcctggaggggtgctgtggagctgtcttgcccaggccctcctgggagggggacaggcattgttgccaggggtgaggccgtgccccaggcctccccgaaaccaaaggggaaggcaggggtggggccgtggctgaagccggctccccaaccaaaatgctgcaccaaagctcgggcgccgcgggcacggctgctgcagtctcttcccagcctggccctggcaaggggcgggtgggcgctgccaggcgggtgcttctcgacgcacttgctcccggaggctgcgccccggcgcctggaacccgaggtgggaggaccggttggtgtcaccctgctcggccctcagccctgccgcgtggggcgcgtgggcacggagcttcctgcctctctgctccgacacccggcaagcagccggagacaaaacgccttaaagcccccggcccagccctgcaggtatattgcaggggcctgggggcggccctggactggcgggcggttccccagtggggtgccctggaggctgccgggcagagtggagcagcttggggccgtgcccagggcggtggctgtgagtctagtttttgctttaccaagtgtacagaaatggcatttacgtttctctgatgctcccttgaagccatagaatttaggggcttttttaaaaaaataaaagaaaaatgaaaccaaaaaaaaaaaaaaaaaa

SEQ ID NO: 64 - DNA, 6227 bp, Homo sapiens
ggggccggccgcctgtcagagggaggtggcgatggtgcgcccggtggcggtggcggcggcggttgcggaggcttccttggtcggattgcaacgaggagaagatgactgaccaaccgactggctgaatgaatgaatggcggagccgagcgcgccatgaggagcctgccgagcctgggcggcctcgccctgttgtgctgcgccgccgccgccgccgccgccgccgtcgcctcagccgcctcggcggggaatgtcaccggtggcggcggggccgcggggcaggtggacgcgtcgccgggccccgggttgcggggcgagcccagccaccccttccctagggcgacggctcccacggcccaggccccgaggaccgggcccccgcgcgccaccgtccaccgacccctggctgcgacttctccagcccagtccccggagaccacccctctttgggcgactgctggaccctcttccaccacctttcaggcgccgctcggcccctcgccgaccacccctccggcggcggaacgcacttcgaccacctctcaggcgccgaccagacccgcgccgaccaccctttcgacgaccactggcccggcgccgaccacccctgtagcgaccaccgtaccggcgcccacgactccccggaccccgacccccgatctccccagcagcagcaacagcagcgtcctccccaccccacctgccaccgaggccccctcttcgcctcctccagagtatgtatgtaactgctctgtggttggaagcctgaatgtgaatcgctgcaaccagaccacagggcagtgtgagtgtcggccaggttatcaggggcttcactgtgaaacctgcaaagagggcttttacctaaattacacttctgggctctgtcagccatgtgactgtagtccacatggagctctcagcataccgtgcaacagttctgggaaatgccagtgcaaagtgggtgtcattggctctatatgtgaccgatgccaagatggatattatggctttagtaagaatggctgcttgccctgccaatgcaataatcggtctgccagttgcgatgccctcacaggtgcttgtttaaactgccaggaaaatagcaaaggaaatcactgtgaagaatgtaaagaaggattttatcagagtcctgatgccactaaagaatgtcttcgctgcccttgttcagcagtgacatctacaggcagctgctctataaaatcgagtgaattggaacctgaatgtgaccagtgtaaagatggttacataggcccgaactgcaataaatgtgaaaatggctattacaattttgacagcatctgtagaaagtgccaatgtcacggccatgtggacccagttaaaactccaaagatttgtaagcccgagagtggtgagtgcatcaactgcctccataacaccactgggttttggtgtgagaactgcctagaaggttatgttcacgacctcgagggaaattgcatcaagaaagaagttattcttccaacacctgaaggttctaccattttggtttccaatgcctctttgaccacatcagtgcccacccctgttataaatagtacttttacccctacaaccctgcagactatcttttcagtaagcacttctgaaaacagcacttcagctttagctgatgtatcatggacccaatttaacatcatcattttgacagtcatcatcattgttgtggtgctgctaatgggatttgtgggggctgtatatatgtaccgcgagtaccaaaaccggaaactcaatgcccccttttggaccatcgagctgaaagaagacaatatcagtttcagcagctaccatgacagcattcccaatgcagatgtttcgggattgttggaagatgatggcaatgaagtggctcccaatgggcagctgaccctgacgacgcccatacataactacaaagcctaaggagctagaactgttctgaattgttaaaccacagtgcttgctaagacagagtcagcccctgggccagacaaagcctggctagagtttgctgagaaagcaaaggcaaatagtgcatctgaaattttcaggtacaaatttgtaatgcgcttagcctatctattgctcttagttttcccatgaagatctgaagcgttcactgtcattaggacttgaagtaaagtatatttttgtaccaaaccacatgggagtatggaaaggctgaaccccatagtgcagcccaaaaccactttgacctccagatagactcctggggaagcattcaccaagccagtggtaacaagatgatgaatgtggagggggaaaagactgctggaagacttcatctccattcctgaaacattttttttaaaacagtgtcagggattatattcgttttactatacaaaaggacatcattgaggaaaagcttgtttctaggctgtatcacagtaaataatcttgattgtttctagaacaggggtagaaaagtcccaagatcttcagaagggcttggttttttcctcccaggattcttgctcagtgatgagttgaaagcacaggataagcttctaagggaggaaggcagcattggggagcaggaggctgatggtcctcctcagggtctcagtgtaaatgataaattgtctaaaaataaggaatattcctgcctctagagaaataaggtgtacatagttaatgtagcatatctggtcgacgttgtatttgtatctatttgtaaaaaaaaaatcatgtcatattttatcatctggaatttatttgtacagcagttaatggtgttgtaaaaagaaaaatatggggattgcttaaaatactgtaaaatagatggcaatattgctagagctgggactctggtgagcatccgtcatttttagtccttcttgaggacattgctgaaatttataagaggtcgaatgtttctttctttcctttctcagtctaaaagtagagttatatgctctttgacttactatgattcaagcaatagattttgaagtcagtaatcgttaagctgggacataggatgcattctccaaaaacattaatctaattagacattagccaccctatatattttacatagattaatataaaacatatcctcattaaaaaatgtttttcttgaatgtaaaagatagtcttccaaaggatagaaatattttagttccaagagaaaagccatcatattacttgggatctgtagttttcatgcctatgaaatatttataatcctccctcaccccaaataaaaaatctcctacatgtgaacatagcctgtcactcatttgccatgaggtatgtgccatctccctgcagtgctatagttctcccattgtcttcctgtctggttaatgagcagctttgtagatgggtgtgtctagttagttcttgctttttgatggagttttttcctagaggccaactactgttgctctcgtttattatgatattgacattttgggttaagcaaggtgggtgggaaaggtggtcagatgttaaatataacttattaggaggaacagtgaactgtgaagtggttagaaaaaaaataaaaacttcttattagattagacctaggaaattcaagctgacccctttgcctaacttccctagagaaaaacctagaacttggtcatccctttataggagacccctaagttgttctcagggtttggagatgatgttctggagggagtacaagcaaataatctacttctggtaatctgagggtgctttgcgtatttggccattgctcagaagaatagaggttacattatattacattatatgaaaattatttagtttttctatagccctttgtagtttgcaaagcacttttccatatgtgtgtcctctcttccacaccatagccccctgaggaagtaattgttgtccccattttatagatgaaaaggctgaggcacagaggagctaaatatcttgttcaaggctatacaatgtgtgtgattattaggcttggaatcagggcctctaactctaaagcacatgttttttcaactatatgcagaaattgcctagccatggacacaagaaagctgggaggaagagttctacttgtggatgtttttaattttttttaaatatcaggagcaatccagggccatacagctatgaagcacttagtgaaaagaacacaagaagatttactaactgaagttagtattagtgattagaaaacaaaactgccagtttgtgcttcattaaggtgaactcatctctccaagcaggaagggaaaatttgctttccctagcagttgctgcatatgtgtgtacagactgcacaattctaagaaattgtgcaaaatggcatacctgtctttctcccagatacaccgccccctgccccccccaaaaaaggtcaggattaaaggtggtgagaagtgaacatttattaaacagaagttaaaccaatagagagaaaggaggtttgttggagtctaagaggattttgaccatgtagaaattccttgaaacagaccttaaaaggtattgaaaaattgaatcacaaagaaagtttacctttaaatacttgttaatggctcctagatcatggttataatttttctcaatgggaaaaaaagtcttaaaatttgttttaaataagatcctctaatgtctcgagctttttgattctggaaataatttgctttaaaatataaatcaatcagaaagtgatctaccactgaaatcattctaggaaactagcatgggatgcactgcacaatgttctttcctctaaaggcatgggccccataaactgtggcatctggcagcaggatgccatcagtcctttagaaagcctaattttgggccgggtgcggtggctcacgcctgtaatcccagcactttgggaggccgaggcgggtggatcacaaggtcaggagttcgagaccagcctggtcaacatggcgaaatcccgtctctactaaaaacacaaaaattagccgggtgtacgtgcctgtagtctcagctacttgggaggctgaggcaggagaatcacttgaacctgggaggcagaggttacagtgagccgagatggcgccatttcactccagcctgggcgacagagcaagactctgtctcaaaaaaaaggaagaaaaagaaagcctaatattgggagaatgtttgtgtaaggattggaaatctgtttatttttaaataagatagcactgatgtgaatcttatttggaaattacagatactgccattaagcgatgcttttatcttcattaattcattttggtaagcgcctatgcatttctgatggttaggtgccctaggtagtgttaagtatgtccgtgtcctcccttactcccctctcgctccctctaccctctatcccctagggttcttttattaatggaatttctccagttatagagaaaaaaatgacatttgaaaactaaagctcatttatattaatactaaggtcctgtgggcctagtgcgttactcttcccagtgatacctagattttaagagtagagaacagaggaaacatgggatgagaggagagaggttttttagacaacatttgtagacacctcaaattatatcactgttctctagcgccaatattcccaggtaaattgaccattaaagcaatactcactgacctactagtttattttggtcagctgagtaccatcaggatatttaaccctttaagtgctgttttgggagtagaaaactaaagcaacaatacttcctcttgacagctttgattggaatggggttattagatcattcaccttggtcctacactttttaggatgcttggtgaacataacaccacttataatgaacatccctggttcctatattttgggctatgtgggtaggaattgttacttgttactgcagcagcagccctagaaagtaagcccagggcttcagatctaagttagtccaaaagctaaatgatttaaagtcaagttgtaatgctaggcataagcactctataatacattaaattataggccgagcaattagggaatgtttctgaaacattaaacttgtatttatgtcactaaaattctaacacaaacttaaaaaatgtgtctcatacatatgctgtactaggcttcatcatgcatttctaaatttgtgtatgatttgaatatatgaaagaatttatacaagagtgttatttaaaattattaaaaataaatgtatataatttgtacctattgtaaaaaaaaaaaaaaaaaa

SEQ ID NO: 65 - DNA, 1056 bp, Homo sapiens
cgattcgctggggcgcgtctttcccaccacgaggccaccagggtgactgcgggattccgatctgcgccggagctgcgatgctagagcactcttgccacccccaccccacggacgtgttgcagtgatatcagaattttgcgtgcggtttacccgtgtttaacctctttgcgtctcgcttctgaatcgtatccacttgagcatcactagactgatctattttaacactggtggggggcagcgaggatggacagattcctggtgaaaggggctcaagggggccttttgaggaagcaggaggagcaagagccaactggagaagagccagctgtgttgggaggagacaaagaaagcacaaggaagaggcccaggagagaggccccagggaatggaggccactcagcaggccctagctggcggcacattcgggctgagggcctggactgcagttacacagtcctgtttggcaaagctgaggcagatgagattttccaagagttggagaaagaagtagaatattttacaggagcactggccagagtccaggtattcgggaagtggcacagtgtgcccaggaagcaggcaacgtatggcgacgctgggctgacctacacattttcaggcctcacgctgtctccaaagccctggatcccagttctagagcgcatccgggatcacgtctctggggtgactggacagaccttcaactttgtgctcatcaacaggtataaagatggctgtgaccacatcggggagcaccgagatgatgaaagagaactggcccctgggagccccattgcctctgtctccttcggtgcctgcagagactttgtcttccggcataaggattcccgtgggaaaagcccctccaggagggtggcggtggtcaggctgccgctggcccacgggagcttactaatgatgaaccacccgaccaacacgcactggtaccacagtcttcccgtgagaaagaaggttctggctccacgggtgaatctgacttttcgtaaaattttgcttactaaaaaataaaaacatttttaacagtttaaaaaaaaa

SEQ ID NO: 66 - DNA, 2200 bp, Homo sapiens
cccaagccagagcggcgcggcctggaagaggccagggcccgggggaggcggcggcagcggcggcggctggggcagcccgggcagcccgagccccgcagcctgggcctgtgctcggcgccatgagcggcggcgggccttcgggaggcggccctgggggctcgggcagggcgcggactagctcgttcgcggagcccggcggcggaggcggaggaggcggcggcggccccggaggctcggcctccggcccaggcggcaccggcggcggaaaggcatctgtcggggccatgggtgggggcgtcggggcctcgagctccgggggtggacccggcggcagcggcggaggaggcagcggaggccccggcgcaggcactagcttcccgccgcccggggtgaagctgggccgtgacagcgggaaggtgaccacagtcgtagccactctaggccaaggcccagagcgctcccaagaagtggcttacacggacatcaaagtgattggcaatggctcatttggggtcgtgtaccaggcacggctggcagagaccagggaactagtcgccatcaagaaggttctccaggacaagaggttcaagaaccgagagctgcagatcatgcgtaagctggaccactgcaatattgtgaggctgagatactttttctactccagtggcgagaagaaagacgagctttacctaaatctggtgctggaatatgtgcccgagacagtgtaccgggtggcccgccacttcaccaaggccaagttgaccatccctatcctctatgtcaaggtgtacatgtaccagctcttccgcagcttggcctacatccactcccagggcgtgtgtcaccgcgacatcaagccccagaacctgctggtggaccctgacactgctgtcctcaagctctgcgattttggcagtgcaaagcagttggtccgaggggagcccaatgtctcctacatctgttctcgctactaccgggccccagagctcatctttggagccactgattacacctcatccatcgatgtttggtcagctggctgtgtactggcagagctcctcttgggccagcccatcttccctggggacagtggggtggaccagctggtggagatcatcaaggtgctgggaacaccaacccgggaacaaatccgagagatgaaccccaactacacggagttcaagttccctcagattaaagctcacccctggacaaaggtgttcaaatctcgaacgccgccagaggccatcgcgctctgctctagcctgctggagtacaccccatcctcaaggctctccccactagaggcctgtgcgcacagcttctttgatgaactgcgatgtctgggaacccagctgcctaacaaccgcccacttccccctctcttcaacttcagtgctggtgaactctccatccaaccgtctctcaacgccattctcatccctcctcacttgaggtccccagcgggcactaccaccctcaccccgtcctcacaagctttaactgagactccgaccagctcagactggcagtcgaccgatgccacacctaccctcactaactcctcctgagggccccaccaagcacccttccacttccatctgggagccccaagaggggctgggaaggggggccatagcccatcaagctcctgccctggctgggcccctagactagagggcagaggtaaatgagtccctgtccccacctccagtccctccctcaccagcctcacccctgtggtgggctttttaagaggattttaactggttgtggggagggaagagaaggacagggtgttggggggatgaggacctcctacccccttggccccctcccctcccccagacctccacctcctccagaccccctcccctcctgtgtcccttgtaaatagaaccagcccagcccgtctcctcttcccttccctggcccccgggtgtaaatagattgttataatttttttcttaaagaaaacgtcgattcgcaccgtccaacctggccccgcccctcctacagctgtaactcccctcctgtcctctgcccccaaggtctactccctcctcaccccaccctggagggccaggggagtggagagagctcctgatgtcttagtttccacagtaaggtttgcctgtgtacagacctccgttcaataaattattggcatgaaaacctgaaaaaaaaaaaaaaaaaaaaa

SEQ ID NO: 67 - DNA, 4195 bp, Homo sapiens
tccacttctcctttcgccggcgccgagttcctggcgccgctcgcccggcccggcttccgaggggagaggacgggctggcggggctggggacccgcgtctcggcccccggagcggggaccacggagacagaccccggcccggcgaccgagctgggcccgtgagccactcggcctcaggtcgctcctgtggttggtccagcccagaatgcagccttgagcctggcttaggccaccacctactccagctctctccaccccctattttactgcagctcagggggtaggctctaggctccaaagtacctgggtattgtcccttcatcaagaaagccccacagctctggagggctctgataatcccgttgtcagctctctgaaaagacagcatggctattaccctacagcccagtgacctgatctttgagttcgcaagcaacgggatggatgatgatatccaccagctggaagacccctctgtgttcccagctgtgatcgtggagcaggtaccctaccctgatttactgcatctgtactcgggactggagttggacgacgttcacaatggcatcataacagacgggaccttgtgcatgacgcaggatcagatcctggaaggcagttttttgctgacagatgacaatgaggccacctcgcacaccatgtcaaccgcggaagtcttactcaatatggagtctcccagcgatatcctggatgagaagcagatcttcagtacctccgaaatgcttccagactcggaccctgcaccagctgtcactctgcccaactacctgtttcctgcctctgagcccgatgccctgaacagggcgggtgacactagtgaccaggaggggcattctctggaggagaaggcctccagagaggaaagtgccaagaagactgggaaatcaaagaagagaatccggaagaccaagggcaaccgaagtacctcacctgtcactgaccccagcatccccattaggaagaaatcaaaggatggcaaaggcagcaccatctatctgtgggagttcctcctggctcttctgcaagacagaaacacctgtcccaagtacatcaagtggacccagcgagagaaaggcatcttcaaactggtggactccaaagctgtgtccaagctgtgggggaagcagaaaaacaagcctgacatgaactatgagacaatggggcgggcactaagatactactaccaaagaggcatactggccaaagtggaagggcagaggctggtgtaccagtttaaggagatgcccaaggacctggtggtcattgaagatgaggatgagagcagcgaagccacagcagccccacctcaggcctccacggcctctgtggcctctgccagtaccacccggcgaaccagctccagggtctcatccagatctgccccccagggcaagggcagctcttcttgggagaagccaaaaattcagcatgtcggtctccagccatctgcgagtctggaattgggaccgtcgctagacgaggagatccccactacctccaccatgctcgtctctccagcagagggccaggtcaagctcaccaaagctgtgagtgcatcttcagtgcccagcaacatccacctaggagtggcccccgtggggtcgggctcggccctgaccctgcagacgatcccactgaccacggtgctgaccaatgggcctcctgccagtactactgctcccactcagctcgttctccagagtgttccagcggcctctactttcaaggacaccttcactttgcaggcctctttccccctgaacgccagtttccaagacagccaggtggcagccccaggggctccactgattctcagtggcctcccccaacttctggctggggccaaccgtccgaccaacccggcgccacccacggtcacaggggctggaccagcagggcccagctctcagccccctgggactgtcattgctgccttcatcaggacttctggcactacagcagcccctagggtcaaggaggggccactgaggtcctcctcctatgttcagggtatggtgacgggggcccccatggaggggctgctggttcctgaagagaccctgagggagctcctgagagatcaggctcatcttcagccacttccaacccaggtggtttccaggggttcccacaatccgagccttctgggcaaccagactttgtctcctcccagccgccccactgttgggctgaccccagtggctgaacttgagctctcctcaggctcagggtccctgctgatggctgagcctagtgtgaccacatctgggagccttctgacaagatcccccaccccagcccctttctccccattcaaccctacttccctcattaagatggagccccatgacatataagcaaaggggtcagggcaagtgtgacccaccaggcaaaattgagcagcattttcatagggaccgacttcagtagcacacctgcccctgcatttcagtgggatgtcaatacacttgaccccaagtcccccggccctgcctggtgtcactgtggccaaacagtgcccagcttaagcatccctggcatcagactatggccttcaagagcactagggcatatgcttttggcagcataacgggctgacttggtgatggagggaaaaagccttgagccaggcagaagtttgtggccagggtttgtgcagcagctttgtgagaagagcccttctacctggctctatctcactggctgcattccctacacagggaatttactaccctatatgtgaatatccctgtatgtacttgtgtgtacttgttggtctgtatcttagtttctttggggaggacagggctgtagctgtgaggtcttgtctccaagggtgtgtgtatgtctccgtggatcagccacagggatagggattttgtttttaagggaaagcattctctaattccctttgttcatgccgagattcagttgctctgagactatggggtacaagtttgatcctccgaatctggagatgttgtagagctggaacgagtgcagagtaggaacgctttgatgcgcatgcacattggggaagatgcgctcctcagggacacaaaggccgagtggggtaaaaccacgaagggagggaagggaagtcagctctgggagcagccctcactggctggaccaaggtactcttcctggagtttgccgtgttagcaaccacagtcaccttgcagtcaggctggaatcttgggccaccccaaagtgctttgctgaaggatttagacggggatgaagtgccctccagcctcagagctagccacaaagcccccagagctgaattcattgagtatttgtgcctagggcttgggctgtttgtgtgataccggccccccgccagacaatagcctttgctgacaccccagcctacttccccgatcctgggctccctcttgattactttttgacattttccagctgtcaggcatcactgcggctagtccggcagcgacctagatggggtccacccccattcctgctcaagcatgggcacctaccacatggtttctgctgctcagcctgcctgcaactcacctcgaaggcggaccagcctgcctctgtgatgactgcagcagacctccttgggtgtaccaatgcccctcatctcccactttcacacctaaccctgactccttcaccaagaagacgggagtcggcagccaggagttcccgtggcacctctctctcttcgtggctccctgcttcccccttccctctttccgaggaagggtcaacctattctctctcaaagccaacccctaggccaattgcctggatctcctcccctctcccttctttaaacgagcttgcctccctcctgccaagtttgagggcaaggctaagaaatgtcagccacggaaacaactctattatctggtgactttgggtaatgtgaatcagtgcctgaggacctttgctgtgtccttggtacagaaccatccacttgacctaactacctcccctggccgcgctctcgctcttctcttctttgttaagccaacaactatcaccctctcctactcttcttctccctgccccctggagggcactgtgtttggttgtgcaaatgtatttactatgcgtgtttccagcagttggcattaaagtgcctttttctaataaaatcagtttattatgacagtttcctgaaaaaaaaaaaaaaaaaa

SEQ ID NO: 68 - DNA, 466 bp, Homo sapiens
accactgctggctttttgctgtagctccacattcctgtgcattgaggggttaacattaggctgggaagatgacaaaacttgaagagcatctggagggaattgtcaatatcttccaccaatactcagttcggaaggggcattttgacaccctctctaagggtgagctgaagcagctgcttacaaaggagcttgcaaacaccatcaagaatatcaaagataaagctgtcattgatgaaatattccaaggcctggatgctaatcaagatgaacaggtcgactttcaagaattcatatccctggtagccattgcgctgaaggctgcccattaccacacccacaaagagtaggtagctctctgaaggctttttacccagcaatgtcctcaatgagggtcttttctttccctcaccaaaacccagccttgcccgtggggagtaagagttaataaacacactcacgaaaagtt

SEQ ID NO: 69 - DNA, 2335 bp, Homo sapiens
acgtgacggactcagtagaccgccactggctgtgcacgttatggggtttccacctagggctcggcctgaggcttgtaacactccgttttcccccgagtcacaggggcagtcttgcccctcgcagctgggtcgcggtgtctctcaaaggtccccctctacaggggcttcgtgaggcccgggcccacagggcgctcggtcccggaagtgacgtctcccagaggggccggaagtggcagtggagggagggaagatggcggaggtggtgagtccggtgcccggggcggggcggagggagccaggggaggtgggtagagcccgaggccccccagtagccgaccctggcgtcgcgctgtctccccagggggagataatcgagggctgccgcctacccgtgctgcggcggaaccaggacaacgaagatgagtggcccctggccgagatcctgagcgtgaaggacatcagtggccggaagcttttctacgtccattacattgacttcaacaaacgtctggatgaatgggtgacgcatgagcggctggacctaaagaagatccagttccccaagaaagaggccaagacccccactaagaacggacttcctgggtcccgtcctggctctccagagagagaggtgccggcctcggcgcaggccagcgggaagaccttgccaatcccggtccagatcacactccgcttcaacctgcccaaggagcgggaggccattcccggtggcgagcctgaccagccgctctcctccagctcctgcctgcagcccaaccaccgctcaacgaaacggaaggtggaggtggtttcaccagcaactccagtgcccagcgagacagccccggcctcggtttttccccagaatggagccgcccgtagggcagtggcagcccagccaggacggaagcgaaaatcgaattgtttgggcactgatgaggactcccaggacagctctgatggaataccgtcagcaccacgcatgactggcagcctggtgtctgatcgaagccacgacgacatcgtcacccggatgaagaacattgagtgcattgagctgggccggcaccgcctcaagccgtggtacttctccccgtacccacaggaactcaccacattgcctgtcctctacctgtgcgagttctgcctcaagtacggccgtagtctcaagtgtcttcagcgtcatttgaccaagtgtgacctacgacatcctccaggcaatgagatttaccgcaagggcaccatctccttctttgagattgatggacgtaagaacaagagttattcccagaacctgtgtcttttggccaagtgtttccttgaccataagacactgtactatgacacagaccctttcctcttctacgtcatgacagagtatgactgtaagggcttccacatcgtgggctacttctccaaggagaaagaatcaacggaagactacaatgtggcctgcatcctaaccctgcctccctaccagcgccggggctacggcaagctgctgatcgagttcagctatgaactctccaaagtggaagggaaaacagggacccctgagaagcccctctcagaccttggcctcctatcctatcgaagctactggtcccagaccatcctggagatcctgatggggctgaagtcggagagcggggagaggccacagatcaccatcaatgagattagtgaaatcaccagcatcaagaaggaggatgtcatctccactctgcagtacctcaatctcatcaactactacaagggccagtacatcctcacactgtcagaggacatcgtggatggccatgagcgggccatgctcaagcggctcctgcggatcgactccaagtgtctgcacttcactcccaaggactggagcaagagggggaagtggtgaccagacactgcccactgcagtgccaagacggcagcaggactggggctgatagcccaccccgcccccactgcagctcccacaaagcactctaagggagatggggctgaggacagctcaaaaaggagaggacaggcctggcaggggcccactggtgcccagcaccaaggcgagctccgggctcagaccaactccaaggtcagctggccacaggcccaggcctcctctgaagcagggaccagagggagccaggcagctgtgtacagtgagaagggatccggatgggggagctctgtacagagggctggtgattgtaaaaatttcttttgtaaagtagaagttgggggtggggtgggtgctggctgcaaaaatttctggcttctcttacccctattgcccccggcaataaattgtttctatatgccaaaaaaaaaaaaaaaaaaaaaa

SEQ ID NO: 70 - DNA, 6362 bp, Homo sapiens
gctgccgcggcggcggcggcgcgaccgagcatcctggcggcgccgggccactgggagagtttatgtggccgaggcagacaagtggaattaggccttgctgcaggggacttcatttccttctcagtactggacccatttatgaggaggtggcttatgaaagtgtgatgttcgcgtatttcttgacaggcagtggcgtgatcttggctcactgcaacctccgactccctggttcaagcgattctcctgcctcagcctcctgagtggggattacaggccacagcaaacacaggtgtgcaggaaccgtttgtcatggaagccagggagcctgggaggcccacacccacctaccatcttgtccctaacaccagccagtcccaggtggaagaagatgtcagctcgccacctcaaaggtcctccgaaactatgcagctgaagaaggagatctccctgctgaatggggtcagcctggtggtgggcaacatgatcggctcagggatctttgtctcacccaagggtgtgctggtacacactgcctcctatgggatgtcactgattgtgtgggccattggtgggctcttctctgttgtgggtgccctttgttatgcagagctggggaccaccatcaccaagtcgggagccagctacgcttatattctagaggcctttgggggcttcattgccttcatccgcctgtgggtctcactgctagttgttgagcccaccggtcaggccatcatcgccatcacctttgccaactacatcatccagccgtccttccccagctgtgatcccccatacctggcctgccgtctcctggctgctgcttgcatatgtctgctgacatttgtgaactgtgcctatgtcaagtggggcacacgtgtgcaggacacgttcacttacgccaaggtcgtagcgctcattgccatcattgtcatgggccttgttaaactgtgccagggacactctgagcactttcaggacgcctttgagggttcctcctgggacatgggaaacctctctcttgccctctactctgccctcttctcttactcaggttgggacacccttaattttgtaacagaagaaatcaaaaacccagaaagaaatttgcccttggccattgggatttctatgccaattgtgacgctcatctacatcctgaccaatgtggcctattacacagtgctgaacatttcagatgtccttagcagtgatgctgtggctgtgacatttgctgaccagacgtttggcatgttcagctggaccatccccattgctgttgccctgtcctgctttgggggcctcaatgcatccatctttgcttcatcaaggttgttcttcgtgggctcccgggagggccacctaccggaccttctgtccatgatccacattgagcgttttacacctatccctgctttactgttcaattgcaccatggcactcatctacctcatcgtggaggatgttttccagcttatcaactacttcagcttcagctactggttcttcgtgggcctgtctgttgttggacagctctacctccgctggaaggagcccaagcggccccggcctctcaagctgagcgtgtttttccccatcgtgttctgcatatgctccgtgtttctggtgatagtgcccctcttcactgacaccattaattccctcattggcatcgggattgccctttctggagtccctttctacttcatgggtgtttacctgccagagtcccggaggccattgtttattcggaatgtcctggctgctatcaccagaggcacccagcagctttgcttttgtgtcctgactgagcttgatgtagccgaagaaaaaaaggatgagaggaaaactgactagaggtcagaggtggctttctgaggcctggaaggcaggccaaccagcaaaatcctgataacaagactctgtgggcccaactctcctgaattaaaggagccttttgacccaatcatatagtggggctcagggccagtgctcactcttattggtaagctataggagactcaggatctgggccaacctcaaggtgggggcttcagagggtggggggaagattggggaacggggggaatggtcatttagttttactcctgataggtagatgcagctcttacagatatttacttggtaaagtgcagtggggaagagggaatgctaggttgatagggctggtggcttctgaatttggtatttgaactaggagtccctatagaggggctgctttatgggaagtttttctctgaccaggtacaacacctgactttaaaggcctgaaatgctaccatttcttcctctggctcaaaattcttccctggggagagagttatattcccttatttattgatatttagtccagaacaccagttctaacgaagcatgcgtgtctcttcatctacaggatgcaataggctgattgtatttaaaaatcaaagtacccaaaactgagtccctttgggctcagaaatgtctgtggtattgggtcagactctgaccacaggttttatgctgtttagcacaatttctattgagtcttacctgcaacaatgaaccttaaagatttttttactcacgtacctgttacactttagcatacagatagatcatagatcacgttacaagcacttggctcaggtccagcaaggacagatgaacaaattcctgagtcagaagtctgttaatattgctgttttgaaggacaatcctttattttacttgagaccttacatctttgttctagctgacagtaaatctctgggtttctgttacgaactctaagagggctgaaacttctgatattcaggtggatcacctgaattctctcagctgtcaatggcttggagaacatctcatgggcccaagtcatcaaataacctgttcctctctgtaagggcagtgtgagggactgctgtgcagacccaagcaatcccaacctggtgctaggtcatttcacttttctgaaaacctcacatcaggctgcatcctcttctgtccctggcaccaggctttgtttacacttggagccaccttggtgtgggtcaccgggacagtgtactcctctcctgccagcctccccttccccgaggtgtggtggctgcagtctcaggaagagcttggtacttgtggggacttctgttttctccctgtggagatcagtgaagactgggaggaaagctgcttcaacctgagtccggctcttcagcaggctgcacaagtggaagcaactaattctggtgctcaggctgggctctccacccaagttaggcctgctctggcctaatggatcttactgtatgagcaggacggctgcattggattgtacaactgttttgtgatgcccccagacactgtcatcctgggccgagaagaacctgctagcttgacataccccatgggcttatccttaggttttggaattggtcaacagtgaggcagtctcccttcctgaccattcttctccacccagtcacagataagggaataaccttggccatatatttgctcaataaagattgaaggaagcatggtcatagttgccctgggttcagagcataatgcatatgtgaagcatggggtgacattcctactgtcatgggtttgggatttgtaacggcaaattcctgcccgacgacagggtgtcttatgcaaaggctgacttgcctgaacgctaagaacatgacttctgtctgagctaagctggcacccatcccagggctcctctggagctaatcctttaagcaaaatgtgcttgccttttaaagatccctgaccccagctttagctttctccaccagataaccagctaatcccaggaatttgctgccccccaccagtggcttctagggaaagcaaggacctcacatgccaggtgccctagtacttgcttagtgagccatgtcatcctcctttcatttttggatggtgacagcatttttcccctctgtgctggatacagacttctcccaggatcctctctttgggagcgaagccagaggatccctacagcactcaagcttcatggtggaattaatttctgccagctctttgttgtctgtctccttaaatccttttcctggtgtgcttattatcccttttgcagtgagtacagtttattaagttgtcagccctttaatattggggaaacttaatgagtataaatagcagggagcacattgtaacagcacagtgttttgtttttttcacccggttgctgtatgagaatggctttcaatcctttgtttctatgcctacagacagaaagcaagatgtctaatattagacatacaagttgctgcctgttataacggtgaattatacctttgtgcatgcctaggatgtttgttgttttaattagctgcaatatatacggcctgtgtacacagaatttaatcacttcggcaggttgaacaactccatgtagataagagcaagtgtaggcaaaggtttagaaaatggacataaagtcaaagaatgatggcaggtaggatgaaggagagatacttaggaaatcctaaaagaggcggcaagaaggtacctccctgtgtaactcaccttcccccatgacagtgagtaagagacactcacaggctatgagggtacacccctagctgaatgttctgtgttgtttccttagacctgtggtgtccgctgcaacagctactagccacgtgtagctaattacattaaaatgaaataaaattaaaagctcagtttctcagttgcgctaatcacatttcaagtgctcagcagccacccgtgtctactactacacagtgcagacacagaacatatcatcactgcagatagttctactggacaatgttacgctagaataaacaccaaggcagtcagttaaggcagctatggtttggaaaggcatacggacagagtctgcttagaagagatacaagttgttaataaaattgatcctgttgatagtagtttgtttttgtggtgggtgctgtgaagagtaaacattactcagtggaaagctaagttcagaaggtactttgtttttcctcccttgccttaagtccttggtatttataatcaatgctgaaccttctatttcactaccgctccctgttttagatattcagatttaaaaggttttcaaagaattactttcttccatgttcaaagctagattttactaaacacatgtatcacattcatatatattgtttcttggccccactgccaaaggaagtcagtcagtaatttcacaaccgttatcagagtttggaagcagaaatagctgttaactaaaatctcccactgctcagactactttctgccctaatggccattactatccagtctgtattgctacaagggacccactggtaccccttttagattctatcaaaaggaacagggttttcctagaggcaggcagcctggtggtatggcacagcagaagcttactgctaatgaaatgggaacctccccctcccttgtggtttcagcacagaacctgaatgccaggaaaaattcctgggccaagaagctaaagctaaagaaaccttccttttttcaacgtttttttttctttcaaactgtagggtcacttttgattgaggcaaaggggtcctactgtaagtggaaaagactcactcccctaacataagttttcactgtggtgggatggtgccgcccgatatgcttgatatgcttttccttccacatgttaagctaggaaacctaacaggatgtcagcagggcagttaactctggactcagagccctcaagggcatgtggcagaacctcatggacatcacaagaccatcagtctgaatccaggtcgtgggggctgtcatagccgaactccttctgcacatccagagggtacttgctccacatccgctgtctgctgctgcctctttcctcctcactcaggctgttgtagtcagcagagcctagaatgacatcccgggagtggattctaaatgtgattttcctaggctactgcaggagccccttctcttctcagaaaggtctgtttttgttcccgattgtaatgcaaaatccttgctcaataaataaaaaagaatatagaattcttttttttttaaagaaggaatcactttcctatcatctaaaccaagttccttcacactggagtattttgtcacttctcccctccgtggagtattttgtcacttctcccctccgtataggattttttgttgttgtaagagttgtagtcatattgtaaatatttttgtacctttctccttttaacgtgttattgacaaacctccccaaaagaatatgcaattgtttgattcatttctctgttatcagacaccaataaattctttttgttgggcaaaaaaaaaaaaaa

SEQ ID NO: 71 - DNA, 2753 bp, Homo sapiens
gagcgcagagcggtttggtcgttcgttgggcggtgctggtttttcgctcgtcgactgcggctcttcctcgggcagcggaagcggcgcggcggtcggagaagtggcctaaaacttcggcgttgggtgaaagaaaatggcccgaaccaagcagactgctcgtaagtccaccggtgggaaagccccccgcaaacagctggccacgaaagccgccaggaaaagcgctccctctaccggcggggtgaagaagcctcatcgctacaggcccgggaccgtggcgcttcgagagattcgtcgttatcagaagtcgaccgagctgctcatccggaagctgcccttccagaggttggtgagggagatcgcgcaggatttcaaaaccgacctgaggtttcagagcgcagccatcggtgcgctgcaggaggctagcgaagcgtacctggtgggtctgttcgaagataccaacctgtgtgccatccacgctaagagagtcaccatcatgcccaaagacatccagttggctcgccggatacggggagagagagcttaagtgaaggcagtttttatggcgttttgtagtaaattctgtaaaatactttggtttaatttgtgactttttttgtaagaaattgtttataatatgttgcatttgtacttaagtcattccatctttcactcaggatgaatgcgaaaagtgactgttcacagacctcagtgatgtgagcactgttgctcaggagtgacaagttgctaatatgcagaagggatgggtgatacttcttgcttctcatgatgcatgtttctgtatgttaatgacttgttgggtagctattaaggtactagagttgataaatgtgtacagggtccttttgcaataaaactggttatgacttgatccaagtgtttaacaattggggctgttaagtctgaccatacatcactgtgatagaatgtgggctttttcaagggtgaagatacaagtcttaaccacagtgtaacttacagtttcctttaaaaaaaaaaaaagtaaacctggcagctatagaatacactatgtgcatttataatagctattttatatattgtagtatcaacatttttaaattaaatgttttacattcacaagtggtggggagtcttgtcattaaggtgtgtgtaatttagagtccagttggttttcttctgactgcacttgttctcatagtagtaaaatgctatgcgcatttataccttgcataagtcctcattctaccacatgttaaccctctagctgataatgcaaacactaactgggggattttatttataagggctctagaaaaaacgagttattcacaccagcatcatcttaactaacattctgaactagttagtgcagcttttcattgtgttgtgtggttggtctcataactaggttgagtttttctcctctgctgaggaaacagtaccgaagttctttttcttgtggcatttgtattataaaaacttggtgtgggggaggagcacaaaactccagcccactgaacctctgccaattaagatggtgttgggttaggttacatctggttactgtcctgggaaaatcatttttatagagatggccttccaagtggttttaaaatttactgaagtttttaggtcaattatgtatgttgactaaatttacaaataaacttgtttatccaactaagtgtccaaaacctaaattgaatgtactaagttttcacatgtcccattatctaggtccttgtatactaatgttttgaacttagatcatttcaggtgttgtttggtggataaaggaaccttttatttataaagatactgtagaaagcatgtgaacagctctctgcttgattaagatgccataatagtgctgtatttgcagtgtgggctaagacaaagtatattaataagcttttcagcccccccactcccgttccgtagtgtagaagcccacaggtgtagaactcagtcttaaacttcagtatgaaaccagtttccttgtgcgatgatggccactaaagcatagtacgtggatgtcagtgagacagcatgagagccagcagtcatcaaagcgttccacgtttgaagttagcaactgcttaaagttatgccctattaaaattgctttctcaaaagtttgggttagtttcaaatgtgatattttggagggaaggtaaagtaggtatctttcaggtcgtgataatgagctcctatgaaaggatgcaatataatgacccgcttttctagaaagttcataatcagctctggaacaagcacacttgattcctcactgtgcttcagaatgagattaagatcagatgttggaacgtgctatgctgtagcgtgtctggaaacaaagtacacaaacctggctacggtgatgagttagcttctgcttactacctgtgacaacccaagtgggtgacactagtgaaccttctccagtctgcaggctggcatagaaggctcttagattatattgggcagcttgcaatctgccgaagcagtgacttgcatttccacacttggcttgagcactcaacccagaaggcgaagatagcttttggttgtaggcggcttcctgtatgggatatccctcggtaagggtaaaggagcagaggcaaaggagaaaagcagaagttgcagctgatgcaggtatcctatgcccttgatggatgagactaaaataaaatttttgaagttaaaaaaaaaaaaaaaaaaaaaaaaaaaaaaaaaaaaaaaaaaaaaaaaaa

SEQ ID NO: 72 - DNA, 357 bp, Homo sapiens
atgtctggtcgcggcaaaggcggtaaaggtttgggtaagggaggtgccaagcgtcaccgaaaagtgctgcgggataacatccaaggcatcaccaaaccggccattcggcgccttgctaggcgtggtggggttaagcgaatttccggtttgatttatgaggagactcgtggcgttctcaaggtgtttctggagaacgtgatccgggacgccgtgacctacacggagcacgccaagcgcaagactgtcactgccatggatgtggtttacgcgctcaagcgtcaaggacgcactctgtacggcttcggcggttaatcttttcgtcagttttcttccaatggcccttttcagggccgccca

SEQ ID NO: 73 - DNA, 4456 bp, Homo sapiens
ggcggaagcggaagtgcgatcttcgggctgtcagagttggtctgttactcggtggtggcggagtctacggaagccgttttcgcttcacttttcctggctgtagagcgctttccccctggcgggtgagagtgcagagacgaaggtgcgagatgagcactatgttcgcggacactctcctcatcgtttttatctctgtgtgcacggctctgctcgcagagggcataacctgggtcctggtttacaggacagacaagtacaagagactgaaggcagaagtggaaaaacagagtaaaaaattggaaaagaagaaggaaacaataacagagtcagctggtcgacaacagaaaaagaaaatagagagacaagaagagaaactgaagaataacaacagagatctatcaatggttcgaatgaaatccatgtttgctattggcttttgttttactgccctaatgggaatgttcaattccatatttgatggtagagtggtggcaaagcttccttttacccctctttcttacatccaaggactgtctcatcgaaatctgctgggagatgacaccacagactgttccttcattttcctgtatattctctgtactatgtcgattcgacagaacattcagaagattctcggccttgccccttcacgagccgccaccaagcaggcaggtggatttcttggcccaccacctccttctgggaagttctcttgaactcaagaactctttattttctatcattctttctagacacacacacatcagactggcaactgttttgtagcaagagccataggtagccttactacttgggcctctttctagttttgaattatttctaagccttttgggtatgattagagtgaaaatggcagccagcaaacttgatagtgcttttggtcctagatgatttttatcaaataagtggattgattagttaagttcaggtaatgtttatgtaatgaaaaacaaatagcatccttcttgtttcatttacataagtattttctgtgggaccgactctcaaggcactgtgtatgccctgcaagttggctgtctatgagcatttagagatttagaagaaaaatttagtttgtttaacccttgtaactgtttgttttgttgttgtttttttttcaagccaaatacatgacataagatcaataaagaggccaaatttttagctgttttatgtacaaggagagatctgtttcattttgttttgccgtatttctagatataagttttagcatgggccaggaaggactaaaataaaagtttttaaggtactgtactttttgccatacttgactcatatactcaaaatacagagttgtcttggtgtaggaattggaaagcaagagtggaaaggaacgtaataactcgttggagtttaaaaatgagggtcttggcaagtaacactgatgtctgaaaaaaaattaaatataaataaataaataaaaatgagggtcctcagctgttctcttcatatcctattacagtctctcagattcttgtgggggcactcttagatctcccttggagacaaggttatagttatatgttgttaatctcgcagagcttccttttagtcacaatagccttcattttctgccatgccccttcataagggagaaggatgtttgtaccatgatcctccccgcataatctatggaattaggagtcctgtgtggagtcttatcaataaatatgcacattcatcaaatgtctacttaaatgtgagtattctaccagtgagaaaaaacacataattttcaaggtaatcattgttaaaccaacagcaaacttctttcttatcagcaccataaagtccagaagacagtagaaaagtatcttcaaagtgctgaggaaaataagtatcaacttagaattttatgtacaatattggaggcaaaataaagacatgtttagacatacaaaactaagagagttgaattattaaaggttatattccaaggacaaaaaagaggatctgcccaaggtgaaggtatggcatacaagaaacaatggtcaacagagaaataaaatatatggatgaatatatggataaatttgagtgttttatggattatctaatttaaggattatcccaagacagccctacaaggtaattactgttcttaccttcatttaacagatgaggaaactggggcaggggaggttagtaacttgctctgcatcacagagctattgagtggcagtcaggatttgaattcaaccagtgtaaagcctaatagtccaggctgtcaagctctatattacagcctcctcatgggtatgtggtgattctcttctcatcccatctcctcaactagagtgtgtgagctctctaaagttggactttgtctttttttttgttctccttattacaaagtagtcaacgtgggtggaaacacagcaggagctcaataaaagcagatgaaagggaacagaagtccctattctgagactagttttatcagaaggatgtctgataatggatggtaatgacttttaatggtcttttctccatatcattgaccactctaagcaaaataataattcgaatgataatgaagaaaatgatgcccatgataacaataatgacaaatatgaaatggctaaaataaaacatgaaaccatcctcaaaattctgccatcacctttttaaagtgagaatatatagcacactctatcactcataccctgaggctttgaagttggtgctttctaatcagacttcttatggaccaggttttcatatacaaattatgtttccatggtaaggaataaataagagggagaagttaaaaaggagagattacatctattcaccctattcattaaaatttttttaaatttttttccaaatatgttctgcttatgtatattcactctattcttaaaagcacaataacaaagatatattacagaggaaataaaactatcacaagaattaaattcaaggagttattaagggctactgcagcctcacaattagttttttaaaatttcttgtcctgaagaaatttcaagactagttatttggatgacactctaggtccacagcatcaccagatcattggagatgacatttcaagacaggcctctgaacatctctcataacacataatttggttattttccctatgtaagatggattgtctcctgtctagggaagaaaaacagccattactaatatctgcattagtctactcaggttgcaatcataatatgctaaagtagtaaacttttaaaaatgacagtaaacctgagtttattaacaggttacattctaaaagctaagctagtttggaaattggaaagcaaatgtgtgtagatattcatatgtccttgaccagactgggcctttctcttcccaggtaagtcattctctccaatggggccagttacttaaaattacatcagacaattgatagagcttctagatcccccttctaaaacaaaagcattttgccacaaactaggatggagtaggtttttttcagactatttatacttattttatgtatttcaatactgccctttaagtaaaagtactatatactttctctttttttagattaattctgcttaagtcagtcttttaatttattctagtttgagtttttaaaaaattttagaatgaaaaatctcaaaaatatactattatgtatatacactattttatatatatatatatatatatatagagagagagagagagagagagagagagagagagagagaaagagagaataaagaacacctaggtaacccatcctccaccttcgacaattatcagctcctagctaatttgtgtcatctgtaaccccacctgcttctgccctttctgtattattttgaagcaaatcttatcatttatctgtaaatatttcaggactttaaaaaatatgtgtaatctgaataccatttttacacctaagaaaatggacaattccttaatataatgtgttgtctatagatgtcaaaaatttttgcagttttttggaatcaggaaccaagtaaggtactgaatattgcagttagctgatacacatcctaaatttcttcaattgttgtggtcctcaaactagagtgtatcagaatcactagagccttgttagaacacaaactgctgggccccaccccagagctggtgatctgtaagtctgctgtggagtctgggaatttgcatctctaacaaattcccaggtgatgctgaagctgcaggtttggggttcactcacctattggttcatcagcatctctctgccctcttacaatatatttgttgaagaagttgtgttgtttaccttgtagagtttttcttagtttggattttggtgatagcatgctggttttttcatactattggttgtctctgtaatgcgagcagcttttgatctattaattaatgagatattaaaagtgatggtattctaaaaaaaaaa

SEQ ID NO: 74 - DNA, 4446 bp, Homo sapiens
cgcaccgccgccgaggacgcgcgcccgagcctagtccccacgccgcggcgcgcccgggctccctgctgatcccagaacaatcaaccatgacgaccgaatctggatcagactcggaatccaagccggaccaggaggccgagccccaggaggcggcgggggcgcaggggcgcgcgggggcgcccgtgccggagccgcccaaggaggagcagcagcaggccctggagcagttcgccgccgctgcagcgcacagcaccccggtgcggagggaggtcactgacaaggaacaggagtttgctgccagggctgcaaaacagctcgaatatcagcaattagaagacgataaactttctcagaaatcatctagcagtaaactctctcggtctccattaaagattgtcaaaaagcctaaaagcatgcagtgcaaagtgatacttctcgatggatcagaatatacctgtgatgtagagaaacgctccagaggacaagtgctgtttgataaagtgtgtgaacacttgaacttgctagagaaagactactttgggcttacgtatcgagatgctgaaaaccagaagaattggttggaccctgctaaggaaataaaaaaacaggttcgaagtggtgcttggcacttttcatttaatgtgaaattttatccaccagaccctgcccaactatctgaagatatcaccaggtactacctctgcttgcagttgcgagatgacatcgtgtccggaaggctgccctgctcctttgttaccctggccttgctgggctcctacactgtccagtcagagctcggagactatgacccagatgaatgtgggagcgattacattagtgagttccgctttgcaccaaaccacactaaagaactggaagacaaagtgatcgagctgcacaagagccacagaggaatgacgccagcagaagcagagatgcatttcttggaaaatgccaaaaaattatcaatgtatggggtagatttacatcatgctaaggactcagaaggggtagaaattatgttaggagtttgtgcaagtggtctgttgatatatcgcgaccggctgcgaataaacagatttgcctggcccaaggttctaaagatttcatacaaacggaacaacttttacattaagatccggccgggagagtttgaacaatttgaaagcaccattgggtttaagctgccaaaccatcgagctgccaagcgtttatggaaagtatgtgttgagcatcatacatttttcagactactgttaccagaagcacctcccaagaaattcctaaccttgggttccaagtttcgttatagtggcaggacacaagcgcaaacgagaagagccagtgcgttgatagatcgcccagcaccttactttgaacgctcatccagcaaacgttataccatgtctcgcagcttggatggagaggttggtactggccagtacgccacaacaaaaggcatctctcagaccaacttgatcaccactgtgactccggagaagaaggctgaggaggagcgggacgaggaagaggacaaacggaggaagggggaagaagtcacgcccatctcggccatccggcacgagggaaagtcacctgggcttggcactgactcatgtcccttgtcacccccatccacccattgtgcccccacatctcccacagagctccgtaggaggtgtaaggagaatgactgcaaactgccaggttatgagccgtccagagctgagcacctgcctggagagcccgccttggactctgatggcccagggaggccttacctaggggatcaagatgtggcttttagctacagacagcaaactggcaaggggaccaccctgttctccttctccttgcagctccctgagtcattcccctccctcctagatgatgatggatacctctctttccccaacctttctgaaaccaacctcctgccccagagcttgcagcattacctcccgatccgctcaccgtcccttgtgccctgtttcctcttcatctttttctttctgctgtctgcctccttctcagtgccatacgctctcactctctccttccctctggctctgtgcctctgctacctggagcccaaggcggcctccttgagcgcctccctagacaatgacccgagtgacagttcagaggaagagactgacagtgagcgcacggacaccgcagccgacggggagaccaccgccactgagtcggaccaggaggaagatgcagagctcaaggcacaggagctagaaaaaactcaagatgacctgatgaaacatcaaaccaacattagcgagctgaaaagaaccttcttagaaacctcaacagacactgccgtaacgaatgaatgggagaagaggctttccacctcccccgtgcgactggccgccaggcaggaggatgcccccatgatcgaaccacttgtccctgaagagactaagcagtcttctggggaaaagctcatggatggctctgaaatcttcagtttattagagtctgcgcgaaaaccaacagaattcataggaggggttacttctacttctcaaagctgggttcagaaaatggaaaccaagacggagtccagtggaatagagacggaacccaccgtgcaccacctgccgcttagcactgagaaggtggtgcaggagaccgtgttggtggaggagcggcgtgtggtgcacgcgagtggggatgcttcttactcggcgggagacagcggggatgctgcagcacagcccgcattcacaggcattaaagggaaagagggctctgccttgacggagggggctaaagaggaaggaggggaggaggtcgctaaagctgtcctggaacaggaagagacagccgctgcttcccgtgagcgacaagaggagcagagtgcagccatccacatttcagaaactttggaacaaaaacctcattttgagtcctcaacggtgaagacggaaaccatcagttttggcagtgtttcaccgggaggagtaaagctagaaatttccacgaaggaagtgccagtagttcacaccgaaaccaaaaccatcacatatgaatcatcacaggtcgatccaggcacagatctggagccaggcgtgctgatgagtgcacagacgatcacatctgaaaccaccagtaccaccaccactacgcacatcaccaaaactgtgaaagggggcatttcagagacaagaattgagaagcgaatagtcatcacgggggatgcagacattgaccatgaccaggcgctggctcaggcaattaaagaggccaaagagcagcaccctgacatgtcagtgaccaaagtagtggtccataaagagacagagatcacaccagaagatggagaggattgaccagaggaataacttagcttgcacatgaatgcagtcatgcaaaccgttaggaaaaccagagcctatatggagttccctcttctaacccaactgacttgtatctgtccgtggaaaatttcagtccagaagaattgaccttgaccattaataaagacactggcagagagatcttcccataataaagcaatctgattcagcatcactaaaccgataatgcatgaagcaacgataaaattacaaaagagcagcatttttaattttcacaaaatgtctcagttttcagctatacctgcacgttcataaccaacaatataaaccgtggtctcatgtaacacataaacaattcatgcctttcatagtttattattattaaagtctaaacaaaattgcaatttcttaggtaaccttatatttacaataaatgaagattaccctcaaatgctagaagctgtctaggtccgtccggtgtgtcagattttcctcagattagatgtgccaataaccaagtttattcagtaaacaacttgtacttgtttcatctggttttattactctcacccataaacagtaatgactctctgaccctctggaaatatgtaatgcttccaatcttgctttgtgtatctcatttaatttgttataaggtagtactgattttagcatattaatgcgatttcttccttgttgtttgctttggtctgtgttcaatccagagagcttaaattgtcattattttgggaagaaaacctgtatttttgttagtttacaatattatgaaatttcacttcaggagaaactgctgggcttcctgtggctttgttttcttagttactttttccgtgccgtgtattttttaattgatttttcttcttttacttgaaaagaaagtgttttattttcaaatctggtccatatttacattctagttcagagccaagccttaaactgtacagaatttccactgtaattaaaactatttagtgttagttataaatagccttcaaaaagagagattctccattacacgatcacctgcatcacagcccatggtgaatgtatgtttctgcatagcgaaataaaaatggcaaatgcactg

SEQ ID NO: 75 - DNA, 3981 bp, Homo sapiens
aaagtgagtgagtgagacgggcagatggaggagggattgtaatggcggcagccggcagctccctgctctgacccacggcaggcacacagcaacgaccccttccccgcccctctcccggccggcctccgccccgcagccagcgcggggccaccctctccggcccttcccccagctgtcggcgtctcgccctgcgccccggccggggccccacacacaatggacgagcttgccggaggcggtggtggcggcccggggatggcggcccctccccggcagcagcagggacctggggggaacctgggcctttcgcccggggggaacggagcggcgggcggcgggggtcctccggcctccgagggagcgggtcccgcggcaggccccgagctgtcccggccgcagcagtacactatcccggggatactgcactacatccagcacgagtgggctcggttcgagatggagcgggcgcactgggaggtggaacgggccgaactgcaggcccggattgcatttctacaaggcgaaagaaaaggtcaagagaacctgaagaaggacttagtaagaagaataaagatgttagagtatgcattaaaacaagaaagggcaaaatatcacaaattaaaatatggcacggaactgaaccaaggtgacttgaaaatgccaacctttgagtcagaagaaaccaaagacacagaggctcccacagcacctcagaatagccagttaacgtggaagcaaggcagacagcttttaagacagtatcttcaggaagtaggttatacagatacaatattagatgtacggtctcagcgggtaaggtcattacttggactatctaattcagaaccaaatggatcagtagaaacaaagaatttagaacagatcctgaatggaggtgaatctcctaagcaaaagggacaagaaataaaaaggtcctctggtgatgttcttgagacgttcaatttcttagaaaatgccgatgacagtgatgaagatgaggaaaatgacatgatcgaaggcatcccagaaggaaaagacaaacatcggatgaataaacataaaataggtaatgaaggtttagctgctgacctaactgacgatcctgatactgaggaagcactgaaagaatttgattttttagtgactgctgaagatggtgaaggagctggagaagcacggagttcgggggatggcacagaatgggctgaaccaataacgtttccatctggaggaggcaagtcatttattatgggttctgatgatgttttgttaagtgtactgggccttggagaccttgcagacttgacggtaacaaatgatgcagactatagttatgatttgcctgctaataaagatgcctttcgaaagacatggaatcccaagtatacactacgtagccattttgatggagtacgggcattagcttttcatcctgtagaacctgtgctggttactgcttctgaggaccataccctgaaactttggaacctgcaaaaaacagttcctgccaaaaagagtgcctctttagatgtagagcctatctacacatttagggcccacatcggccctgttctgtcattagctattagttctaatggagaacagtgttttagtggtggtattgatgcaaccatccagtggtggaatatgccgagtcccagtgtagatccatatgatacatatgagccaaatgttctagctggcactttagttggtcatacagatgcagtttggggtcttgcttatagtggcataaaaaatcaattactgtcttgttcagcagatggcactgttaggttatggaatccacaagaaaaattgccatgtatttgcacttacaatggagataaaaagcatggaatacctacatcagttgactttataggctgtgatccagctcatatggtaacctctttcaacactggtagtgcagtaatttatgatttagaaacatcacagtcattggtgatactttcatcacaggtagattctggtttacaatctaataatcatatcaacagagtagtaagtcatcccacacttcctgttacaataactgctcatgaagatagacacatcaaattttttgacaataaaacgggtaaaatgatccattctatggtagctcacttggatgctgttacaagtctagcagtagatcctaatggaatctatttgatgtctggaagccatgactgttccatcagattatggaatttagacagcaagacatgtgtgcaagaaataacagctcacagaaagaaattggatgaatcaatttatgatgttgctttccactcgtcaaaagcatatatagctagtgcaggagctgatgctcttgccaaagtatttgtatgaatcaacaaaaacttgcatcgtaacaagatttgcttggacagaaagagggtctgcatcactgccatcagaaaggttactgatatgacactacatgtgatctgcctggtgaaggctatctggggcaggcacaaattggtggaaatcacatcttaatgtcaagctcattaagttaactgtaattactgtattttgtgggacaaagaaaaaaggactccagtatttgtggcctgtactggatgtgaactgagcgtatatctgtttttaggtgtctttaagccaatgtggagtctgatctttcaaaaaagtttttttttttctcttcttcttcttcttttttttttttttttttttttttttggactctgtgtgctgccttaggggttaggaatgtggtgctcttgttgggggaagtgagctccaagagtagctttttttcatctcttagtgatcttctgtttatcggttgaatgccacagattcccttttaaacttattttgctttaaaaaaaaaaaaaaagaaaaagaaaatttaacttaaaatattttagcattagttgcacaaaatgtttggataaaattctagtttttataagtctttttatatatttagcctgtcacaacagtgctcaagattgtattgaagtttttctgcattatacaaccctaaaacacagagatctcactgacccgttgccctgtaaccactttctttccttcttttgcctaatacagctcagctaagtccttccataaagatgctaaataactttcatcatcacataaatgtcttcataaaccaaggactattaagtgtattaaaatgaaacagtggggtttagtactccaaatgaactcttaaagaaaaaaactaatcttggcatcctatcactatgtgatattttgtacatcttactgtatttacaagtttatttatcaaggattatccatcttgctaatggcctattatttatttcactttttgttggtctttatatccttttattaatgtgctaaaggaacctgtatatctattttggaactctttgaatagtctaaaatagactaaaaatggagtattttatagtttaaattacaaaccaaggtggttccccctaagatatatatcttggtttaccatgattccaaacaaaactaacttgtttaaaaatatttggagtaaagttttatttgcattacaaataggatacaaaaatagttgaatcaggatacagaaatctgctgtgttttgactagttatccctgttttatttttttagatgtgcttaattttatggtgtaactaaagattttgtttgtgtaatgcatgattaagacaataaagtattttttctagtcttccgagaaacttttctgatcagtttgcgagttttgatgagttttgtaaggtttttgttttacaaactatgaatcagcaaatttttaagattgtaccacatagcaaacatacagctgttgaaaaataatgtatataaaatgcatataataaatattaaattgtgtacctgtatgttactgttggctacatcattttgtgttgaataataaagtgcaatactttattctccataattaaactaggaaatggagatttaaaaaaaaaaa

SEQ ID NO: 76 - DNA, 7049 bp, Homo sapiens
gacgtcatcacgcagggccgagtcggcgcggccacatcctttaaatatggtcttttttgggcgcgcgcgacaatgtgaggagtggggtggagcgtgtgtggtgtgtggctgcggcctgggcaagagccgccgcggaccatgagctgagtaagttctggagggatcctgcctcttggagccttcgcagccaggcagctgtgaactgtgagctagagtgaagcagaaatctaggaagatgagctccaagatggtcataagtgaaccaggactgaattgggatatttcccccaaaaatggccttaagacatttttctctcgagaaaattataaagatcattccatggctccaagtttaaaagaactacgtgttttatccaacagagagagcagaggagttatgtggacttgttggttaaatacgcaaagattcctgcaaattccaaagctgttggaataaataaaaatgactacttgcagtacttggatatgaaaaaacatgtgaacgaagaagttactgagttcctaaagtttttgcagaattctgcaaagaaatgtgcgcaggattataatatgctttctgatgatgcccgtctcttcacagagaaaattttaagagcttgcattgaacaagtgaaaaagtattcagaattctatactctccacgaggtcaccagcttaatgggattcttcccattcagagtagagatgggattaaagttagaaaaaactcttctcgcattgggcagtgtaaaatatgtgaaaacagtatttccctcaatgcctataaagttgcagctgtcaaaggacgatatagctaccattgaaacgtcagaacaaacagctgaagctatgcattatgatattagtaaagatccaaatgcagagaagcttgtttccagatatcaccctcagatagctctaactagtcagtcattatttaccttattaaataatcatggaccaacgtacaaggaacagtgggaaattccagtgtgtattcaagtaatacctgttgcaggttcaaaaccagttaaagtaatatatattaattcaccacttccccaaaagaaaatgactatgagagagagaaatcaaatctttcatgaagttccattaaaatttatgatgtccaaaaacacatctgttccagtctctgcagtctttatggacaaacctgaagagtttatatctgaaatggacatgtcctgtgaagtcaacgagtgccgaaaaattgagagtcttgaaaacttgtatttggattttgatgatgatgtcacagaacttgaaacttttggagtaaccaccaccaaagtatcaaaatcaccaagtccagcaagtacttccacagtacctaacatgacagatgctcctacagcccccaaagcaggaactacaactgtggcaccaagtgcaccagacatttctgctaattctagaagtttatctcagattctgatggaacaattgcaaaaggagaaacagctggtcactggtatggatggtggccctgaggaatgcaaaaataaagatgatcagggatttgaatcatgtgaaaaggtatcaaattctgacaagcctttgatacaagatagtgacttgaaaacatctgatgccttacagttagaaaattctcaggaaattgaaacttctaataaaaatgatatgactatagatatattacatgctgatggtgaaagacctaatgttctagaaaacctagacaactcaaaggaaaagactgttggatcagaagcagcaaaaactgaagatacagttctctgcagcagtgatacagatgaggagtgtttaatcattgatacagaatgtaaaaataatagtgatggaaagacagctgttgtgggttctaacttaagttccagaccagctagtccaaattcttcctcaggacaggcttctgtaggaaaccagactaatactgcttgtagtcctgaagagtcatgtgttttaaaaaaacctatcaaacgagtatataaaaaatttgatccagttggagagattttaaaaatgcaggatgagctcttaaagccaatttccagaaaagtaccagaattgcccttaatgaatttagaaaattctaaacagccttctgtttctgagcaattgtctggtccttcagactcctctagttggccgaaatctggatggccttctgcatttcagaagccaaaaggacgattgccatatgaacttcaggactatgttgaagatacatcggaatacctagctcctcaggaaggaaattttgtttataagttatttagcctgcaagacctgttgttactcgtacgctgcagtgtccagaggatagagacaagaccacgttctaaaaaacggaagaaaatcagaagacaatttccagtttatgtactaccaaaagtagagtatcaagcttgttatggagttgaagctctgactgaaagtgaactttgtcgcttatggactgaaagtttattgcattccaacagctcattttatgttgggcatatcgatgcatttacttcaaaactttttctactggaagaaattacctcagaagaattaaaagaaaagctttcagcactcaagatttccaatttatttaacatcctccaacacattctaaagaaactaagtagcttgcaggagggttcctacttgttatctcatgcagcagaagattcttcactcctgatttataaggcctctgatggaaaagttactaggacagcatacaatttgtataaaacacattgcggccttcctggtgtaccttccagtctctcagttccctgggtcccattagatcccagcctgttattaccatatcatatccatcatggaagaataccttgtacttttccaccgaaatcactggataccacaacacaacaaaagattggtggaacgagaatgcctacacgcagccacaggaatccagtttccatggaaaccaaaagcagttgcttgcctgctcagcaagttgaaactgaaggagtggctccacataaaagaaaaataacttgaggactgtaccatggaaaactaaatttaaaaaaacagttataacagtgtttaatttagataagtttgagggaaaataatcagtaggcaagaggaacatttttcctgtagtagctagagtgccttgaaaaaatgtgttggctatgtgaaggaatatttcaactaaaatggaatggtatgcttttcacccttgaagtttgaggaggatcttgatatgttttaacattatcatggcagggaaatatataaagaagaaaaatatttttacattaaaccttttctaaaaattgtaaatagaaaaataatttggttttttatcaagaacaacacttatcgttatgtattgtgttagttatattgccagtctgttgcgactgactcaaaaagttaaatgttgccactgctgaagatgattatgagcatcgcaaactttgtttctgacccattttgacagtttttatatactcctttaaaatgatgaatgttacaggttaataaagttaatacctttaaaaacttggtgaaattccattacagaagccaaaaataaaaactccctgcctctgaaaagtcagattactgacttcttgtttggcaaccatcagtttgtttaataaaagaaaaaatttggtggtataacatgtttgatgacagatgcctctatctctagattcaagctgagtgttgaaatacactgctgaaagcaaagagataggtatgttttccagaaaaaaagtcagtgtcattgctccagatgacaaggttaatgtggtaaagcataagcttttttttttttttgagatggagtctcgctctgttgcccaggctggagtgcagtggcatgatctcagctcaccacaacatccacctcctggattaaagcgattctcctgcctcatcctcccgagtagctgggactacaggcacctaccaccaggcttggctaatttttttttgtatttttagtagagacagggtgttaccatgttggccgggctggtctcaaactcctgaccttgtgatccgcctgccttggcctcccaaagtgctgggattacaggggtaagccaccgtgcctggccagcataagctatttttatcctcatctatactgattgatttaaattttccgggcctgcagatgaatttggaaaagggcataatcaactgatgttgctgtagcaaatttggacttaagaaactacagacagggccgggcgtggtggctcacacctgtaattccagcacttcgcaaggccgaggcgggagaatcacttgagtccaggggttggagaccagtctgggcaacacagacctcatctctacaaataaaaaagttagccgggtgtggtggggtgtgcctgtagtcccagctactcaaaaggctgaggcagaagaattgcttgagcccaagaagtcaaggctacagtgagttgtgatcgcaccacagaactcagcttgagtatcagagtgtgaccctgtctcaaagaaaaaaaaaaacaggacaggcttgtttaatctttagaacccttacactaaaattttcagaaattatgtatgtcatttgtaaaatataagttttgtaatcctagataattgcttcacattgaaattttttagctattctgtgtaaagaatagctattcttttggcctaatttctgagaaattagaccgaaaaatctcctcaagtattgtaacagttgaaaatacttatattcaactaccaagttttgtttcattttgattttttgttataaaacatttttaagttatttgagaagtaattattagtaaaattgtatcttgataaatcatttcctcatcctgccattcccttttataaaacactgagtttttttattccttaagtcacatatcccagaaatgttttggttgtgaatcatttgccagcgagccaagggagaggcagggattcccttgaaatgtactcttacacttttttattttatttttaatgtacatttgtgtgcaccagaatggaatgtgctctttttaaagagctggacagtggttgcttcagacttctgaataccagaaagacttgccttttaatttttaaatattactttttacatcataaaatgtgttatcttatccatgtatttgaataacatcatatataaaggtagttttttgcttgtgcttagtgaagcctccttttttaacatacatttgatatgctttatgttctttttcttgatttttagtactgagaatttataagccaagaagtaactgacaatatgtttagcaggatgtaatcccagctacttgggaagctgaggtgggaggatcgcttgagtctaggagtttgaggctgcagtgagctatgatggtgccactgcactccatcctgggtgagagatcaagaccctatctcaaaaaatgagcaagttttttttttttttttaaatcagacttagggctagcaaggatgtgatcaccctggcccatttatacctcagcagtgaaggtgtaatttatacacacctctttgaaaacagtttaattcagtaagtgagtgcaactatgtgccatgcactccaaagtaggtccccacagttattctctcatagccttgttttttcagatctcaccatatttatttgtttctttgattttcttttcttatagattacaagctctgcaaggacaggggcatatttgttttgttcaccattaagtaataaacacctaatacagtgcctgtcatgtagttgcttagcagatattagttagatgcatgaatgtgtaggtatcaaagattttttttttcaggagatcacattctagtggaagacactatactgctttatgtgataagtgctttgataaagtaagcaagtcatctaaccagatcttggtagttaaggttttctgagatagaacttgagctgagtcttttaaaaatagtaggatttataagggaaaattaaaggtcttccacaaagaaactaagtgaaactaagcagcctatgaaaaggtgaaagttggagagattataggctatgaacatgggagatgagagagaaaactgcaggatagggacagaaacactgtgctaagacatttgaactttgtcctgtgcaatgtgggaaccagtagtgaaggttaattaactgacatgatcagatatgtatttgaaaagggctcttgttggcattagtctagagaatgcgatggagctgggaagcgaaagaagaaatgttgggagcctgtgttgtagtaactgaaaaatggcaatggcccagaattaaagcagcaagaataggagtgggctcaagtgatgtataaggaaaaaaaaaaaaatgacaactcagttttgttgttggtaaggagagtaaagtatggcttctgggtttctcatttgagatactgagtaaatgatggtgttaacccattgagaaaatagtgtggttagagtgggaagaaagttaatttaaaatgttcatttttttttttagtcatttctacttttggattctaggtttgtgtgctatattggttataaccaatttgctgaataataaattatcccaaaacttagctacttaaaacaacaaacattatctcacagtttctgtaagtcaaaagtccaggtctctcatgaagttgcagtcaggctcttggctagggctgcagtcatctgaaggattagtaagtcgctaagcccacacttaagctccacccttgaagggagaagtttggaaagaatttgtgaacatatttttaaatcacatatgctatgaacaggtttaggggagggagaggaaagaaaactttaacttttcattagcatactgcatctgtagttcctaatgggcatgttgtaaagatgttaagacgttttctatgcattataggtatatagtagtattttgttttgttctgtttttttgtttggtatgtagtagtttttaatcaaaccttaacgtatttgatattaagatttattgagtttcttgttgagatgtagaaataaaggggatccatttcatttatcca

SEQ ID NO: 77 - DNA, 1186 bp, Homo sapiens
gggaatctacaatggaaggacacaagaaagatcagctggattaagtagtcatgattatgcaaagccatatccagagaccaaggtgtaaagcaggtcggagaaaatggaaatctcaagattggctcagtcaaaaagaaacattatcagtttgaacatggaccttgaaagggatacgcagagaatagatgaagcaaaccagaaacttcttctcaaaatccaagagagggaagataagattcagaggctggaaagtgagatcattcagacgcggggcctggtggaagatgaagagtgggagaaggagaaccgcaccacgatggaaagggaaagagccttgcaggagctggaggaagaaacagccagacttgaaaggaagaataagacgttggtccacagtataacagaacttcaacaaaagcttacaaggaaatcacaaaagataaccaattgtgaacaaagcagtccagatggagccctagaagagacaaaggttaagttacaacagctggaagcttcctatgcatgccaagagaaggagctgctcaaggtaatgaaggagtatgcatttgtgacccagctctgtgaagatcaagccctctacataaagaagtaccaggaaacgttgaagaaaatagaagaagaactagaggctctgttccttgagagagaagtatcaaaactcgtgagcatgaaccctgtggaaaaagagcataccagccaaaataatgagggtactcctacccaaaagacagcaagattattcagtaaaaagattttttgctgtctctttttcatcaccctatttttcatcagactgctgagctacatgttttttcatgtaagattcataaatccagatctcctcgtcaatgtactgcccaaggtactgggcaggagcaccttgtggaagctcagatgcttcttctttccatctctcacacttgagacagaggacatgttaccccactgattccctaagaaatatccttgagcaatagaagggaagtgggatccgagcctgtagaagggaggcatgaaacttgtggaggaaagagatttgcttcagttttttcctcaccgtttgcctgcttgactaccttctgtcaccacgtcatctttccaggattaaccttgaccagtaaaaagctctgtaatagaaaaaaaaaaaaaaaaaaaaaaaaaaaaa

SEQ ID NO: 78 - DNA, 1862 bp, Homo sapiens
tggcttggtgagtctgtgtggtcagcagtctctgatccgtgcagggtattaatgtgtcagggctgagtgttctgagatttatctagaggctgggaagggctcctgaaccagttgtttccgtcttgtcggtctgtcagggttggaaagtccaagccataggacccagtttcctttcttagcttacgttatctaccagagcaccgtgggctgttacttgccttgagttggaagcggttcgcatttataccggaatataaatagtttctggaaaggacactgacaacttcaaagcaaaatgaagctcttttggttgcttttcaccattgggttctgctgggctcagtattcctcaaatacacaacaaggacgaacatctattgttcatctgtttgaatggcgatgggttgatattgctcttgaatgtgagcgatatttagctcccaagggatttggaggggttcaggtctctccaccaaatgaaaatgttgccattcacaaccctttcagaccttggtgggaaagataccaaccagttagctataaattatgcacaagatctggaaatgaagatgaatttagaaacatggtgactagatgcaacaatgttggggttcgtatttatgtggatgctgtaattaatcatatgtgtggtaatgctgtgagtgcaggaacaagcagtacctgtggaagttacttcaaccctggaagtagggactttccagcagtcccatattctggatgggattttaatgatggtaaatgtaaaactggaagtggagatatcgagaactataatgatgctactcaggtcagagattgtcgtctgtctggtcttctcgatcttgcactggggaaggattatgtgcgttctaagattgccgaatatatgaaccatctcattgacattggtgttgcagggttcagaattgatgcttccaagcacatgtggcctggagacataaaggcaattttggacaaactgcataatctaaacagtaactggttcccggaaggtagtaaacctttcatttaccaggaggtaattgatctgggtggtgagccaattaaaagcagtgactactttggtaatggccgggtgacagaattcaagtatggtgcaaaactcggcacagttattcgcaagtggaatggagagaagatgtcttacttaaagaactggggagaaggttggggtttcatgccttctgacagagcgcttgtctttgtggataaccatgacaatcaacgaggacatggcgctggaggagcctctatacttaccttctgggatgctaggctgtacaaaatggcagttggatttatgcttgctcatccttatggatttacacgagtaatgtcaagctaccgttggccaagatattttgaaaatggaaaagatgttaatgattgggttgggccaccaaatgataatggagtaactaaagaagttactattaatccagacactacttgtggcaatgactgggtctgtgaacatcgatggcgccaaataaggaacatggttaatttccgcaatgtagtggatggccagccttttacaaactggtatgataatgggagcaaccaagtggcttttgggagaggaaacagaggattcattgttttcaacaatgatgactggacattttctttaactttgcaaactggtcttcctgctggcacatactgtgatgtcatttctggagataaaattaatggcaactgcacaggcattaaaatctacgtttctgatgatggcaaagctcatttttctattagtaactctgctgaagatccatttattgcaattcatgctgaatctaaattgtaaaatttaaaattaaatgcaaatccgcaaagca

SEQ ID NO: 79 - DNA, 1293 bp, Homo sapiens
gaaagatggcggagcaagagcaaagaaaaatccctttggttccagaaaatctcctgaaaaagaggaaggcttatcaagccctcaaagccacccaggcaaagcaggcacttttggcaaagaaggagcagaagaaaggaaaagggctcaggtttaagcgactggaatcattcctacatgattcctggcggcagaaacgtgacaaggtgcgtctcagacgactagaagtgaaacctcatgccttggaattgccagataaacattccttggcctttgttgtacgcatcgaaaggattgacggcgtgagtttactggtgcagagaaccattgcaagacttcgcctaaagaaaatttttagtggtgtctttgtaaaagtcaccccccagaatctaaaaatgctgcgtatagtggaaccttatgtgacctggggatttccaaatctgaagtctgtccgagaactcattttgaaacgtggacaagccaaggtcaagaataagaccatccctctgacagacaatacagtgattgaggagcacctggggaagtttggcgtcatttgcttggaagacctcattcatgaaattgccttcccagggaagcatttccaggagatctcatggttcttgtgccctttccacctctcagtggcccgtcatgctaccaaaaatagagtgggcttcctcaaggagatgggcacacctggctatcggggtgaacgcatcaatcagctcatccgtcagctgaactagacccaggtgaggcagggctgaaaactgcccttgggctgacttttgataggccatgccttgccactttacaagttctttttgcatttactagtatttaagagtaaccttgagattgggaggaatagaggaggctggtacaaatagatggagacctgctgggatcagtgaatgcctgattaggacatggggctatgcatagcctaagagttataggcttaaagatgtcgagtaactaaaaactgtattgctggccgggcgcggtggctcacgcctgtaatcccagcactttgggaggccaaggcgggcagaccatgaggtcaggagattgagaccatcctggccaacatggtgaaaccctgtctctactaaaaatacaaaaatgagctgggtgtggtggcacgtgcctgtagtcccagctactcgagaggctaaggcaggaaaatcgcttgaacccaggaggcagagattgcagtgagccaagattgcaccagtgcactccagctgggcgacagagcgagactccatctcgaaaaaaaaaaaaaaaaaa

SEQ ID NO: 80 - DNA, 2278 bp, Homo sapiens
atgggccaaaatatgggcttaaacaaaggttgtgggagctcagaaaaggagcaactcactctgcctgaaagagtcatggagggctccacggaaaaagcaacatttgtgcaggaggagattagaacacagaggaggaggatagcagcactccagatgaagggaaggaaatcaaagttggcccgagatgaccaaattcacattctcaagcaacaccgacgtaaagaactggaaacacggcaaaaacaatatcgatggatggagtggaaccctggcttccccttgagcatcgatgccaaatgccacaaggatttaccccgtgatatccagtttgatagtgaaaaaggagtggactttgttctgaattactccaaagcgatggagaacctgttcatcaaccgcttcatgcacatgttccagtcttcttggaatgacttcgccgactttgagaaaatctttgtcaagatcagcaacactatttctgagcgggtcatgaatcactggcaggaagacctgatgtttggctaccagttcctgaatggctgcaaccctgtgttgatccggcgctgcacagagctgcccgagaagctcccggtgaccacggagatggtagagtgcagcctggagcggcagctcagcttggagcaggaggtccagcaagggaacattttcatcgtggactttgagctgctggatggcatcgatgccaacaaaacagacccctgcacactccagttcctggccgctcccatctgcttgctgtataagaacctggccaacaagattgtccccattgccatccagctcaaccaaatcccgggagatgagaaccctattttcctcccttcggatgcaaaatacgactggcttttggccaaaatctgggtgcgttccagtgacttccacgtccaccagaccatcacccaccttctgcgaacacatctggtgtctgaggtttttggcattgcaatgtaccgccagctgcctgctgtgcaccccattttcaagctgctggtggcacacgtgagattcaccattgcaatcaacaccaaggcccgtgagcagctcatctgcgagtgtggcctctttgacaaggccaacgccacagggggcggtgggcacgtgcagatggtgcagagggccatgaaggacctgacctatgcctccctgtgctttcccgaggccatcaaggcccggggcatggagagcaaagaagacatcccctactacttctaccgggacgacgggctcctggtgtgggaagccatcaggacgttcacggccgaggtggtagacatctactacgagggcgaccaggtggtggaggaggacccggagctgcaggacttcgtgaacgatgtctacgtgtacggcatgcggggccgcaagtcctcaggcttccccaagtcggtcaagagccgggagcagctgtcggagtacctgaccgtggtgatcttcaccgcctccgcccagcacgccgcggtcaacttcggccagtacgactggtgctcctggatccccaatgcgcccccaaccatgcgagccccgccaccgactgccaagggcgtggtgaccattgagcagatcgtggacacgctgcccgaccgcggccgctcctgctggcatctgggtgcagtgtgggcgctgagccagttccaggaaaacgagctgttcctgggcatgtacccagaagagcattttatcgagaagcctgtgaaggaagccatggcccgattccgcaagaacctcgaggccattgtcagcgtgattgctgagcgcaacaagaagaagcagctgccatattactacttgtccccagaccggattccgaacagtgtggccatctgagcacactgccagtctcactgtgggaaggccagctgccccagccagatggactccagcctgcctggcaggctgtctggccaggcctcttggcagtcacatctcttcctccgaggccagtacctttccatttattctttgatcttcagggaactgcatagattgatcaaagtgtaaacaccatagggacccattctacacagagcaggactgcacagcgtcctgtccacacccagctcagcatttccacaccaagcagcaacagcaaatcatgaccactgatagatgtctattcttgttggagacatgggatgattattttctgttctatttgtgcttagtccaattccttgcacatagtaggtacccaattcaattactattgaatgaattaagaattggttgccataaaaataaatcagttcatttaaaatgg

SEQ ID NO: 81 - DNA, 2376 bp, Homo sapiens
ggcgcgggcctccggcctgaggcccggcgaggtgctggagggagcggggcgcggatccggcccagatgggcagctccgtccgcggggtcagggccgggcttcggcttcaccgcagcctcgcctgagcgggcgcctctgaagtggagggcgggccgcctgggccgcgggcctcgggaggatggtggcgccctggcgcgtctccgtcagggtttgcctgtcgcacctgaggtgcttcgagctcagacagggactcagcctcctgaggccctccgagtgccctcgcgatgccaggctctgctggcttctgctgggcactttgcccaaggtcgtctccctgtgcggggacgtgggtgagggggcccctgacgttctgagtcggcgaagggtccgctgcagcggggcggctggcgcggggcccgcggagagcctcccccgagcgggacctctgggcggcgtcttcctgcatctccgcctctggcttcgcgccggcgctctgttggtgaaattcttccccctcctactcctctaccccctcacctacctggctcccagcgtctccaccctctggctccacctgcttctgaaagccaccgagacctcaggcccaacctacatcaaactgggccagtgggccagcacccggcgcgatctgttttcggaggctttctgtgcccaattttccaagctgcatgtccgagtgacgccccacccgtggactcacactgagcgcttccttcggcaggcttttggggatgactgggggagcatcctctcttttgagaaccgggaacctgtgggctcaggctgcgtggcccaggtgtacaaagcatacgccaacactgccttcctggagactgacagcgtccagagacttggcagggcctcctgtctgccgcccttctcacatactggggcagtcggtgggctgagagagctctttggataccttggaaatggccggaaacctccagaaaatctcgcagaccagtcgtttctagaaaggctgctcctccctaaagctgacctggttggatcaaatgcaggggtgtctcgggctcaggtccctggccaccaacctgaggccaccaacctcatctccgtggcagtgaaagtgttgcaccctggcctgctcgctcaggtgcatatggacctgctgctgatgaagattggcagccgagtcctgggagttttgccaggcatcaagtggcttagcttgcctgagattgtggaggaatttgagaagctgatggtccaacagattgacctgcgttacgaagctcagaatctagaacacttccaggtcaacttccggaatgtgaaagccgtcaagttccccacccctctgcgcccctttgtcaccagagaagtcttggtggaaacgtatgaagagagtgtgcctgtgtccagttaccagcaggcaggaattcccgtggacttgaaaaggaagattgcacggctggggatcaacatgctcctgaagatgatatttgtggataactttgtccatgcagaccttcaccctggaaacatcctggttcagggtgccaacggcctgtcctcgagtcaggaggcgcagctgcagcaggcggacatctgtgacactctggtggtggccgtgccatcttccctctgcccgctgcgactggtgctgctggatgctggcattgtggcggagctgcaggcccctgacctgaggaatttccgggcagttttcatggctgtggtgatggggcagggccagagagtggctgagctgatcctgcatcatgcccgggccagcgagtgcagggacgtggaggggttcaaaaccgagatggccatgctggtgacccaggccaggaagaacaccatcaccctggagaagcttcatgtgtccagccttctctctagtgtctttaagttgctgatgactcacaaggtaaagcttgagagcaactttgcctccattgtgtttgccatcatggtgttggaggggcttggccgctcactggaccccaaactggacatcctggaggcagcgaggcccttcctcctcacgggcccagtgtgccccccgtgatggggcagtggcctctgtgggcccttgtcaagagctggaggccactcccaagagcctctcctatggcagctgggacgttttaaaattgggacaccaatttcaaatgtaaccctccagtggtggaaggcacaccatggcttcctctgcttggtttgagggtctgttcaaaagctttgggccaattagggagtaaaaggagggaaggggcctatccattccattgtggaagctgggccaggtgccagggacactctccttcagggaaaatgttatgtggaggaggacgaataaatttattttgttttaaaaaaaaaaaa

SEQ ID NO: 82 - DNA, 1980 bp, Homo sapiens
tttccgggaagatggcggcgcacaagtcaggtccggcacatgtttccgcggagcggacccagcaatgacggatgatatcacctcttcttctctggtgagagtctgaggatagagacttttttctcaccatgaatgtcaccccagaggtcaagagtcgtgggatgaagtttgctgaggagcagctgctaaagcatggatggactcaaggcaaaggcctcggccggaaggagaatggtatcactcaggctctcagggtgacactgaagcaagacactcatggggtaggacatgaccctgccaaggagttcacaaaccactggtggaatgagctcttcaacaagactgcggccaacttggtagtggaaactgggcaggatggagtacagataaggagcctttctaaggagaccacccgttataatcatcccaagcccaacttgctgtatcagaagtttgtgaagatggctacattgacttcaggtggagagaagccaaacaaagacttggagagctgcagtgatgacgacaaccaggggtccaagtccccaaagattctgactgatgagatgctgctccaagcctgtgaggggcgaacagcacacaaggctgcccgtcttgggatcacaatgaaggccaagcttgctcgcctagaggcccaggagcaggccttcctggctcgtctcaaaggccaggaccctggggcccctcaactgcagtcagagagcaagccccccaaaaaaaagaaaaagaaaaggaggcagaaagaggaggaagaagctacagcatctgaaaggaatgatgcagatgagaagcacccagaacatgctgagcagaacatcagaaaaagcaagaagaagaaaaggcgacatcaagaaggaaaggtctcagatgaaagagagggtacaactaaagggaatgagaaggaggacgctgcaggaacaagtgggcttggggaattgaatagcagagagcaaaccaatcagtccctcaggaaagggaagaaaaagaagaggtggcaccatgaagaggagaagatgggggtcttggaggaaggaggaaaaggcaaggaggctgcaggcagtgtcaggacagaggaggtagagagcagggcatatgctgacccatgcagccgaagaaagaagaggcagcaacaggaggaggaggacttgaacctagaagatagaggtgaggaaacttttaggtggtggaaccagggaagcagagagcagagcatgcagtgatggaagaagcaggaaaagcaagaagaaaagacagcagcatcaagaggaggaggacatcttggatgtaagggatgagaaggatggcggggctagggaagcagagagcagagcacacactggctcaagcagcagaggtaagaggaagaggcagcagcatcccaagaaggaaagagctggagtcagcactgtccagaaagccaaaaagaaacagaagaagagagactaaaggtctggtaaaggtagggctcaattgattgattttcaggagttgaagcctcaaagaccagggttgatgcaggtctgcaggtcttctgcacccccctcaatgaggagtccctcccagaaaggaaactgatctctgggacgtcagctgctgagaggagcaagcggtagtaccaccccttagttgagggagtcagcacagtcctttctgcagcttctaacccaggaccatgaactcaggtgcctagagaagccaggcagctaaaggacaaggaatgctgggggctgtgggaacaggaatgcagataccctttgaaggagcattcctgctaaaagaagctgaaaatgtagacctatgtgaagtgctctgatttctaaatattgtgaaggttaagaaaaacataaatttaggtctatgggctagatttagcccacagttgccagtttctagcgctaccaaatgaatgaataaacatgagcttgcgctcctagcctagagataaaaaaaaaaaaaaaa

SEQ ID NO: 83 - DNA, 1401 bp, Homo sapiens
ggaggaggagcctctgccagactggagagaagcaggcctgagcctccccaaaggcagctcctggggactcccaggaccacaggctgagacgagacgcagggtggctggaggaagtgagaggtgaactcagcctgggactggctgggcgagactctccacctgctccctgggaccatcgcccaccatggctgtggcccagcagctgcgggccgagagtgactttgaacagcttccggatgatgttgccatctcggccaacattgctgacatcgaggagaagagaggcttcaccagccactttgttttcgtcatcgaggtgaagacaaaaggaggatccaagtacctcatctaccgccgctaccgccagttccatgctttgcagagcaagctggaggagcgcttcgggccagacagcaagagcagtgccctggcctgtaccctgcccacactcccagccaaagtctacgtgggtgtgaaacaggagatcgccgagatgcggatacctgccctcaacgcctacatgaagagcctgctcagcctgccggtctgggtgctgatggatgaggacgtccggatcttcttttaccagtcgccctatgactcagagcaggtgccccaggcactccgccggctccgcccgcgcacccggaaagtcaagagcgtgtccccacagggcaacagcgttgaccgcatggcagctccgagagcagaggctctatttgacttcactggaaacagcaaactggagctgaatttcaaagctggagatgtgatcttcctcctcagtcggatcaacaaagactggctggagggcactgtccggggagccacgggcatcttccctctctccttcgtgaagatcctcaaagacttccctgaggaggacgaccccaccaactggctgcgttgctactactacgaagacaccatcagcaccatcaaggacatcgcggtggaggaagatctcagcagcactcccctattgaaagacctgctggagctcacaaggcgggagttccagagagaggacatagctctgaattaccgggacgctgagggggatctggttcggctgctgtcggatgaggacgtagcgctcatggtgcggcaggctcgtggcctcccctcccagaagcgcctcttcccctggaagctgcacatcacgcagaaggacaactacagggtctacaacacgatgccatgagctgacggtgtccctggagcagtgaggggacaccagcaaaaaccttcagctctcagaggagattgggaccaggaaaacctgggaggatgggcagacttcctgtctttgaggctaatggacccgtggggcttgtaatctgtctctttctactatttacatctgatttaaataaaccattccatctgaaaggggcaaaa

SEQ ID NO: 84 - DNA, 4359 bp, Homo sapiens
ggcagcggccgataaatgctattagagcagccgccgcggagccgtccccgacgccacctccttttccttcgccgcagtttcctccgccgctgtcgggcgtgcggcgctgagggacccgggcgagcgcgccgcgcaccgccccgccggctcgcctccctcgccgcgttccgccctcagtggtctgccgggcgccccctcctccggcccgggcggggcctctgatcgcctcaagagagcggggagggggctcgggggccgcggcctgccctcccggcgggcggctgagggcgagggaggccctcccttctggcgaggggagggagggtgggtcaggagcccccaacccgccctgcggagctcggggccgcgcgaggggcggttgtctgggggagggggcgcggggtgattcagcgcccggcgaggcggaagcggccgcaagaggaggaggggagagcccgtccgcgcctgggctcccggggtggcacgagcccgcggccggagtgcgaggcggaggcgaggaggccgcggggacgggaggcgaggccggccgggcccccgaagccatggagaacgcgcacaccaagacggtggaggaggtgctgggccacttcggcgtcaacgagagtacggggctgagcctggaacaggtcaagaagcttaaggagagatggggctccaacgagttaccggctgaagaaggaaaaaccttgctggaacttgtgattgagcagtttgaagacttgctagttaggattttattactggcagcatgtatatcttttgttttggcttggtttgaagaaggtgaagaaacaattacagcctttgtagaaccttttgtaattttactcatattagtagccaatgcaattgtgggtgtatggcaggaaagaaatgctgaaaatgccatcgaagcccttaaggaatatgagcctgaaatgggcaaagtgtatcgacaggacagaaagagtgtgcagcggattaaagctaaagacatagttcctggtgatattgtagaaattgctgttggtgacaaagttcctgctgatataaggttaacttccatcaaatctaccacactaagagttgaccagtcaattctcacaggtgaatctgtctctgtcatcaagcacactgatcccgtccctgacccacgagctgtcaaccaagataaaaagaacatgctgttttctggtacaaacattgctgctgggaaagctatgggagtggtggtagcaactggagttaacaccgaaattggcaagatccgggatgaaatggtggcaacagaacaggagagaacaccccttcagcaaaaactagatgaatttggggaacagctttccaaagtcatctcccttatttgcattgcagtctggatcataaatattgggcacttcaatgacccggttcatggagggtcctggatcagaggtgctatttactactttaaaattgcagtggccctggctgtagcagccattcctgaaggtctgcctgcagtcatcaccacctgcctggctcttggaactcgcagaatggcaaagaaaaatgccattgttcgaagcctcccgtctgtggaaacccttggttgtacttctgttatctgctcagacaagactggtacacttacaacaaaccagatgtcagtctgcaggatgttcattctggacagagtggaaggtgatacttgttcccttaatgagtttaccataactggatcaacttatgcacctattggagaagtgcataaagatgataaaccagtgaattgtcaccagtatgatggtctggtagaattagcaacaatttgtgctctttgtaatgactctgctttggattacaatgaggcaaagggtgtgtatgaaaaagttggagaagctacagagactgctctcacttgcctagtagagaagatgaatgtatttgataccgaattgaagggtctttctaaaatagaacgtgcaaatgcctgcaactcagtcattaaacagctgatgaaaaaggaattcactctagagttttcacgtgacagaaagtcaatgtcggtttactgtacaccaaataaaccaagcaggacatcaatgagcaagatgtttgtgaagggtgctcctgaaggtgtcattgacaggtgcacccacattcgagttggaagtactaaggttcctatgacctctggagtcaaacagaagatcatgtctgtcattcgagagtggggtagtggcagcgacacactgcgatgcctggccctggccactcatgacaacccactgagaagagaagaaatgcaccttgaggactctgccaactttattaaatatgagaccaatctgaccttcgttggctgcgtgggcatgctggatcctccgagaatcgaggtggcctcctccgtgaagctgtgccggcaagcaggcatccgggtcatcatgatcactggggacaacaagggcactgctgtggccatctgtcgccgcatcggcatcttcgggcaggatgaggacgtgacgtcaaaagctttcacaggccgggagtttgatgaactcaacccctccgcccagcgagacgcctgcctgaacgcccgctgttttgctcgagttgaaccctcccacaagtctaaaatcgtagaatttcttcagtcttttgatgagattacagctatgactggcgatggcgtgaacgatgctcctgctctgaagaaagccgagattggcattgctatgggctctggcactgcggtggctaaaaccgcctctgagatggtcctggcggatgacaacttctccaccattgtggctgccgttgaggaggggcgggcaatctacaacaacatgaaacagttcatccgctacctcatctcgtccaacgtcggggaagttgtctgtattttcctgacagcagcccttggatttcccgaggctttgattcctgttcagctgctctgggtcaatctggtgacagatggcctgcctgccactgcactggggttcaaccctcctgatctggacatcatgaataaacctccccggaacccaaaggaaccattgatcagcgggtggctctttttccgttacttggctattggctgttacgtcggcgctgctaccgtgggtgctgctgcatggtggttcattgctgctgacggtggtccaagagtgtccttctaccagctgagtcatttcctacagtgtaaagaggacaacccggactttgaaggcgtggattgtgcaatctttgaatccccatacccgatgacaatggcgctctctgttctagtaactatagaaatgtgtaacgccctcaacagcttgtccgaaaaccagtccttgctgaggatgcccccctgggagaacatctggctcgtgggctccatctgcctgtccatgtcactccacttcctgatcctctatgtcgaacccttgccactcatcttccagatcacaccgctgaacgtgacccagtggctgatggtgctgaaaatctccttgcccgtgattctcatggatgagacgctcaagtttgtggcccgcaactacctggaacctgcaatactggagtaaccgcttcctaaaccattttgcagaaatgtaagggtgttcggttgcgtgcatgtgcgtttttagcaacacatctaccaaccctgtgcatgactgatgttggggaaaaagaaaagtaaaaaacttcccaactcactttgtgttatgtggaggaaatgtgtattaccaatggggttgttagcttttaaatcaaaatactgattacagatgtacaatttagcttaatcagaaagcctctccagagaagtttggtttctttgctgcaagaggaatgaggctctgtaaccttatctaagaacttggaagccgtcagccaagtcgccacatttctctgcaaaatgtcatagcttatataaatgtacagtattcaattgtaatgcatgccttcggttgtaagtagccagatccctctccagtgacattggaacatgctactttttaattggccctgtacagtttgcttatttataaattcattaaaaacactacaggtgttgaatggttaaaatgtaggcctccagttcattttcagttattttctgagtgtgcagacagctatttcgcactgtattaaatgtaacttatttaatgaaatcagaagcagtagacagatgttggtgcaatacaaatattgtgatgcatttatcttaataaaatgctaaatgtcaatttatcactgcgcatgtttgactttagactgtaaatagagatcagtttgtttctttctgtgctggtaacaatgagcgtcgcacagacatggtttcaggtaaataaatctattctatgataaaaaaaaaaaaaaaaa

SEQ ID NO: 85 - DNA, 909 bp, Homo sapiens
agacgttcttcgccgagagtcgtcgaggtttcctgcttcaactgtgcttggacggaacccggcgctcgtcccccaccccggccggccacccatagccagccctccgtcaccttttcaccgcgccctcggactgccccaaggtccccgccgccgctccagggccgcgcagccaccgccgccgcctctccttagtcgccgccttgacgaccgcgtccacctcgcaggtgcgccagaactaccaccaggactcagaggcggccatcaaccgccagatcaacctggagctctacgcctcctacgtttacctgtccatgtcttactactttgaccacgatgatgtggctttgaagaactttgccaaatactttcttcaccaatctcatgaggagagggaacatgctgaggaactgatgaagctgcagaaccaatgaggtggccgaatcttccttcaggatatcaagaaaccagactgtgatgactgggagcgggctgaatgagatggagtgtgcattacatttggaaaaaaatgtgaatcagtcaccactggaactgcacaaactggccactgacaaaaatgacccccatttgtgtgacttcattgagacacattacctgaatgagcaggtgaaagccatcaaagaattgggtgaccacgtgaccaacttgcacaagatgggagcgcccgaatctggcttggcggaatatctcttcgacaagcacaccccggggagacagtgacaatgaaaggtaagcctcaggctaatttccccatagccgtgggttgacttccctggtcaccaaggcagtgcatgcatgttggggtttcctttaccttttctataaattgtaccaaaacatccacttaagttctttgatttgtaccattcctgcaaataaagaaatttggta

SEQ ID NO: 86 - DNA, 2426 bp, Homo sapiens; identical to SEQ ID NO: 31

SEQ ID NO: 87 - DNA, 7859 bp, Homo sapiens
cgccaaatttctcccctgaagcagaggtggtagccaacggctccatgtctctgaggagcggcgggcggcggcgcgcggacccaggcgcggatggcgaggccagcagggatgatggcgccacttcctcagtttcggcactcaagcgcctggaacggagtcagtggacggataagatggatttgcggtttggttttgagcggctgaaggagcctggtgagaagacaggctggctcattaacatgcatcctaccgagattttagatgaagataagcgcttaggcagtgcagtggattactactttattcaagatgacggaagcagatttaaggtggctttgccctataaaccgtatttctacattgcgaccagaaagggttgtgagcgagaagtttcatcttttctctccaagaagtttcagggcaaaattgcaaaagtggagactgtccccaaagaggatctggacttgccaaatcacttggtgggtttgaagcgaaattacatcaggctgtccttccacactgtggaggatcttgtcaaagtgaggaaggagatctcccctgccgtgaagaagaacagggagcaggatcacgccagcgacgcgtacacagctctgctttccagtgttctgcagaggggcggtgtcattactgatgaagaggaaacctctaagaagatagctgaccagttggacaacattgtggacatgcgcgagtacgatgttccctaccacatccgcctctccattgacctgaagatccacgtggctcattggtacaatgtcagataccgaggaaatgcttttccggtagaaatcacccgccgagatgaccttgttgaacgacctgaccctgtggttttggcatttgacattgagacgaccaaactgcccctcaagtttcctgatgctgagacagaccagattatgatgatttcctacatgatcgatggccagggctacctcatcaccaacagggagattgtttcagaagatattgaagattttgagttcacccccaagccagaatatgaaggccccttttgtgtcttcaatgaacccgatgaggctcatctgatccaaaggtggtttgaacacgtccaggagaccaaacccaccatcatggtcacctacaacggggacttttttgactggccatttgtggaggcccgggcagcagtccacggtctgagcatgcagcaggagataggcttccagaaggacagccagggggagtacaaggcgccccagtgcatccacatggactgcctcaggtgggtgaagagggacagttaccttcctgtgggcagtcataatctcaaggcggccgccaaggccaagctaggctatgatcccgtggagctagacccggaggacatgtgccggatggccacggagcagccccagactctggccacgtattctgtgtcagatgctgtcgccacttactacctgtacatgaagtacgtccacccattcatctttgctctgtgcaccattattcccatggagcccgacgaggtgctgcggaagggctctggcactctgtgtgaggccttgctgatggtgcaggccttccacgccaacatcatcttccccaacaagcaagagcaggagttcaataagctgacggacgacggacacgtgctggactctgagacctacgtcgggggccacgtggaggccctcgagtctggggttttccgcagcgatatcccttgccggtttaggatgaatcctgccgcctttgacttcctgctgcagcgggttgagaagaccttgcgccacgcccttgaggaagaggagaaagtgcctgtggagcaagtcaccaactttgaagaggtgtgtgatgagattaagagcaagcttgcctccctgaaggacgttcccagccgcatcgagtgtccactcatctaccacctggacgtgggggccatgtaccccaacatcatcctgaccaaccgcctgcagccctctgccatggtggacgaagccacctgtgctgcctgtgacttcaataagcctggagcaaactgccagcggaagatggcctggcagtggaggggcgagttcatgccagccagtcgcagcgaataccatcggatccagcaccagctggagtcagagaagttcccccccttgttcccagaggggccagctcgggcctttcatgaactgtcccgcgaggaacaggcgaaatacgagaagagaaggctggcggattactgccggaaagcctacaagaagatccacatcaccaaggtggaagagcgtctcaccaccatctgccagcgggaaaactccttctacgtggacaccgtgcgtgccttccgggacaggcgttacgagttcaaagggctccacaaggtgtggaaaaagaagctctcggcggccgtggaggtgggcgacgcggctgaggtgaagcgctgcaagaacatggaggtgctgtatgactcgctgcagctggcccacaagtgcatcctgaactccttctatggctatgtcatgcgcaagggggctcgctggtactccatggagatggctggcatcgtctgcttcacaggggccaacatcatcacccaggcacgggagctgatcgagcagattgggaggcccttagagctggacacagatggtatatggtgcgtcctgcccaacagcttcccagaaaattttgtcttcaagacgaccaatgtgaagaagcccaaagtgaccatctcctacccaggcgccatgttgaacatcatggtcaaggaaggcttcaccaatgaccagtaccaggagctggctgagccgtcctcactcacctacgtcacccgctcagagaacagcatcttttttgaggttgatgggccctaccttgccatgattcttccagcctccaaggaagaaggcaagaaattgaagaagaggtatgctgtgttcaatgaagacggttctctggctgagctcaagggctttgaggtcaaacgccgcggggaactgcagctgattaagatcttccaatcctcggtgtttgaggccttcctcaagggcagcacgctggaagaggtgtatggctctgtagccaaggtggctgactactggctggacgtgctgtacagcaaggcagccaacatgcctgactctgagctattcgagctcatctctgagaaccgttccatgtctcggaagctggaagattacggggagcagaagtctacgtccatcagcacagcaaagcgcctggccgagttcctgggagaccagatggtcaaggatgcagggctgagttgccgctacatcatctcccgcaagcccgagggctcccctgtcacggagagggccatcccacttgccattttccaagcagagcccacggtgaggaagcactttctccggaaatggctcaagagctcttcccttcaagactttgatattcgagcaattctggattgggactactacattgagcggctgggaagcgccatccagaagatcatcaccatccctgcggccctgcagcaggtaaagaacccagtgccacgtgtcaaacaccccgactggctgcacaaaaaactgctggagaagaatgatgtctacaagcagaagaagatcagtgagctcttcaccctggagggcaggagacaggtcacgatggccgaggcctcagaagacagtccgaggccaagtgctcctgacatggaggacttcggcctcgtaaagctgcctcacccagcagcccctgtcactgtgaagaggaagcgagttctttgggagagccaggaggagtcccaggacctcacgccgactgtgccctggcaggaaatcttggggcagcctcccgccctgggaaccagccaggaggaatggcttgtctggctccggttccacaagaagaagtggcagctgcaggcccggcagcgcctcgcccgcaggaagaggcagcgtctggagtcggcagagggtgtgctcaggcccggggccatccgggatggtcctgccacggggctggggagcttcttgcgaagaactgcccgcagcatcctggaccttccgtggcagattgtgcagatcagcgagaccagccaggccggcctgttcaggctgtgggcgctcgttggcagtgacttgcactgcatcaggctgagcatcccccgtgtgttctacgtgaaccagcgagtcgctaaagcggaggagggtgcttcgtatcgcaaggtaaatcgggtccttcctcgctccaacatggtctacaatctctatgagtattcagtgccagaggacatgtaccaggaacacatcaacgagatcaacgctgagctgtcagcgccagacatcgagggcgtatatgagactcaggttccgttactgttccgggccctggtgcacctgggctgtgtgtgtgtggtcaataaacagctggtgaggcacctttcaggctgggaagcagagacctttgctcttgagcacctggagatgcgctctctggcccagttcagctacctggaaccagggagtatccgccatatctacctgtaccaccacgcacaggcccacaaagcgctcttcgggatcttcatcccctcacagcgcagggcatccgtctttgtgctggacactgtgcgcagcaaccagatgcccagccttggcgccctgtactcagcagagcacggcctcctcctggagaaggtgggccctgagctcctgccaccccccaaacacaccttcgaagttcgggcagaaactgacctgaagaccatctgcagagccatccagcgattcctgctcgcctacaaggaggagcgccgggggcccacactcatcgctgttcagtccagctgggagctgaagaggctggccagtgaaattcctgtcttggaggaattcccactggtgcctatctgtgtggctgacaagatcaactatggggtcctggactggcagcgccatggagcccggcgcatgatccgtcactacctcaacctggacacctgcctgtcgcaggccttcgagatgagcaggtactttcacattcccattgggaacctaccagaggacatctccacattcggctccgacctcttctttgcccgccacctccagcgccacaaccacctgctctggctgtcccctacagcccgccctgacctgggtggaaaggaggctgatgacaactgtcttgtcatggagttcgatgaccaagccactgttgagatcaacagttcaggctgttactccacagtgtgtgtggagctggaccttcagaacctggccgtcaacaccattctccagtctcaccatgtcaacgacatggagggggccgacagcatggggatcagcttcgacgtgatccagcaggcctccctggaggacatgatcacgggtggtcaggctgccagtgccccggccagctacgatgagacagccctgtgctctaacaccttcaggatcctgaagagcatggtcgtgggctgggtgaaggagatcacccagtaccacaacatctatgcagacaaccaggtgatgcacttctaccgctggcttcggtcgccatcctctctgcttcatgaccctgccctgcaccgcacactccacaacatgatgaagaagctcttcctgcagctcatcgctgagttcaagcgcctggggtcatcagtcatctacgccaacttcaaccgcatcatcctctgtacaaagaagcgccgtgtggaagatgccatcgcttacgtggagtacatcaccagcagcatccattcaaaggagaccttccattctctgacaatttctttctctcgatgctgggaatttcttctctggatggatccatctaactatggcggaatcaaaggaaaagtttcatctcgtattcactgtggactgcaagactcccagaaagcagggggagcagaggatgagcaggaaaatgaggacgatgaggaggaaagagatggggaggaggaggaagaggcggaggaatccaacgtggaggatttactggaaaacaactggaacattttgcagtttttgccacaggcagcctcctgccagaactacttcctcatgattgtttcagcgtacatcgtggccgtgtaccactgcatgaaggacgggctgaggcgcagtgctccagggagcacccccgtgaggaggaggggggccagccagctctcccaggaggccgagggggcggtcggagcccttcccggaatgatcaccttctctcaggattatgtcgcaaatgagctcactcagagcttcttcaccatcactcagaagattcagaagaaagtcacaggctctcggaactccactgagctctcagagatgtttcctgtcctccccggttcccacttgctgctcaataaccctgccctggagttcatcaaatacgtgtgcaaggtgctgtccctggacaccaacatcacaaaccaggtgaataagctgaaccgagacctgcttcgcctggtggatgtcggcgagttctccgaggaggcccagttccgagacccctgccgctcctacgtgcttcctgaggtcatctgccgcagctgtaacttctgccgcgacctggacctgtgtaaagactcttccttctcagaggatggggcggtcctgcctcagtggctctgctccaactgtcaggcgccctacgactcctctgccatcgagatgacgctggtggaagttctacagaagaagctgatggccttcaccctgcaggacctggtctgcctgaagtgccgcggggtgaaggagaccagcatgcctgtgtactgcagctgcgcgggagacttcgccctcaccatccacacccaggtcttcatggaacagatcggaatattccggaacattgcccagcactacggcatgtcgtacctcctggagaccctggagtggctgctgcagaagaacccacagctgggccattagccagccccgggccccgggtgcctctgcgtccgtgccaggcctcctgatgccaaggccacatccccgtgcttccagtgaccagaccactgaccaccctgactgtccaaacctgtgaccccaggccagggaacggggaggaaaccaaagaaaaccattttcagggagctcagacgtcacaggagggagcgggagcaggatgtggccctggcctcgccagagcacctgaagaagcaggccgtgagcgaggctgcgagtgccctgggcgccgtttctcacgcagtgaatgcttttccaggcctctgttgcttcctgcaccacacctggtggggtgggagcgtcctctaggtgcccctagttctttgtcctgcctcccagagggaggaaaagcccctgggggcttctggctccctgagattgggctctgagacgagacgggttcccaaggccctggtggggctggagtctcacctgtttgcatggagaaatgggctggccccacagcctcacaggagcagtttgtgggctggtttccccaggaatccagaccctaacccgtgagaatctggattttggcttgtgagccctgcttatttggagccgggtctagagggaaccctctatcagcctcaggaaaacaagacctctgtgcacctcacttttggctcactgcagcccttgtccttcacctccacacaggaccagctggaagcagaaagaagaaaggccaatttcacagggcaccaaacaagtatgaaatgtaaatcagaaatgcagacaccccagacgagagcctcacaggagggagggggccccacaggctccccaggaggctcgtgtctttggcccagagccagccttagtttgtccctgccatctactgtctgaggccatcgctgctacactttgtttttatttgtatttcatactgaagtttcaaaaaaaaaaaaaaaaaaa

SEQ ID NO: 88 - DNA, 3761 bp, Homo sapiens
acctccggagctgggaagagagtcaagatggcggcgaaatccgatggcggtggcgtgggggtgggcttcgctcagctgcacaacctggacgaggcggtgggcagcggcggcgaggaggacggggagcccgggggaggcggctgcggcggcggcggcgacggcagcgagcccggcgagagcagctcgatgcacatctgccactgctgcaacacctcctcgtgctactggggctgccgctccgcctgcctgcgctccctcctgggcaggaagccgcgccgcagcgccgccgccgacgggggggaccagccgctgcagcctcccgcggcccccggcgccggccgccaacccccgacgccctcggccgcgcggccggagccgccgccgccgcaggtggagcggccgtggctcgactgcctgtggatcgtgctggcgctgctggtgttcttcggggacgtgggcaccgacctgtggctggccctcgactactaccgcaagggggactacgtctacttcgggctgaccctcttcttcgtgctggtgccgtcgctgctggtgcagagcctgagcttccgctggttcgtgcaggactacacgggcggcgggctgggcgccgtggaggggctcaccagccggggcccccccatgatgggggccggctacgtccacggcgcggcccgcggtggcccaggcgtgagggtctcccccacgccgggggcgcagcgcctgtgtcgcctctccgtgtggatctggcagtcggtcatccacctgctgcagatggggcaggtgtggaggtatatccgcaccatgtacctggggattcagagccagcggcggaaggaacaccagcgacgcttctactgggctatgatgtatgaatatgcagacgtcaacatgctgcgcctcctggagaccttcctggagagcgcgccccaactggtgctacagctctacatcatgctccagaagaacagcgccgagaccctgccctgtgtctcctctgtgacttccctgatgtccctggcttgggtgctagcctcctatcacaagctgctgcgggactccagggacgacaagaagagcatgagctacagaggggccatcatccaggtcttctggcgcctcttcaccatctcatcccgagtgatctcttttgccctctttgcttccatcttccagctctattttgggatcttcgtggtggttcactggtgcgccatggccttctggatcatccatggcggaacagacttctgcatgtccaagtgggaggagatcctcttcaacatggtggtagggatcgtgtacattttctgctggtttaacgtcaaggaagggcggactcgatatcgaatgtttgcatattatacgatagtcttgaccgagaatgctgccttgacgttcctttggtatttttacagagacccggagaccactgactcctatgcggtgccagcactgtgttgtgtctttattagctttgtggctgggatcgcaatgatgctcttatactatggcgtgctgcatcccacaggaccacgagctaagatccttgccagctcctgttgtgccgagctgctctggggcatccctttgccccccgatgttgagcccatggcgcctgagatccctgggtaccgggggacccaggttacgcccaccagagccgtaacggaacaacaggaggatctcacggctgacacttgcttgcctgttttccaagtgagacccatggggccccctaccccgttggggcgtccttacctcccagaagggcccctcattaagattgacatgccaagaaagcgatacccagcttgggatgctcattttgtagacaggaggctgagaaggactattaacattctacaatatgtcacccccaccgcagtaggcattcgatatcgagacggaccactcctctatgagttgctacagtatgagtcttcactctaagagcatcttgaccaagttgagaaggggaccttaagtttggtttgcggcaaacagcacttgcaagaaatataaccctcccttcccccaatacacagaaccaccgccaccaccaccaacaccgccacaccaacaccaccactacaaaaaaaaaagaattaataagtcacaaccccttcaaataagctttctttccagtcgctgtatgtatacaaagatattctctatgttttgtaagtaaaaacaaaaagaaaacctttcttttgttttttacacataagaaacagtattgaaaaatcccacgctatggttcatagggtggagaaggaggagttatctccactccaaaagaaaaaaaaaaagttttttaccttacaccaagtgtagatcatttatgggattggtgctgattgaaagaacaaaacaaaacaaaacaaacacaaacaaacaaaaaaccttcaactgccttatgcccttaggtgctgagtttcattaagtactgtcacgttttctcatgcaaaactctctggtgatttttgcaccagaagagggaaaattaaacaattaaatgaaacaaatctaaaagtgaaacaaaaaccaaccaacaaatacaacacaaagcaattattcttcctatctgattatttgtattgaagaaaacaaatttaccaaaagcaaaagcataaacccctccctcttttcagtttctccccctcctctcctgaccttctccccactttgcagagccttctaggagctcaagggctgtttgaaactcaaatggctggagaagctacttgaaggctgattatgtgccattttagcatttgcctagcaagaatcacattcgtttcccagtgaaaagcaaaccagaacaaaacaaaaagccaccgcaataattcggtaaggacaggatattctaaagcaaattaaaggagatttctgtacacatagtcagtaataataaaactcagcatagtagcaaaaagaacgacatcagtttaaaggcacaatacttaatcagtgactggcaacaacgattagttccatcattttaaggctgtgaatggtagacatttatcacatgtgatattgtgtaaagcctcttctgtttccatttggtgggaagccttaaattgatctggaaagaattcttcatttttcatttgtgcttttttaaaaaaaaaaataacacaaagaggaaaactagaatatatatatatatatacatatatataaaaagtcaaaattgtaataactgacccatttcaaagactgtttggtgcttctgtctttcaccattgtggttggctgaaaatcattcagctcacctggtgcatctgggttgaatgggaaattttgtgtgtgtagtatgtgtgtgtttgtgtgtgtatgtgtgtgtgtgcccatagcacacgtatatatgtgtgtgtccctgctgcaaagtcttgccagagatatacaaaactgatgtaagacgaacttggatcacggcttggttcagcagagcatgggggcgggggctctggagtggtggggaagtgatgctgcctgcccacgagccctggtttgggtggcaagactcacaccagcagcggactgcaggccttagaggccatgccatttgggtgaggatttgattccactgtttattttctcattgtatcaagttgaatttctgcaggtgttgcaagtatgttcaacgatttaaatttttttttatttttcaaagtattgttcctttaaagaatatttctgttctagggcatcgtttcaatcgcatcgtatctctacttgggcacaaaaaaaaa

SEQ ID NO: 89 - DNA, 1605 bp, Homo sapiens
gcggcgcgctgcaggcgcggggaacaccaatggcggggtacttgaagctggtgtgtgtttcctttcagcgtcaagggttccacactgttgggagtcgctgcaagaatcggacaggcgctgagcacctgtggctgacccgacatctcagggacccatttgtgaaggctgcgaaggtggagagttaccggtgtcgaagcgccttcaagctcctggaggtgaacgagaggcaccagattctgcggcccggccttcgggtgttagactgtggggcagctcctggggcctggagtcaggtggcggtgcagaaggtcaacgccgcaggcacagatcccagctctcctgttggcttcgtgcttggggtagatcttcttcacatattccccctggaaggagcaacttttctgtgccctgctgacgtgactgacccgagaacctcacagagaatcctcgaggtgcttcctggcaggagagcagatgtgattctgagcgacatggcgcccaatgccacagggttccgggacctcgatcatgacaggctcatcagcctgtgcctgacccttctcagcgtgaccccagacatcctgcaacctggggggacattcctttgtaaaacctgggctggaagtcaaagccgtcggttacagaggagactgacagaggaattccagaatgtaaggatcatcaaacctgaagccagcaggaaagagtcatcagaagtgtacttcttggccacacagtaccacggaaggaagggcactgtgaagcagtgaggatttcttgtgccattttcataatggtcattagctccttttaagctagaaacgtagcctgagctcctgaagagttcctgggagatttgagctgattttggagatggagcaggacaagtggggagtctctctctctctttctctctctctctttttaaccaaaaagagatgacaaaactaagttcaggggccatggaaaatgaaaaagtccgctatattgtgatttgggaagagaaagttatcaagagaaagaggtgaggatggaaggatggagaaaaacagactgtgggaaggatcagaaggaatccgccgaggcagggatgggtgtgcccatgtgtgccttgacgggacttcatcttatagactgttaaactgtcacacacaaacaggctttccacccctgctctgagagcaccacgcacagatttccagttcttagtgtggctgtttaaagtagaaaatctgggggctgggtgaggccactcatgcctgtaaacccagggctttagaaggctgaggctgggggattgcttgaagtcaggagttcaagaccaacctgggcaacatagcaacaccccccatgtctacaaaaatgaaaaaccaaaaagcaaaccaaaagaaaaatctgaaatttccatctggggattaacttctgtctttctggtgaacaatatagcaattcacgcattcttcaagcagcaaaagttcccggaacaattagggaagacgtatggtctgaatttatccaggcagtgggtctgctttggtttttgctggaaatttatatcagtgtctgggctcccaagaacataaatgtaattgccaaagcaaaaaa

SEQ ID NO: 90 - DNA, 3108 bp, Homo sapiens
gcctctggctcctcagggcattcccggcggctccgggtttggcaacgaggacgggggagtgcgactgcgtctcgggcagcatggccgagaagcggcacacacgggactccgaagcccagcggctccccgactccttcaaggacagccccagtaagggccttggaccttgcggatggattttggtggcgttctcattcttattcaccgttataactttcccaatctcaatatggatgtgcataaagattataaaagagtatgaaagagccatcatctttagattgggtcgcattttacaaggaggagccaaaggacctggtttgttttttattctgccatgcactgacagcttcatcaaagtggacatgagaactatttcatttgatattcctcctcaggagatcctcacaaaggattcagtgacaattagcgtggatggtgtggtctattaccgcgttcagaatgcaaccctggctgtggcaaatatcaccaacgctgactcagcaacccgtcttttggcacaaactactctgaggaatgttctgggcaccaagaatctttctcagatcctctctgacagagaagaaattgcacacaacatgcagtctactctggatgatgccactgatgcctggggaataaaggtggagcgtgtggaaattaaggatgtgaaactacctgtgcagctccagagagctatggctgcagaagcagaagcgtcccgcgaggcccgcgccaaggttattgcagccgaaggagaaatgaatgcatccagggctctgaaagaagcctccatggtcatcactgaatctcctgcagcccttcagctccgatacctgcagacactgaccaccattgctgctgagaaaaactcaacaattgtcttccctctgcccatagatatgctgcaaggaatcataggggcaaaacacagccatctaggctagtgtagagatgagcgctagccttccaagcatgaagtcggggaccaaattagcctttaactcataaagagagggtagggcttttctttttccatatgtcaattgtggtgttcccagaatgtatagcagttataaaaataggtgaaagaattgttagcttgtaaatactgagagattggtgatttatataaggtaatctgttagtcttaaaatagttaaaagtttgtatttttagattattatgtagtaggttagatccctcttgttttgacttccactgactcattctgaaccccctaagcacccaggccagaggcaagaacctgggctgtaactgccacctgacaccgctgactggctaaatgctttgcagaaagtgatgaccttacaccacaaccagcttctccaggtcatatgtgccttacctccagagagtctttttttttttttttctgagatggagtttcactcttgttgcccaggctggagtgcaatagcatgatctcggctcactgcaacctccgcctcctgggttcaagagattctcctgcctcagcctccccagtagctgggattacaggctcatgccaccatgcccagctaatttttgtattattattattgttttttagtagagacggggtttcaccatgttggccaggctagtcacgaactcctaacctcaggtgatccacccacctctgcctcccaaagtgctgggattacaggcatgagctaccacacctggtttggagagtcttaattaaggaaatttccctaatgttcatttattttctaaatccagaccgtgtttcagaataatccttacttgagagtagccattttcttgcctgtacttgtcagaactagaggaaatagccaagactaatgaaaaagattactctaacccttaaaagacttttaaattcactactagagtggtcattttaaaaatacatccatgttttaacttatttgagccttctttatgagtaaatgattcctccttgttctgtctttcaaaccagctaaatatttgtcacaaaagtgcttttttctcactgttgcctattttcatatatcaggttttaaatagttttaattttttaataaaattttctctacgttctatatgcaattgttatatatctatttgaatagctgaaggactaaaatacttttttaagagataacttcaggaaaccattatattttactatctgcatgctgttaactgtggtacactgtgaaatatgttgattacaaacccattcattacatagtataaggaattcacagtatattgactatatagtgtctaatgatcttgggcagatactgtcaaacttacaatatctatatagatgtaggtctttttaaatttacctagtcattcttctatcatgtatattgatgctgaaagaggaactggtcagctcctctggacaacaaattcttagtctataatattaggagacatcttctgttttgcaaatgtctgtgaatctgagcaacctggcattctgcttactggccagaaagctggcgggtgacatttgtaacatttcctctttgagactctgagttcacctagagaagtctaagcataacagctttctttcccagcacgagcctttatagctctctttagctcaaccactctgtccatccagccaatggatgtcccttcccctgtaccccaatttcaagcttattttaggaagccttgaactaccatgtatcctggctcctagctgagtttattagaggtatggagcagtgcaacttaaactcaagttgcacttacattttgaattttaaaatgatggttttatctgttgtgtgaagtggttcacccttgaggaccaggagcctccatatcctgactgaaaaccttttctgagacttagagtaacagtgcttttggttccttgagttctcctgtctccagataccaaatgaccttgacttttctgccttgtgaattcgtagtccaatcagctgaaattaaatcacttgggagggacgcatagaaggagctctaggaacacagtgccagtgcagaagtttctccaggtggcctccctttccaacaatgtacataataaagtgtatgcactttcactaataaaaaaaaaaaaaaaaaaaaaaaaaaaaaaaaaaa

SEQ ID NO: 91 - DNA, 519 bp, Homo sapiens
aggaacgcgggcggtgcggactcagcgggccgggtgcaggcgcggagctgggcctctgcgcccggcccgacctccgtctataaatagagcagccagttgcagggctccattctgctttccaactgcctgactgcttgttcgtctcactggtgtgagctccagcatcccctttgctcgaaatggaccccaactgctcttgcgccactggtggctcctgcacgtgcgccggctcctgcaagtgcaaagagtgcaaatgcacctcctgcaagaagagctgctgttcctgctgccccgtgggctgtgccaagtgtgcccagggctgcgtctgcaaaggggcatcggagaagtgcagctgctgtgcctgatgtgggaacagctcttctcccagatgtaaatagaacaacctgcacaacctggatttttttaaaaatacaacactgagccatttgctgcatttctttttatactaaatatgtgactgacaataaaaacaattttgactttaaaaaaaaaaaaaaa

SEQ ID NO: 92 - DNA, 685 bp, Homo sapiens
ataatagggccggtgctgcctgccgaagccggcggctgagaggcagcgaactcatctttgccagtacaggagcttgtgccgtggcccacagcccacagcccacagccatgggctgggacctgacggtgaagatgctggcgggcaacgaattccaggtgtccctgagcagctccatgtcggtgtcagagctgaaggcgcagatcacccagaagatcggcgtgcacgccttccagcagcgtctggctgtccacccgagcggtgtggcgctgcaggacagggtcccccttgccagccagggcctgggccccggcagcacggtcctgctggtggtggacaaatgcgacgaacctctgagcatcctggtgaggaataacaagggccgcagcagcacctacgaggtacggctgacgcagaccgtggcccacctgaagcagcaagtgagcgggctggagggtgtgcaggacgacctgttctggctgaccttcgaggggaagcccctggaggaccagctcccgctgggggagtacggcctcaagcccctgagcaccgtgttcatgaatctgcgcctgcggggaggcggcacagagcctggcgggcggagctaagggcctccaccagcatccgagcaggatcaagggccggaaataaaggctgttgtaaagagaaaaaaaaaaaaaaaaaaaaa

SEQ ID NO: 93 - DNA, 3528 bp, Homo sapiens
ctttttcgcaacgggtttgccgccagaacacaggtgtcgtgaaaactacccctaaaagccaaaatgggaaaggaaaagactcatatcaacattgtcgtcattggacacgtagattcgggcaagtccaccactactggccatctgatctataaatgcggtggcatcgacaaaagaaccattgaaaaatttgagaaggaggctgctgagatgggaaagggctccttcaagtatgcctgggtcttggataaactgaaagctgagcgtgaacgtggtatcaccattgatatctccttgtggaaatttgagaccagcaagtactatgtgactatcattgatgccccaggacacagagactttatcaaaaacatgattacagggacatctcaggctgactgtgctgtcctgattgttgctgctggtgttggtgaatttgaagctggtatctccaagaatgggcagacccgagagcatgcccttctggcttacacactgggtgtgaaacaactaattgtcggtgttaacaaaatggattccactgagccaccctacagccagaagagatatgaggaaattgttaaggaagtcagcacttacattaagaaaattggctacaaccccgacacagtagcatttgtgccaatttctggttggaatggtgacaacatgctggagccaagtgctaacatgccttggttcaagggatggaaagtcacccgtaaggatggcaatgccagtggaaccacgctgcttgaggctctggactgcatcctaccaccaactcgtccaactgacaagcccttgcgcctgcctctccaggatgtctacaaaattggtggtattggtactgttcctgttggccgagtggagactggtgttctcaaacccggtatggtggtcacctttgctccagtcaacgttacaacggaagtaaaatctgtcgaaatgcaccatgaagctttgagtgaagctcttcctggggacaatgtgggcttcaatgtcaagaatgtgtctgtcaaggatgttcgtcgtggcaacgttgctggtgacagcaaaaatgacccaccaatggaagcagctggcttcactgctcaggtgattatcctgaaccatccaggccaaataagcgccggctatgcccctgtattggattgccacacggctcacattgcatgcaagtttgctgagctgaaggaaaagattgatcgccgttctggtaaaaagctggaagatggccctaaattcttgaagtctggtgatgctgccattgttgatatggttcctggcaagcccatgtgtgttgagagcttctcagactatccacctttgggtcgctttgctgttcgtgatatgagacagacagttgcggtgggtgtcatcaaagcagtggacaagaaggctgctggagctggcaaggtcaccaagtctgcccagaaagctcagaaggctaaatgaatattatccctaatacctgccaccccactcttaatcagtggtggaagaacggtctcagaactgtttgtttcaattggccatttaagtttagtagtaaaagactggttaatgataacaatgcatcgtaaaaccttcagaaggaaaggagaatgttttgtggaccactttggttttcttttttgcgtgtggcagttttaagttattagtttttaaaatcagtactttttaatggaaacaacttgaccaaaaatttgtcacagaattttgagacccattaaaaaagttaaatgagaaacctgtgtgttcctttggtcaacaccgagacatttaggtgaaagacatctaattctggttttacgaatctggaaacttcttgaaaatgtaattcttgagttaacacttctgggtggagaatagggttgttttccccccacataattggaaggggaaggaatatcatttaaagctatgggagggttgctttgattacaacactggagagaaatgcagcatgttgctgattgcctgtcactaaaacaggccaaaaactgagtccttgtgttgcatagaaagcttcatgttgctaaaccaatgttaagtgaatctttggaaacaaaatgtttccaaattactgggatgtgcatgttgaaacgtgggttaaaatgactgggcagtgaaagttgactatttgccatgacataagaaataagtgtagtggctagtgtacaccctatgagtggaagggtccattttgaagtcagtggagtaagctttatgccagtttgatggtttcacaagttctattgagtgctattcagaataggaacaaggttctaatagaaaaagatggcaatttgaagtagctataaaattagactaatctacattgcttttctcctgcagagtctaataccttttatgctttgataattagcagtttgtctacttggtcactaggaatgaaactacatggtaataggcttaacaggtgtaatagcccacttactcctgaatctttaagcatttgtgcatttgaaaaatgcttttcgcgatcttcctgctgggattacaggcatgagccactgtgcctgacctcccatatgtaaaagtgtctaaaggtttttttttggttataaaaggaaaatttttgcttaagtttgaaggataggtaaaattaaaggacatgctttctgtttgtgtgatggtttttaaaaattttttttaagatggagttcttgttgcccaggctagaatgcaatggcaaaatctcactgcaatctcctcctcctgggttcaagcaattctcctacttcagcctcccaagtagctgggattacaggcatgtgctaatttggtgtttttaatagagatgaggtttttccatgttggtcaggctggtctcaaactcctgaccttaggtgatcgcctcggcctcctaaagtgctggaattacaggcatgagccaccatgcctggccaggacatgtgttcttaaggacatgctaagcaggagttaaagcagcccaagagataaggcctcttaaagtgactggcaatgtgtattgctcaagattcaaaggtacttgaattggccatagacaagtctgtaatgaagtgttatcgttttccctcatctgagtctgaattagataaaatgccttcccatcagccagtgctctgaggtatcaagtctaaattgaactagagatttttgtccttagtttctttgctatctaatgtttacacaagtaaatagtctaagatttgctggatgacagaaaaaacaggtaaggcctttaatagatggccaatagatgccctgataatgaaagttgacacctgtaagatttaccagtagagaattcttgacatgcaaggaagcaagatttaactgaaaaattgttcccactggaagcaggaatgagtcagtttacttgcatatactgagattgagattaacttcctgtgaaacccagtgtcttagacaactgtggcttgagcaccacctgctggtattcattacaaacttgctcactacaataaatgaattttaagctttaaaaaaaaaaaaaaaaaa

SEQ ID NO: 94 - DNA, 2021 bp, Homo sapiens
ctcggcgccggagccgttggctcccagacccgcctctccgcctcctctcacttttcccagggcggatgcgcctgcgctcagctgcctgggcgggctgggaggcgcgggttgaaaagtctcgttccaagtttggagagagagagaagagcgcctcagacctcggtacccgcgagcggggaggaggcaggaaagaaggacgcggcgtctggggagcacccaggcagcaagacggggcccgggctttcgacagtggggagtgtgacgcgcttgggaaaggcaggagcgccagcggtcgggctgctcttggctaacgagaggagtccgaggcggcggcgaggggcgaacgacccgacgcaagatggcgagtaaagagatgtttgaagatactgtggaggagcgtgtcatcaatgaagaatataaaatctggaagaagaatacaccgtttctatatgacctggttatgacccatgctcttcagtggcccagtcttaccgttcagtggcttcctgaagtgactaaacctgaaggaaaagattatgcccttcattggctagtgctggggactcatacgtctgatgagcagaatcatctggtggttgctcgagtacatattcccaatgatgatgcacagtttgatgcttcccattgtgacagtgacaagggtgaatttggtggctttggttctgtaacaggaaaaattgaatgtgaaattaaaatcaatcacgaaggagaagtaaaccgtgctcgttacatgccgcagaatcctcacatcattgctacaaaaacaccatcttctgatgtgttggtttttgactatacaaaacaccctgctaaaccagacccaagtggagaatgtaatcctgatctcagattaagaggtcaccagaaggaaggctatggtctctcctggaattcaaatttgagtggacatctcctaagtgcatctgatgaccatactgtttgtctgtgggatataaacgcaggaccaaaagaaggcaaaattgtggatgctaaagccatctttactggccactcagctgttgtagaggatgtggcctggcacctgctgcacgagtcattgtttggatctgttgctgatgatcagaaacttatgatatgggacaccaggtccaataccacctccaagccgagtcacttggtggatgcgcacactgccgaagtcaactgcctctcattcaatccctacagcgaatttattctagccaccggctctgcggataagaccgtagctttatgggatctgcgtaacttaaaattaaaactccataccttcgaatctcataaagatgaaattttccaggtccactggtctccacataatgaaactattctggcttcaagtggtactgaccgccgcctgaatgtgtgggatttaagtaaaattggggaagaacaatcagcagaagatgcagaagatgggcctccagaactcctgtttattcatggaggacacactgctaagatttcagattttagctggaaccccaatgagccttgggtcatttgctcagtgtctgaggataacatcatgcagatatggcaaatggctgaaaatatttacaatgatgaagagtcagatgtcacgacatccgaactggagggacaaggatcttaaacccaaagtacgagaaatgtttctgttgaatgtaatgctacatgaatgcttgatttatcaagcgccaaaaaggcattgtatagtaggaaatgtaagtggggtggcttatggcttctttatcctctgattctagcactttcaagtgagctgttgcgtactgtatcatattgtagctattagggaagagaagaatgttgcttaagaaagaacatcaccattgattttaaatacaagtagcagggtattgcctttgattcaactgttttaagtcctcattttctcaaactaagtgcttgctgttcccaaatatgcaagaataacttttacactttttccttccaacacttcttgattggctttgcagaaataaagttttaaaataaaa

SEQ ID NO: 95 - DNA, 936 bp, Homo sapiens
cttctcgcctaacgccgccaacatggtgagtcttactgttgcgggctccggggccgtcgaccatgccgctcgacctccacctccgctgggaagctgaggcgccgaacggctcccagagggtcccgggaagcgcatggtgttcaggcgcttcgtggaggttggccgggtggcctatgtctcctttggacctcatgccggaaaattggtcgcgattgtagatgttattgatcagaacagggctttggtcgatggaccttgcactcaagtgaggagacaggccatgcctttcaagtgcatgcagctcactgatttcatcctcaagtttccgcacagtgcccaccagaagtatgtccgacaagcctggcagaaggcagacatcaatacaaaatgggcagccacacgatgggccaagaagattgaagccagagaaaggaaagccaagatgacagattttgatcgttttaaagttatgaaggcaaagaaaatgaggaacagaataatcaagaatgaagttaagaagcttcaaaaggcagctctcctgaaagcttctcccaaaaaagcacctggtactaagggtactgctgctgctgctgctgctgctgctgctgctaaagttccagcaaaaaagatcaccgccgcgagtaaaaaggctccagcccagaaggttcctgcccagaaagccacaggccagaaagcagcgcctgctccaaaagctcagaagggtcaaaaagctccagcccagaaagcacctgctccaaaggcatctggcaagaaagcataagtggcaatcataaaaagtaataaaggttctttttgacctgttgacaaatgtatttaagcctttggatttaaagcctgttgaggctggagttaggaggcagattgatagtaggattataataaacattaaataatcaaaaaaaaaaaaaaaaaaaa

SEQ ID NO: 96 - DNA, 9260 bp, Homo sapiens
attttctgaatggtcttgcttctttgtctatcttgtctgattttctcctgtctgaccttttcctggttaaaaatctgggggaaaatgacggactccaagccgatcaccaagagtaaatcagaagcaaacctcatcccgagccaggagccctttccagcctctgataactcaggggagacaccgcagagaaatggggagggccacactctgcccaagacacccagccaggccgagccagcctcccacaaaggccccaaagatgccggtcggcggagaaactccctaccaccctcccaccagaagcccccaagaaaccccctttcttccagtgacgcagcaccctccccagagcttcaagccaacgggactgggacacaaggtctggaggccacagataccaatggcctgtcctcctcagccaggccccagggccagcaagctggctccccctccaaagaagacaagaagcaggcaaacatcaagaggcagctgatgaccaacttcatcctgggctcttttgatgactactcctccgacgaggactctgttgctggctcatctcgtgagtctacccggaagggcagccgggccagcttgggggccctgtccctggaggcttatctgaccacaggtgaagctgagacccgcgtccccactatgaggccgagcatgtcgggactccacctggtgaagaggggacgggaacacaagaagctggacctgcacagagactttaccgtggcttctcccgctgagtttgtcacacgctttgggggggatcgggtcatcgagaaggtgcttattgccaacaacgggattgccgccgtgaagtgcatgcgctccatccgcaggtgggcctatgagatgttccgcaacgagcgggccatccggtttgttgtgatggtgacccccgaggaccttaaggccaacgcagagtacatcaagatggcggatcattacgtccccgtcccaggagggcccaataacaacaactatgccaacgtggagctgattgtggacattgccaagagaatccccgtgcaggcggtgtgggctggctggggccatgcttcagaaaaccctaaacttccggagctgctgtgcaagaatggagttgctttcttaggccctcccagtgaggccatgtgggccttaggagataagatcgcctccaccgttgtcgcccagacgctacaggtcccaaccctgccctggagtggaagcggcctgacagtggagtggacagaagatgatctgcagcagggaaaaagaatcagtgtcccagaagatgtttatgacaagggttgcgtgaaagacgtagatgagggcttggaggcagcagaaagaattggttttccattgatgatcaaagcttctgaaggtggcggagggaagggaatccggaaggctgagagtgcggaggacttcccgatccttttcagacaagtacagagtgagatcccaggctcgcccatctttctcatgaagctggcccagcacgcccgtcacctggaagttcagatcctcgctgaccagtatgggaatgctgtgtctctgtttggtcgcgactgctccatccagcggcggcatcagaagatcgttgaggaagcaccggccaccatcgccccgctggccatattcgagttcatggagcagtgtgccatccgcctggccaagaccgtgggctatgtgagtgcagggacagtggaatacctctatagtcaggatggcagcttccacttcttggagctgaatcctcgcttgcaggtggaacatccctgcacagaaatgattgctgatgttaatctgccggccgcccagctacagatcgccatgggcgtgccactgcaccggctgaaggatatccggcttctgtatggagagtcaccatggggagtgactcccatttcttttgaaaccccctcaaaccctcccctcgcccgaggccacgtcattgccgccagaatcaccagcgaaaacccagacgagggttttaagccgagctccgggactgtccaggaactgaatttccggagcagcaagaacgtgtggggttacttcagcgtggccgctactggaggcctgcacgagtttgcggattcccaatttgggcactgcttctcctggggagagaaccgggaagaggccatttcgaacatggtggtggctttgaaggaactgtccatccgaggcgactttaggactaccgtggaatacctcattaacctcctggagaccgagagcttccagaacaacgacatcgacaccgggtggttggactacctcattgctgagaaagtgcaggcggagaaaccggatatcatgcttggggtggtatgcggggccttgaacgtggccgatgcgatgttcagaacgtgcatgacagatttcttacactccctggaaaggggccaggtcctcccagcggattcactactgaacctcgtagatgtggaattaatttacggaggtgttaagtacattctcaaggtggcccggcagtctctgaccatgttcgttctcatcatgaatggctgccacatcgagattgatgcccaccggctgaatgatggggggctcctgctctcctacaatgggaacagctacaccacctacatgaaggaagaggttgacagttaccgaattaccatcggcaataagacgtgtgtgtttgagaaggagaacgatcctacagtcctgagatccccctcggctgggaagctgacacagtacacagtggaggatgggggccacgttgaggctgggagcagctacgctgagatggaggtgatgaagatgatcatgaccctgaacgttcaggaaagaggccgggtgaagtacatcaagcgtccaggtgccgtgctggaagcaggctgcgtggtggccaggctggagctcgatgacccttctaaagtccacccggctgaaccgttcacaggagaactccctgcccagcagacactgcccatcctcggagagaaactgcaccaggtcttccacagcgtcctggaaaacctcaccaacgtcatgagtggcttttgtctgccagagcccgtttttagcataaagctgaaggagtgggtgcagaagctcatgatgaccctccggcacccgtcactgccgctgctggagctgcaggagatcatgaccagcgtggcaggccgcatccccgcccctgtggagaagtctgtccgcagggtgatggcccagtatgccagcaacatcacctcggtgctgtgccagttccccagccagcagatagccaccatcctggactgccatgcagccaccctgcagcggaaggctgatcgagaggtcttcttcatcaacacccagagcatcgtgcagttggtccagagataccgcagcgggatccgcggctatatgaaaacagtggtgttggatctcctgagaagatacttgcgtgttgagcaccattttcagcaagcccactacgacaagtgtgtgataaacctcagggagcagttcaagccagacatgtcccaggtgctggactgcatcttctcccacgcacaggtggccaagaagaaccagctggtgatcatgttgatcgatgagctgtgtggcccagacccttccctgtcggacgagctgatctccatcctcaacgagctcactcagctgagcaaaagcgagcactgcaaagtggccctcagagcccggcagatcctgattgcctcccacctcccctcctacgagctgcggcataaccaggtggagtccattttcctgtctgccattgacatgtacggccaccagttctgccccgagaacctcaagaaattaatactttcggaaacaaccatcttcgacgtcctgcctactttcttctatcacgcaaacaaagtcgtgtgcatggcgtccttggaggtttacgtgcggaggggctacatcgcctatgagttaaacagcctgcagcaccggcagctcccggacggcacctgcgtggtagaattccagttcatgctgccgtcctcccacccaaaccggatgaccgtgcccatcagcatcaccaaccctgacctgctgaggcacagcacagagctcttcatggacagcggcttctccccactgtgccagcgcatgggagccatggtagccttcaggagattcgaggacttcaccagaaattttgatgaagtcatctcttgcttcgccaacgtgcccaaagacacccccctcttcagcgaggcccgcacctccctatactccgaggatgactgcaagagcctcagagaagagcccatccacattctgaatgtgtccatccagtgtgcagaccacctggaggatgaggcactggtgccgattttacggacattcgtacagtccaagaaaaatatccttgtggattatggactccgacgaatcacattcttgattgcccaagagaaagaatttcccaagtttttcacattcagagcaagagatgagtttgcagaagatcgcatttaccgtcacttggaacctgccctggccttccagctggaacttaaccggatgcgtaacttcgatctgaccgccgtgccctgtgccaaccacaagatgcacctttacctgggtgctgccaaggtgaaggaaggtgtggaagtgacggaccataggttcttcatccgcgccatcatcaggcactctgacctgatcacaaaggaagcctccttcgaatacctgcagaacgagggtgagcggctgctcctggaggccatggacgagctggaggtggcgttcaataacaccagcgtgcgcaccgactgcaaccacatcttcctcaacttcgtgcccactgtcatcatggaccccttcaagatcgaggagtccgtgcgctacatggttatgcgctacggcagccggctgtggaaactccgtgtgctacaggctgaggtcaagatcaacatccgccagaccaccaccggcagtgccgttcccatccgcctgttcatcaccaatgagtcgggctactacctggacatcagcctctacaaagaagtgactgactccagatctggaaatatcatgtttcactccttcggcaacaagcaagggccccagcacgggatgctgatcaatactccctacgtcaccaaggatctgctccaggccaagcgattccaggcccagaccctgggaaccacctacatctatgacttcccggaaatgttcaggcaggctctctttaaactgtggggctccccagacaagtatcccaaagacatcctgacatacactgaattagtgttggactctcagggccagctggtggagatgaaccgacttcctggtggaaatgaggtgggcatggtggccttcaaaatgaggtttaagacccaggagtacccggaaggacgggatgtgatcgtcatcggcaatgacatcacctttcgcattggatcctttggccctggagaggaccttctgtacctgcgggcatccgagatggcccgggcagagggcattcccaaaatttacgtggcagccaacagtggcgcccgtattggcatggcagaggagatcaaacacatgttccacgtggcttgggtggacccagaagacccccacaaaggatttaaatacctgtacctgactccccaagactacaccagaatcagctccctgaactccgtccactgtaaacacatcgaggaaggaggagagtccagatacatgatcacggatatcatcgggaaggatgatggcttgggcgtggagaatctgaggggctcaggcatgattgctggggagtcctctctggcttacgaagagatcgtcaccattagcttggtgacctgccgagccattgggattggggcctacttggtgaggctgggccagcgagtgatccaggtggagaattcccacatcatcctcacaggagcaagtgctctcaacaaggtcctgggaagagaggtctacacatccaacaaccagctgggtggcgttcagatcatgcattacaatggtgtctcccacatcaccgtgccagatgactttgagggggtttataccatcctggagtggctgtcctatatgccaaaggataatcacagccctgtccctatcatcacacccactgaccccattgacagagaaattgaattcctcccatccagagctccctacgacccccggtggatgcttgcaggaaggcctcacccaactctgaagggaacgtggcagagcggattctttgaccacggcagtttcaaggaaatcatggcaccctgggcgcagaccgtggtgacaggacgagcaaggcttggggggattcccgtgggagtgattgctgtggagacacggactgtggaggtggcagtccctgcagaccctgccaacctggattctgaggccaagataattcagcaggcaggacaggtgtggttcccagactcagcctacaaaaccgcccaggccgtcaaggacttcaaccgggagaagttgcccctgatgatctttgccaactggagggggttctccggtggcatgaaagacatgtatgaccaggtgctgaagtttggagcctacatcgtggacggccttagacaatacaaacagcccatcctgatctatatcccgccctatgcggagctccggggaggctcctgggtggtcatagatgccaccatcaacccgctgtgcatagaaatgtatgcagacaaagagagcaggggtggtgttctggaaccagaggggacagtggagattaagttccgaaagaaagatctgataaagtccatgagaaggatcgatccagcttacaagaagctcatggaacagctaggggaacctgatctctccgacaaggaccgaaaggacctggagggccggctaaaggctcgcgaggacctgctgctccccatctaccaccaggtggcggtgcagttcgccgacttccatgacacacccggccggatgctggagaagggcgtcatatctgacatcctggagtggaagaccgcacgcaccttcctgtattggcgtctgcgccgcctcctcctggaggaccaggtcaagcaggagatcctgcaggccagcggggagctgagtcacgtgcatatccagtccatgctgcgtcgctggttcgtggagacggagggggctgtcaaggcctacttgtgggacaacaaccaggtggttgtgcagtggctggaacagcactggcaggcaggggatggcccgcgctccaccatccgtgagaacatcacgtacctgaagcacgactctgtcctcaagaccatccgaggcctggttgaagaaaaccccgaggtggccgtggactgtgtgatatacctgagccagcacatcagcccagctgagcgggcgcaggtcgttcacctgctgtctaccatggacagcccggcctccacctgaccgtggcccgcccagccactcccgggaccacggcaaaaggaaccacccagacccaccacccgtacaccctcagcagaccctgaagacttgcttttaaacaaagaaaatcctgggcacttctgcagggctgctggttccgagctgacacccgtcttaacaaaaggcccaggagtgcctcttccaaacaaaaacagcctcctctccatagctgggaagtttattttgttttgtctctgaagacagcagttttattgcatcactaaatctaatcaagctaaaacatccctgtttccttttgcaaaacagtgcctggcatgtgggatccaggcgttctttaggatccttggataccacatcgtgaaatcttttatttttttactctgagaccagcaccagatgtaagtaagcatctcatatatttcagccaaataaatgggccaagggaaaaaaatatatatatatagacaggactagagaaaacctatttttgtaatgatgtttctttggatactgtctagtcacccagaaaaatgtatggatgaatttttttttttttttttgagacaaagtctcactgtgtcatgcaggctggagtgcagtggcatgatctcactgcaacctccatctcctgtctcagcctcctagataactgggattacaggtgcccaccaccatgcccggctaatttttgtatttttggtagagacagagtttcaccaggttggtcaggctggtctcaaactcttgacttcaggtaatccacccaccttggcctcccaaagtgctgggattacaggcatgagccaccatcttcagccagatgatttttttattgagagagtgaaatgctattttgttccccaaatggcgctagtgaatcactaggagggtcccactgataggccatgtttagcactggttgccagggattctctttttgagagagggaaagcaaaatgaatggaagtacccagctggaggtttcagggcttctggaggatgctctcgcatagctcgaggtcctctgcccacctcttctctccaaggaaaatgaggactgccccttccccctgcaggattggcccccagcctgcgcatgcaccctcctcttgcccaagtggggagcacagaggcggagaggaatcccttaccacacccacggcccagcttgctcacgagtgtcacctctgtgacggtcaccactgctcccttggagggccacttgagttactgttgcttcctcgcctgctggcttgatgagcaccgatggtgggatctgaccccgaggggcagagctgtcggtgactgaggactggactgtggtgaccatgccgatttgctcagggagaacgttgcaatgcacccagcagctcctggctctgcaggcggcacagcctggggccctgtgatcctctggtttcttccattggggcggagtcggggatggagggagctggccacaacccactgctctgatgggtggtttgtccaaggatgctgaatgtaatgcctggtcaatgtggaagcccatgaggttgcccagggaagcctccaaaagctgggatgcttgagggtatccaagttgaaaaagacaaaatctgaccatcagccagtgacagtcctggcaaatgaaggtggggcggggcagtgaggggtgggagaaggtgaatgattcattattccaccccgaggtttgctggggtgaggggaagaatcgatgctgctttgggaactgaaggtttttctgttgggaaggccctcttggttttggagagaaagacaagttatgagtagctgctaccctggaacggtgggcagagagcctactaggaaatgtgcagaataaactattttttgaaggaaaaaaaaaaaaa

SEQ ID NO: 97 - DNA, 6243 bp, Homo sapiens
acttccgctgtcccgcgaagggcggggggagcgaactgttgtggtgcggagcgttcggcgggcggcggccgggcggcccaggggctgccgcgggactcggggcgcagccgagtggctgcaggggtggagtgggccggacgagccgcggggcccgggtgccgcgggttcgaggccgggccccgcgcgaggaggccgcgccaccccgggggagctgcccggcagcgagtttgccccgctgccgaaagaaggcgggagccggcaggggccttcgaaaccccctggcaacccaggcccggagtccttggggagcggctgtttcctgggacgccctcccggacacccccgctgcagggttacggttctgggcccccggcagaaggctcctccgggtgacccccggcggggccctgcgagccgcgggagccgaccccggggcctcgagccgggaggaagggggcttccggaggcggagggccgggggccgagggagccgggcctctcggacgcggggcagggcagcgcccgggctggagacggactctgggaccctcggctgcgggggtctcagcgacctgccccgcggcaagcgcggccgcggagtggcctaccggggaccctcccccagagggaccggcccggggcggggagatgaacggcttcagcacggaggaggacagccgcgaagggccccccgccgccccagctgccgccgccccgggctacggccagagctgctgcctcatcgaggacggcgagcgctgcgtccggcccgcgggcaacgcctccttcagcaagagggtccagaagagcatctcgcagaagaaactcaagctggacatcgacaagagcgtaaggcacctatatatctgtgattttcacaaaaatttcatccagagtgtccgaaataaaaggaagaggaagacaagtgacgatggcggagattctcccgagcacgacactgacattcctgaggttgatctgttccagctgcaggtgaacaccctacgacgttataaacgacactacaagttgcagaccagaccaggcttcaataaggcccagttagcagaaactgtgagtcgacacttcaggaacatacctgtgaatgaaaaagagacccttgcctacttcatctacatggtgaagagtaacaagagtagactggaccagaaatcggagggtggcaagcagcttgagtgaggatgaagcacatcttaaaggaatgaagtgtaatgcttgatgcacaggtgatatctactacatttaagcccataaagactgttaaatattattgtaaataaaaaagtttgaatgatgaatactgtaaatctttttggtcaggaggattatattctcatgattcagcatgtgtatagaaagactttcttttacgataactctggactaaaaaaatcaggatcattaaaagaattaaaaactatgtatttcagcattcaacaaagcattaaatcaattctactggaaatgtgggataagaaatattttggtaatcaccttatccaccaggctgccacgtgtgagctgtagcttggaatagcagcaaggtgcaattggccatggaagtgcatgagcagacccacatctggacttgcatgctgcccgctggcgacatagatatcccgcccgctttgttgcaagctttgtcatttatcagcagatcagtttgacactggtccccctcactcaccctgtgccttgtacacagtaggcactcaatcagtaggtattggctaattgagctgtcactaatagtgccagccttgtaacatccgcttcacacctctcatgactgagacctctgccatttctgttgctcaccacttaactgctagaatgtggaggaaatcctgatgcaccaacaaggaagtttctgatcagataaggatttcaggacagttgcatgtgcaaaactattcgttgaggttccagaaacactgatatagagaccctcacagaagatacggtcccttatgcaccccactatgcttcactctttggggtgcagttagatattatgacttcagccaagcttcttggtaataaatgcattgacacactgacatatttagtaggttggggcaagtatttttagaagttttcatcctaagttcacaaccaccatgcaagctgccaggggccatgtgattcctgcccagaagttcagcttaggattgaaagtctggctggccttgactccctgggctctggtcatcagcaaatcatgagtttgggcaacaaaggtcaattccatctgatgctcatttttgtgaacaatttgcctccctcttagggagaaagattgctaaaataatttttgaaaattacctaatttttttgttgttcaaaacgttgaactcctcaatctaattatatcagagccaaagtatcctgtgaaaacaaagctttatatccaaaaatgtgcttttgcaaaattctttaatctgtgtaatggagggcagagggtatggggtaggagggtgggagaaagaaaagaaaagaatttggattctaatttatgaccatcttgacatatggtcaaaggtgtcattttcctactcagtttcaattctgagttaatttcttaagccttaaataataagaacaatggacagcctggcctggcagagagtttcacagatgacttaatctgagcaccatcacagagaagtcaggactaaaccccctactgagcagggcggcggagtgtccaaaggtctcagttctgtggagcagagtaccacgctttctgtggaatggggacagggtcaccacgctcactaaaatgcagtatgttccattgcagcaaagctttcgcctgtgttcaaaatgcatgtctagcagattgcagccttttaaattaaatatatataaatggttgtatatagaatatactctggactgtgagggcatcctattttggtatgcctcctggctgtggatggcatgtccagtgctctgtgagtgttttcagtcattcacattcactatgtgtttagagattctctccctgcttacagctgaaggatgttgatacaggcatcaagaaggctgaggggcagatggggcctgcaggttaaggcattgttaacttgctccatggaaatgtccatatcttaatgagtaaaaaagtgtatttttctgatacgtaaaccagaattgtgggcgtgtaggtcacatcactatttctttagcagcaaatctgttttcccagttgagagagacaatagcttctgcacaagaatatatgatggtaggatccatctgttcaattgtgtctgaaagaatctttattccaaagcgaaacctggggaaatgttttaccttcagccagatgctgtgtgtgtacttgggtcccttgtctttcctctaaggagaggtgcttgtggaaagtggaggttgtgggcatcttttcaaccttttcaatctgacctttcaacaggtcaggtgagagaaaagacaaagctatttgaacctatgtttttcttatgtccagaaatctgttctttcatcaaaccactaaaccactcgccttagcctcttctgcagtttctggtggctctatctgtgggcaagggactcctgcctgtgagaagtggccaggccctccagagcaacggggtctggcttcagggagcagtggggtgtggggaaagcaatgttcatcttggctgctccatttttataccatccatcaaggactcttgcgcttctctccacctgtgacgtagcagcattgccttctttcctcttggtgcttctgggcaaaactggaatttgaaatccagaactggcgttgtcttcttaaagagtatggttcctgcctcagttccagcctggtatggttctttgatatgccctgaaggttctcacatggaaacatcagtatcctgccattcatgttgttttaagatgttttaaaaaccaatggacaaacttcttgcttcaaggaacaaactcttaggttggcaacagcatataaaaaaaaagatcacagctgaatctcatgaaagattaaaaaccaaaggattcaagaccggtgttgtaaaatgaagaggaattttacttacatgttacagctgccaagtttttagatgttcctgtcatagctaaatagtcactgctagcctttcagagaacagatagtaacaattgtttgcagctgcagtgttgcatctaattttggtgtttaggctttttattttgtgggaagctttttgttaatatcctgcagggcaactgcctgttgggagggagaggatggaagaaggagcttactctgggggccttgcctattgagggaggctgttgcccagagcagttgcttcatggaagtcatccaaaggcgctctcagtcattacaatgacaggatctcaaagttgggaaagggctgttaagtcatccagtctagtctccacataggtgctgacattctgcctacaaccatcccaccaaggggttgagcagtctggacttaaacacctccgaggacagagaacccactacctcgtggagaagcctgttctttgtaaacctctggcttttctatgttctctgtaatttccatcttagtctctgccccatgggggccacatgggacaagttatttttggcaaagcacctaattgctggcactgtcccaaagcatagcgtttgccttttggaaagaaacaatgctaggacatggacactttggtacactgtccttacccctgagtattagtccactcagttccttgttggagaatgttgagaaaaccctactggctggcttgtttctgccaaagcttggggagaggagagggggatgagaagatgttagcagcctgctaaacctcagacagatgaggactcagttctgtgcttgccccacaaaaacggatgctcacatcatcaggaaattgttcagctggaggatttataacttcgttgctttgcatgaagtttaaagttttcatggttgcccagggcttgtaccttagattcctgtaaggactttgcactgtttttgctgagaaaacaacgcttcaggacttaaggtctaagcgtcagagaagtgccgtattttcaaggtggaaagtctgttaagcttgctgttgtccaatcatccgtttttagagatggggaaactaaaactcaaaaagatgtgcctgaggtcatatggcattatcagaaccaacctctggccctcttgacctgtctagcattctttctttctgacctataggatgactctaattcagtctaaatcggctgccctcagattcttgagaacttaaaattgagcagaaattcccaaggccaacctagctctcagggaccaacctgcagaactcaagattgagcgaaatgtttaggccagttgagttttgcaaaatgagtggtaagggaaaacagatctagcctgttatttaaaaccagggttcaaaagccctattgggagaggtagtattgtcctagcatttaaattctcatgaaatgtgcttggtctgtgatctcttggtcagatatctgccttccaggcgatcctttgaggttgtgtaattcagctggccctggctcctggtccctgttactgagctgggcagtcgaaccgaagggcagatgagctcaagatcatgccttgggaagcatggtgctctaggggtgcctttttattcctttcattgtattatagactgtttccaagtttatggttagaaatggtaaagtgggtctggtgttttgaggtagaacccagcctagggcaagatatgaactgttcttgaggtagaaatgtctacagtcagttgtttcatctagcttgcatcttaaaacacaaacccttcagttgctttcacttaatgcacacatttgccaatgacagagggttatacaggatccttcttttacatttctattgtctgctacgctcatcagagtatattttggggtacaaggttttgggggttttttttcccattttgtaactgccttattgaaaagtaagtgcccttccattccaggcctcctcatattgtacttgtttcctgccaaatctgggggatcatttgtattttaacttcgtaatctatggctctgtactgttgaaaggctctcaattctgtggggtctccttagtatgtatgtgacttttcatgttgcaatatcacacgatgggatggcccgacttttgctcttaataaataatctgaatgagtaagagaaaaaaaaaaaaaaaaaaa

SEQ ID NO: 98 - DNA, 1068 bp, Homo sapiens
ctcgacctccttttaaaaattctcttagccacgttgattgtacgggaaaagcctttttaaaacatcttttacgttgcttaaacctacagtttcgaaagcattccgaaggctaaagtgagaaataagcccaggctagggagaggagaaacgaagttcacgtcctagtctggcaccgggttggattgtcgctgggacggcagtcaggcatttggtgtggtcgcctaaggggtgggtccttcggcgggagctccgggaaaccccgtgggcctgcgcggcgttcttccttttcgatccgccatctgcggtggagccgccaccaaaatgcagattttcgtgaaaacccttacggggaagaccatcaccctcgaggttgaaccctcggatacgatagaaaatgtaaaggccaagatccaggataaggaaggaattcctcctgatcagcagagactgatctttgctggcaagcagctggaagatggacgtactttgtctgactacaatattcaaaaggagtctactcttcatcttgtgttgagacttcgtggtggtgctaagaaaaggaagaagaagtcttacaccactcccaagaagaataagcacaagagaaagaaggttaagctggctgtcctgaaatattataaggtggatgagaatggcaaaattagtcgccttcgtcgagagtgcccttctgatgaatgtggtgctggggtgtttatggcaagtcactttgacagacattattgtggcaaatgttgtctgacttactgtttcaacaaaccagaagacaagtaactgtatgagttaataaaagacatgaactaacatttattgttgggttttattgcagtaaaaagaatggtttttaagcaccaaattgatggtcacaccatttccttttagtagtgctactgctatcgctgtgtgaatgttgcctctggggattatgtgacccagtggttctgtatacctgccaggtgccaaccacttgtaaaggtcttgatattttcaattcttagactacctatactttggcagaagttatatttaatgtaagttgtctaaatataa

SEQ ID NO: 99 - DNA, 1229 bp, Homo sapiens
aattggcgaaggcttcgcccgacgccggaactgcgagctctcagcgggagccgagacggtgcagggccggagaagcaccttcactcccagcctgcgccccgatgctgcgcgttctgtgcctcctgcgcccctggaggccccttcgggcccgcggctgcgcttccgacggggcggccgggggctcagagatccaagtgcgcgccctggcgggtccggaccaagggatcactgagattctgatgaacagaccttctgcccgcaatgccttggggaatgtcttcgtcagtgagctgctggaaactctggcccagctgcgggaggaccggcaagtgcgtgtcctgctcttcagaagtggagtgaagggcgtgttctgtgcaggtgcagacctgaaggagcgggaacagatgagtgaagcagaggtgggggtgtttgtccagcgactccggggcctgatgaatgacatcgcttcctcggcagtcatgggactgattgagaccacgcgagggctcctcccgggggcaggagggactcagaggctgccccgttgtctgggggtggccctggcgaaggagctcatcttcacgggccgacgactgagtggaactgaggcccacgtactggggctggtgaatcacgctgtggcccagaacgaggagggggacgccgcctaccagcgggcacgagcactggcccaggagatcctgccccaggcccccattgccgtgcggctgggcaaagtagccattgaccgaggaacggaggtggacattgcatctgggatggccattgaagggatgtgctatgcccagaatattccaacccgggaccggctagagggcatggcagccttcagggagaagcggactcccaaatttgttggcaaatgacccccattttaaccttcagcatgggagatgcatgccctgaagagcaggatccagaaggaagatttgtggccagattgccttcatcatttcacctctccagacttccatttcttcacaaggatgatgatggaaataaaatgactggcgtgatgcctggaaccaaggtgctgatcctaccacctactgctaccttccttagcttcaccctggctagaaataatcacgagggttgggtttgctttggaaaatgcctgtctctctacttgaatgataaagaattaaattagaaaaaaaaaaaaaaaaaaaaaaaaaaaaaaaaaaaaaaaaaaaaaaaaaaaaaaa

SEQ ID NO: 100 - DNA, 1289 bp, Homo sapiens
tttctttcggagcggcggtgaaggtcctgggtgaggtagggttggatggtgcttgccgcgtatcatggctgcctccggaaaactcagcacttgccgtctccctccgttgcccacgattcgagaaatcattaagttgttaagactgcaagcagcgaagcagctatcacagaatttcctcctggacttgaggctgacagataagattgtaaggaaagctggcaatctgacaaatgcttatgtttacgaagtgggccctgggccagggggaatcacaagatctattcttaatgccgacgtcgctgaacttctggtggttgaaaaggacactcgatttattcctggattacagatgctttctgatgcagcacctgggaaactgagaattgttcatggagatgtcttgacatttaaggtagaaaaggctttttcagaaagtcttaaaagaccctgggaagatgatcctccaaatgtacatattattggaaatctgccttttagtgtttcaactccactgattatcaagtggcttgaaaatatttcctgtagagatggaccttttgtttatggcagaactcagatgactttgacttttcaaaaggaagtggcagagagacttgcagccaatacaggaagcaaacagcgtagtcgcctctctgttatggctcagtacctctgcaatgttcgacacatctttacgattccaggacaagcttttgtccccaaaccagaggtggacgtgggcgtggtgcacttcactcccttgatacagcccaagatagagcagccattcaagctggtggaaaaagtggttcagaatgtatttcagttccgaaggaaatactgccatcgagggctcagaatgttattccctgaagcgcagcgcttggaaagcacgggcaggctgttagagttggcagacatagaccctactcttcggccccgccagctctccatctcacactttaagagcctctgtgatgtatacagaaaaatgtgtgatgaagacccacaactctttgcatataatttcagagaagaactcaagcgaagaaaaagcaaaaatgaagaaaaagaagaggatgacgcagagaattacagactctagctgctgcctgggggcgagcagcctaccagatgtcgatttgcactacgtggagcttcttatataggtactcttttgtctttacagaatgacgatacaaatgccaatgaccagatgtgacttattttccttttactatacagcttggcagagaaaataaatatcatcaaataagatacagtaaaaa

SEQ ID NO: 101 - DNA, 1378 bp, Homo sapiens
actgggtgggcgcgtcggaaagaccagggcgcctcagtctggagctcgcagtcgtatggagagggcaggaccagccggggaggagggcggcgcgcgcgagggtcgccttcttcccagggcaccgggggcgtgggtgctgcgggcgtgcgccgagagggcagccttggaagtgggcgcagcttcggcagacacaggcgtgaggggctgcggagctcgagggccggcgcccctgcttgcctctgcgggaggtgggcgcgcccgggacggaacctggggcgtcagaacgaaaggcagcggcgccgcgcttcccagccggccagcctcccgcgcagcgccccggccggaagcctcctcgccgccgcttcctctcgagaaggcgcggggcgggctgtccggcccgcagggcggtcgagcccgcggcgccatggctcacgtcggctcccgcaagcgctcgaggagtcgcagccggtcccggggacgggggtcggaaaagagaaagaagaagagcaggaaagacacctcgaggaactgctcggcctccacatcccaaggtcgcaaggccagcacggcccctggggcggaggcctcaccttctccctgcatcacagagagaagcaagcagaaggcccggaggagaacaagatccagctcctcctcctcttcttccagttcttctagctcctcttcttcctcctcgtcctcctcctcttcctccagtgatggccggaagaagcgggggaagtacaaggacaagaggaggaagaagaagaagaagaggaagaagctgaagaagaagggcaaggagaaggcggaagcacagcaggtggaggctctgccgggcccctcgctggaccagtggcaccgatcagctggggaggaagaggatggcccagtcctgacggatgagcagaagtcccgaatccaggccatgaagcccatgaccaaggaggagtgggatgcccggcagagcatcatccgcaaggtggtggaccctgagacggggcgcaccaggcttattaagggagatggcgaggtcctagaggaaatcgtaaccaaagaacgacacagagagatcaacaagcaagccacccgaggggactgcctggccttccagatgcgagctgggttgcttccctgagggcccccgctggccaaggcctgtggacgacgctggcggcccagcctgggcaggtttcagggtgccagtgggaagcctgatgggtgctggtggcctttcccccgtggattggtctctggcccagcccagtctcttctcaggggcagggggtggaggttggggtcaccggcctgcttggcacccccatctgaaagagcagcacttctcagctattaaaggccccctggatagactttcaaa

SEQ ID NO: 102 - DNA, 2503 bp, Homo sapiens
aggtcaggggcgtggcgaaggtcgctgctttcctgctacaacgggcctactttagctaaaacagaaacgtaaggccaggacgggtcaccctttgtgggcccctgaaaaatacaaaacgaagtttggagagagttgaaaggcgtttgggctgaccatggagatttttgtttcccaccctcctgcgaaagcgttcgcgctgccattggctctggctgagggcgagtccggaacctgtgcgccgcggaactttcggctctgaaatccaacttgcgctgggcgcatctttgccgcgcggtttccgggcggctcccttcccttgcatgctgcattgtgtcgggagttgctgacagccatggcgccgcaggtctggcgtcgacggaccctggagcggtgtctgacggaagtcggcaaagccacgggtcggcccgagtgcttcctcacgattcaagagggattggcatcaaagttcacttctttaacaaaagtgctttatgactttaataaaatattagagaatggtaggatccatggaagccccttgcaaaaacttgtgatagaaaattttgatgatgagcagatttggcaacaactggaattgcaaaatgaaccaattttacaatactttcagaatgcagttagtgaaacaattaatgatgaagatatcagtcttctcccagagagtgaagaacaggaacgtgaagaggatggttcagagatagaggctgatgacaaggaggacctagaagatttagaggaggaggaagtgtccgacatgggtaatgatgatcctgaaatgggtgagagagctgaaaactcaagcaaatctgatctgaggaaaagccccgttttcagtgatgaggattctgaccttgactttgatatcagcaaattggaacagcagagcaaggtgcaaaacaaaggacagggaaaaccaagagaaaagtccatagtagatgataaattcttcaaactctctgaaatggaggcctatttagaaaacatagaaaaagaagaggaacgaaaagatgataatgatgaggaggaggaagatattgatttttttgaagatattgattctgatgaagatgaagggggactgtttggaagtaaaaaacttaagtcaggtaaaagttccagaaatctgaaatacaaagatttttttgatccagttgaaagtgatgaagacataacaaatgttcatgatgatgagctggattcaaacaaagaagatgatgaaattgctgaagaagaagcagaagaactaagtatttcggaaacggatgaagatgatgaccttcaagaaaatgaagacaataaacaacataaagaaagcttgaaaagagtgacctttgctttaccagatgatgcggaaactgaagatacaggtgttttaaatgtaaagaaaaattctgatgaagttaaatcctcctttgaaaaaagacaggaaaagatgaatgaaaaaattgcatctttagaaaaagagttgttagaaaaaaagccgtggcagcttcagggggaagtgacagcacagaagaggccagagaacagcctcctggaggagaccctacactttgaccatgctgtccggatggcacctgtgattacagaggaaaccacccttcaactggaagatatcattaaacagaggataagagatcaggcttgggatgatgtagtacgtaaagaaaaacctaaagaggatgcatatgaatataaaaagcgtttaaccttagaccatgagaagagtaaattgagccttgctgaaatttatgaacaggagtacatcaaactcaaccagcaaaaaacagcagaagaagaaaatccagaacatgtagaaattcagaagatgatggattccctcttcttaaaattggatgccctctcaaacttccactttatccctaaaccgcctgtaccagagattaaagttgtgtcaaatctgccagccataaccatggaggaagtagccccagtgagtgttagtgatgcagctctcctggccccagaggagatcaaggagaaaaataaagctggagatataaaaacagctgctgaaaaaacagctacagacaagaaacgagagcgaaggaaaaagaaatatcaaaagcgtatgaaaataaaagagaaggagaagcggagaaaactgcttgaaaagagcagtgtagatcaagcagggaaatacagcaaaacagtagcttcggagaagttaaaacagctgaccaaaactggcaaagcttccttcataaaggatgaaggtaaagacaaggccttaaagtcctctcaagcattcttttctaaattacaagatcaagtaaaaatgcaaatcaatgatgcaaagaaaacagaaaagaaaaagaagaaaagacaggatatttctgttcataaattaaagctgtaatatattttgaatataatgtaaatattaatgtgtaagcttatattgtgtcattgttctgttttataataaaattcttgagaaccttaaaaaaaaaaaaaaaaaaaa

SEQ ID NO: 103 - DNA, 2900 bp, Homo sapiens
agtgtcgtgtaaacagtgtccttccgcgcggcggccgcggagagagctgcggcccgggggggcgtgcctgggatccggagcttcgctcgggcccgggaaaggcggcagtgggctgggatcgcggtgtctctgggtgtgatggccaatggctggactggctcccgccctgggcggaggaatcccgagctgtgaagcggctggaatccgggcccatgtgcttctttgtttactaagagcggaagcgatggcgggagcgggggtggggtgcggtggcggggtgcggtggcggaggtcccggtgaaatcaggggctaaggggacccaaagaaggcgggggatcataggggtggaaagaaagctgagaaccttgagaccggagtgtgaggggccaacggggaagggcgctagaattttaaactaaagtagggaccggaattcccctggggagatgttggatggccctgtgcactgccacgggctctttattcttcgctggttagaaacagacttgtgaaaaagagttatgcccactttggggagacttcgaaaaggttaagaagttcttacaagagttctaccaggatgatgaactcgggaagaagcagttcaagtatgggaaccagttggttcggctggctcatcgggaacaggtggctctgtatgtggacctggacgacgtagccgaggatgaccccgagttggtggactcaatttgtgagaatgccaggcgctacgcgaagctctttgctgatgccgtacaagagctgctgcctcagtacaaggagagggaagtggtaaataaagatgtcctggacgtttacattgagcatcggctaatgatggagcagcggagtcgggaccctgggatggtccgaagcccccagaaccagtaccctgctgaactcatgcgcagattgtgagtggtctctgtcgggaaagatgtagggattggttctccaggatcttgtttgtgactgttttctccccttagtgagctgtattttcaaggccctagcagcaacaagcctcgtgtgatccgggaagtgcgggctgactctgtggggaagttggtaactgtgcgtggaatcgtcactcgtgtctctgaagtcaaacccaagatggtggtggccacttacacttgtgaccagtgtggggcagagacctaccagccgatccagtctcccactttcatgcctctgatcatgtgcccaagccaggagtgccaaaccaaccgctcaggagggcggctgtatctgcagacacggggctccagattcatcaaattccaggagatgaagatgcaagaacatagtgatcaggtgcctgtgggaaatatccctcgtagtatcacggtgctggtagaaggagagaacacaaggattgcccagcctggagaccacgtcagcgtcactggtattttcttgccaatcctgcgcactgggttccgacaggtggtacagggtttactctcagaaacctacctggaagcccatcggattgtgaagatgaacaagagtgaggatgatgagtctggggctggagagctcaccagggaggagctgaggcaaattgcagaggaggatttctacgaaaagctggcagcttcaatcgccccagaaatatacgggcatgaagatgtgaagaaggcactgctgctcctgctagtcgggggtgtggaccagtctcctcgaggcatgaaaatccggggcaacatcaacatctgtctgatgggggatcctggtgtggccaagtctcagctcctgtcatacattgatcgactggcgcctcgcagccagtacacaacaggccggggctcctcaggagtggggcttacggcagctgtgctgagagactccgtgagtggagaactgaccttagagggtggggccctggtgctggctgaccagggtgtgtgctgcattgatgagttcgacaagatggctgaggccgaccgcacagccatccacgaggtcatggagcagcagaccatctccattgccaaggccggcattctcaccacactcaatgcccgctgctccatcctggctgccgccaaccctgcctacgggcgctacaaccctcgccgcagcctggagcagaacatacagctacctgctgcactgctctcccggtttgacctcctctggctgattcaggaccggcccgaccgagacaatgacctacggttggcccagcacatcacctatgtgcaccagcacagccggcagcccccctcccagtttgaacctctggacatgaagctcatgaggcgttacatagccatgtgccgcgagaagcagcccatggtgccagagtctctggctgactacatcacagcagcatacgtggagatgaggcgagaggcttgggctagtaaggatgccacctatacttctgcccggaccctgctggctatcctgcgcctttccactgctctggcacgtctgagaatggtggatgtggtggagaaagaagatgtgaatgaagccatcaggctaatggagatgtcaaaggactctcttctaggagacaaggggcagacagctaggactcagagaccagcagatgtgatatttgccaccgtccgtgaactggtctcagggggccgaagtgtccggttctctgaggcagagcagcgctgtgtatctcgtggcttcacacccgcccagttccaggcggctctggatgaatatgaggagctcaatgtctggcaggtcaatgcttcccggacacggatcacttttgtctgattccagcctgcttgcaaccctggggtcctcttgttccctgctggcctgccccttgggaaggggcagtgatgcctttgaggggaaggaggagcccctctttctcccatgctgcacttactccttttgctaataaaagtgtttgtagattgtc

SEQ ID NO: 104 - DNA, 8339 bp, Homo sapiens
ctgcggctggggctgggggcggcggcggcggcgacgcgggcggcgggcggcgcggggcggtccggcgggttcaaagaggaaaacatggcggaaaacaaaggcggcggcgaggctgagagcggcggcgggggcagcggcagcgcgccggtaactgccggggccgccgggcccgccgcgcaggaggcggagccgcctctcaccgcggtgctggtggaggaggaggaggaggaaggcggcagggccggcgctgagggcggcgcggccgggcccgacgacgggggggtggccgcggcctcctcgggctcggcccaggctgcttcatctcctgcggcctcagtgggcactggagttgccgggggcgcagtatcgacgccggctccagctccagcctcggctcccgctccgggtccctcggcagggccgcctcctggaccgccagcctcgctcctggacacctgcgccgtgtgtcagcagagcttgcagagccggcgtgaggcggagcccaagctgctgccctgtcttcactccttctgcctgcgctgcctgcccgagccggagcgccagctcagcgtgcccatcccggggggcagcaacggcgacatccagcaagttggtgtaatacggtgcccagtatgccgccaagaatgcagacagatagaccttgtggataattattttgtgaaagacacatctgaagctcctagcagttctgatgaaaaatcagaacaggtatgtactagttgtgaagacaatgcaagtgcagttggcttttgtgtagaatgtggagagtggctatgtaagacatgtatcgaagcacatcaaagagtaaaatttactaaagatcacttgatcaggaagaaagaagatgtctcagagtctgttggagcatctggtcaacgccctgttttctgccctgtacacaaacaagaacagttgaaacttttctgtgaaacatgtgatagattgacatgtagagactgtcagctattggaacacaaagaacataggtatcagtttttggaagaagcttttcaaaatcagaagggtgcaattgagaatctactggcgaaacttcttgagaagaagaattatgttcattttgcagctactcaggtgcagaataggataaaagaagtaaatgagactaacaaacgagtagaacaggaaattaaagtggccattttcacccttatcaatgaaattaataagaaaggaaaatctctcttacaacagctagagaatgttacaaaggaaagacagatgaagttactacagcagcagaatgacatcacaggcctttcccggcaggtgaagcatgttatgaacttcacaaattgggcaattgcaagtggcagcagcacagcactactatacagcaagcgactgattactttccagttgcgtcatattttgaaagcacggtgtgatcctgtccctgctgctaatggagcaatacgtttccattgtgatcccaccttctgggcaaagaatgtagtcaatttaggtaatctagtaatagagagtaaaccagctcctggttatactcctaatgttgtagttgggcaagttcctccagggacaaaccacattagtaaaacccctggacagattaacttagcacagcttcgactccagcacatgcaacaacaagtatatgcacagaaacatcagcagttgcaacagatgaggatgcagcaaccaccagcacctgtaccaactacaacaacaacaacacaacagcatcctagacaagcagcccctcagatgttacaacaacagcctcctcgattgatcagtgtgcaaacaatgcaaagaggcaacatgaactgtggagcttttcaagcccatcagatgagactggctcagaatgctgccagaataccagggatacccaggcacagcggccctcaatattccatgatgcagccacacctccaaagacaacactcaaacccagggcatgctggaccctttcccgtagtatcggtacacaacaccacaatcaacccaacgagccctactacagcaactatggcaaatgcaaaccgaggtcccaccagcccatctgttacagcaatagagctaatcccctcagttaccaatccagaaaaccttccatcgctgccagatattccacccatacagttggaagatgctggctcaagtagtttagataatctactaagtagatacatctcaggcagtcacctacccccacagcctacaagcaccatgaatccttctccaggtccctctgccctttctccgggatcatcaggtttatccaattctcacacacctgtgagacccccaagtacttctagtactggcagtcgaggcagctgtgggtcatcaggaagaactgctgagaagacaagtcttagtttcaaatctgatcaggtgaaggtcaagcaagaacctgggactgaagatgaaatatgtagcttttcaggaggtgtaaaacaagaaaaaacagaggatggcaggaggagtgcttgcatgttgagcagtcctgagagtagcttgacaccacctctctcaaccaacctgcatctagaaagtgaattggatgcattggcaagcctggaaaaccatgtgaaaattgaacctgcagatatgaatgaaagctgcaaacagtcagggctcagcagccttgttaatggaaagtccccaattcgaagcctcatgcacaggtcggcaaggattggaggagatggcaacaataaagatgatgacccaaatgaagactggtgtgctgtctgccaaaacggaggagatctcttgtgctgcgaaaaatgtccaaaggtctttcatctaacttgtcatgttccaacactacttagctttccaagtggggactggatatgcacattttgtagagatattggaaagccagaagttgaatatgattgtgataatttgcaacatagtaagaaggggaaaactgcgcaggggttaagccccgtggaccaaaggaaatgtgaacgtcttctgctttacctctattgccatgaattaagtattgaattccaggagcctgttcctgcttcgataccaaactactataaaattataaagaaaccaatggatttatccaccgtgaaaaagaagcttcagaaaaaacattcccaacactaccaaatcccggatgactttgtggccgatgtccgtttgatcttcaagaactgtgaaaggtttaatgaaatgatgaaagttgttcaagtttatgcagacacacaagagattaatttgaaggctgattcagaagtagctcaggcagggaaagcagttgcattgtactttgaagataaactcacagagatctactcagacaggaccttcgcacctttgccagagtttgagcaggaagaggatgatggtgaggtaactgaggactctgatgaagactttatacagccccgcagaaaacgcctaaagtcagatgagagaccagtacatataaagtaaaatgacatggatttaaatcaattgtttaaaaaaaaaaaaacgaaaaaaaaaaaaaaaacacaaaaaacccagaaaacttttaagtgttgctggaatatcctgcctacagtgggcacctccttgaagaagctgatagcttttacacagtattagattgaaataatggacagaaacacattcttgtcaagaaagggggagagaagtctgtttgcaagtttcaaagcaaaaagcaaaagtgaaatgatttgaggatttctgttctaatggagatgattctctgattgttagaaatggcaaatattgatgattgtgtgctattgattggtgcaggatacttggtatacgagtaaatacttgagactcgtgtcacttgataaattttctttttggactaggtcgcacagttattaaaacaacttttaaccctcccccttcacacacatacatatcaggttgttttctagttaaaaacccaagtagctcagattctactttaatgtcagtgcagatttgcattgaatcatgccattatgttttttctcatttttatgctgttgggtcttagtttttaaattgatataaagaactcagcaatggttttattttctactcatacttagggtttaggaaacactaccactagttatcatttaatcaacttcaatggtctactgaaacaaaaatggtaacttttcattagtggattatttagagttatagtagttgtttccagaaaacacttcctcacaattgtacttcccaatcaaatcatgtgatcatacagttattcccatgaaaggcagaatgtttgtttcaaaattaatctagttttctgtacatttaaatttgagaaggtgacaactggctcttttccagtcttccttcatgtcagttttctgatagaccactattggcaaacagtatctgtcaactaccaaatgtgtaaaattttctgtatttcactttgtcttatttgtaaatagtgaactaaaacttttggcagatcagcaacatttgctgagcctgttttttaagctaatgtgtattcttactaatgttcctatcaagaatggatttgtaatatatgctgtctatttctaatgttcacattcatattttgaggttctatcttattttaatagagaacagacttctcaaaaaatcttcagaagcagcttattattgaaatatcgaaatattgaaataaacccggtggggttagattactcatctgtccaccaagtgggacatttgcatggactgggggcttaaaggacttagaagagacctgtaagtaaatcctgaaaatgagccaatccccacttgaatggttactggagtaaacccacctttaccaccccaattacagcacccgaggccgataaaccaacttggctctggttcatttttcttttcttcatttgtgatgctcagattcaaaatgtgtgttctacactgttacaggcttctcttttgtttgattaaagattttagtcctacttttgtatggacacattagaatattcagagaccaaaatagaagaatttgctgttagatatttttcagaagtcagcagatttgtggcaaatcatttatttgcctttttaaaaattcatttaagcagttcagagagtagactactcagaaaattatttcacgtaattgtctaagaggtcaatattttttaatgcatattgaatcaaataaagtgctctaaagaaattattatacaaattcctttgggttgtttttcttttcttaacaaggggtgggggtaaacaggaatatgattcaggctttctggttgtgtatttaaagagtattgattttattattactattgatttactttattcctggcttccttttcacttttctttcaatttttaaaaaataatttaagccgttgaaaatataccaaactgttgaaacattttactcaaattttaaattcctaaaaatgttttttaataagagggagaaaattatttaaaaatacttatgcctatgccaatttccctcttttttcacaaaatccatgatttcagtttgtaagtagacatatatctaagggcacatttttggaaagtgaggaatagcagcagtataacttcattttgtcaggcctttgagttctaatattttgtattgctcttcaaatggatccttttaaaaaaattgtagataatgagtcataaatagattctgccaactgaggggagaaacattttaagtaaatatttttcagtatttggggccttaaaaaataattgtgtttccttaaaattacatgttagatagagtttttaggtttttttggttttaagattggttaaagcaatttaaaagccacttttttgtcaacatttaatagcctccacttctgttaagataatgtatactgctgaggaattactattaatagctatcaacataccaccattaaattaaggtattcactttagattttttattaaagcttttttcttgcacactgatcgttgtgtttctaagctgattttttcagctctaatatacctatggttaaaaagtataaaaacttaaattgatatttagatatatgttttcctattagtttatgttttaaaaagacaaaattgtatctgtcagtccctgaaggcagtttgtttttatactctctcacatttgtatttgttttttaaatggcagtattttagaagatttggagaaaagtccacataataatgttttcttaaaagcttttaaagtttttgctgtacttcaatttacttcttccatcagaaaactaagaacaaagtgttgctcagtctgttccgctgacctaaatttgtgttttcagcacttggctcagccaattcactgagtgaaggaattgctttatgaggcaaagcatgtgaaagttctaaagtatggttagattgtaggtcgtgctctatatggaaacatcaaaccattactacagagaaatgataaggcattggatccactattgaaattattatttttggatcaacaagttggtactttctgacttctgtatcttaacataagggaattttaggtaatgctaagtcagttgtctcattttttgtgataagttttggaatttttagttaattgaaataaataatgcttttaaatagaagtaaaaggtttataagtgtgcaaattgtagatttatcaattacctcagcaggtatcctgccatgtaattattagtgattagtgttaataagataatagattcaggtcttccaactatgcccttggattgtggcctactgtatgttattaaatggtctcttactatccaaaatgggagtagatgctgtggccccgtctcccttggcttttacgtcccatatccacccccattcatgtacaacatgtgaaatataaaaatctcatttcttgtcaaaatcagcactgcttatttgcatactcagcatcggatcagtgagtagttttataaaaaatccacgcacccaactcccttagttaaaacagattcttaattcataccatgaattcttaatttctgtaccatctatgttaatgatctgctgaaggtgactcaagattttcaaggtgtaatacagtttgatcatgtaccggacctggatatttaattttttttccctcacagttaatctcctccttgataaagcaataacactgctttgagtctgttgcctaatagcatgtcagaatcctctcctggatggtgattttataggaaagtttgtatgcatatcacccagtctatcttttaaaaattaagaaatttaaatgtatgctggaagtaatgacactatattgtggcattttattttaaaaattggggaaagttgcatatttttttaaaagtaagtgtttgagtaaaaaaattgaaggtacttttttaaggaaaaaaatttatatgccacagtttacatagacatttcagattcaacacgtactcttgaatataatggtttcttttacttggtcaaaatgcatgtatagcatttctttcatcttagttccttgtgtttgcctatgtggtcctttatatattttttattgtatcgaagaaacaaaactatcttcaaaaataagttaatttggatatatttgtcatatcaaactacaaagtgtacaaagttaagtttagcccttttctagaaagtgatctttaaaattaaaaatgctcctcttttaaattcaccaaatttatgtgtgggaaggcaccaaaatgattttgtaagtgccactgcaatattccctttcaagtgtggcctaaatttcaatcttaaggatggaatgcatgtctgctccttgttctgaaaaatgtaggcatctactacattttaaaacacagtgaaacatatacataagcctataaaaaaagatttgtgcaatttgaaagcctgttaattttttatgtagacatacctacacacgaaagggttaaattcacagccttactagttccttgcttccagtatttcaattggtctcctcccctcattattattattactactagtactattatttttgcacatagttaactgcccttcaatatgattcttaaaaagtgctgtttctgtggtatcgtattctctaaataatcatatttaattttttaaaacaaggttgcagtttctaattgtttcgttcctgtgtttttgctggtgtgtaataaaagcaagttttttcttttcatggttatttaatacattagctgcctgtaaataattcttgttataatgctctggaatgtgttgtagaagttgtattagattagttttaaacccttgtttgaaagccacattgttttggttatttctattaaattagaaaattgaaaaagttttcaaatgaa

SEQ ID NO: 105 - DNA, 1185 bp, Homo sapiens
ggcctccaccgccttccccggctgcccggcagcctcccctcgctcgctctcctcttcctctagggccccagcgcagctcgggagcccgcgcaccgaggcgctaggggcaccgcgcactagagggacacccgccgcgcctggacagcccccggcgggcgcccccctcgcacctcctgccccgcgcgggccgcgctcccctcccccgcgcctgtgtccccagggcgcagggccgcgcgtccagccccagacccgccggggtccctggggacgcgccagcccggcagtggctcgacgatggaggagccgcagcgcgcccgctcgcacacagtcaccaccaccgccagctccttcgcagagaacttctccaccagcagcagcagcttcgcctacgaccgggagttcctccgcaccctgcccggcttcctcatcgtggccgagatcgttctggggctgctggtatggacgcttattgctggaactgagtacttccgggtccccgcatttggctgggtcatgtttgtagctgtattttactgggtcctcaccgtcttcttcctcattatctacataacaatgacctacaccaggattccccaggtgccctggacaacagtgggcctgtgctttaacggcagtgccttcgtcttgtacctctctgccgctgttgtagatgcatcttccgtctcccctgagagggacagtcacaacttcaacagctgggcggcctcatcgttctttgccttcctggtcaccatctgctacgctggaaatacatatttcagttttatagcatggagatccaggaccatacagtgatttaccattttgataattaaaaggaaaaaaaaaggaagactctcactgtaaaaacagctgtaggtataatgtatattcccagagaattgtatttaactaattaatgttttttatattcttaaatttgctcacaaattgtggtttgttacaattaaactggatacttatttgcaaagtgttgtagcttataatgaactcttaagtatcttattaatgtattaatgtcttcatagatcatattttcttagacaatgtttaaatagataaattgctaatattgagaatgtgtcaagtttgtaaacctaacttttaagatgccagattcttttttgattaaatgttgcaaaatcccaaaaaaaaaaaaaaaaa

SEQ ID NO: 106 - DNA, 1842 bp, Homo sapiens
tttagaaggttagtgttggttcttttattcgattaaacaggaatacacatatatctaccaaagaataggtaagggagaaataagaacactaaaaaaactcggaatcgttaagtgtgaagcatatttggagttaaaagaaccaaatattactaagtaagcagacgcgggcacgcgctgcataccgggatttgtagtcccttccggggcggggtacagcgcgcctgcgcagaggggccgtcgctcttccgggcgcatgcgtgcggcagcggcgccaggactgactgcgccgtggaggctgctgcagtgttgtgagttggaagctggggagctcggcatggcggtccccgctgcagccatggggccctcggcgttgggccagagcggccccggctcgatggccccgtggtgctcagtgagcagcggcccgtcgcgctacgtgcttgggatgcaggagctgttccggggccacagcaagacgcgcgagttcctggcgcacagcgccaaggtgcactcggtggcctggagttgcgacgggcgtcgcctagcctcggggtccttcgacaagacggccagcgtcttcttgctggagaaggaccggttggtcaaagaaaacaattatcggggacatggggatagtgtggaccagctttgttggcatccaagtaatcctgacctatttgttacggcgtccggagataaaaccattcgcatctgggatgtgaggactacaaaatgcattgccactgtgaacactaaaggggagaacattaatatctgctggagtcctgatgggcagaccattgctgtaggcaacaaggatgatgtggtgacctttattgatgccaagacacaccgttccaaagcagaagagcagttcaagttcgaggtcaacgaaatctcctggaacaatgacaataatatgttcttcctgacaaatggcaatggttgtatcaacatcctcagctacccagaactgaagcctgtgcagtccatcaacgcccatccttccaactgcatctgtatcaagtttgaccccatggggaagtactttgccacaggaagtgcagatgctttggtcagcctctgggatgtggatgagttagtgtgtgttcggtgcttttccaggctggattggcctgtaagaaccctcagtttcagccatgatgggaaaatgctggcgtcagcatcggaagatcattttattgacattgctgaagtggagacaggggacaaactatgggaggtacagtgtgagtctccgaccttcacagtggcgtggcaccccaaaaggcctctgctggcatttgcctgtgatgacaaagacggcaaatatgacagcagccgggaagccggaactgtgaagctgtttgggcttcctaatgattcttgagaggaggttgtagggagaggaggccccggcagaggtcttccttcatgtggttagtttggtctgttctctcggagttggtgggcaccctaaatatttgtaagttggtataaattgtaaacgtctctggtcaggctgcgcatttcattcttttgctttgtctgtgtattagctctttccattctttgcccccagcatgagttaactcgcgtggactctgcagtgcgagtagtgaccccaccataccttgtcctctggacctcctgtcttctctgcttctgggtgcatggtagactttgtggcatttgatacaacttggacaatacctagtttggagggaggggaatggaagggcatggaagtttttttaaataattaaaaatatatatatataattttgagaattgagcatttaataaactgacttttgttattatggaaaaaaaaaaaaaaaa

SEQ ID NO: 107 - DNA, 4548 bp, Homo sapiens
gggactggaggctgccgagggggccggcgcccgagtccgggattcggccagtggtgctgagcgagtgctggaccagcggccgtcctgtgcacctggcctgtgcgcgtgcccgctgctcggcttcacccagactaaggcgcgggcagctgcgggaacaggcggggtgggcggagggagaccgggaggcacgggcgccctgtgcgcggaggaggtgaaggcggccggggccgggacgccatgtccatggaggaccccttctttgtggtgaaaggagaggtacagaaagcagtcaacactgcccagggattgtttcagagatggacagagctcctccaggacccctccacagcaacaagggaagaaatcgactggaccaccaacgagctgagaaataacctccggagcatagagtgggatctagaggaccttgatgaaaccatcagcatagttgaagcaaatcctagaaaatttaaccttgatgcaactgaattgagtataagaaaagccttcattacaagtactcggcaagttgtcagggacatgaaagatcagatgtcaacttcatctgtgcaggcattagctgaaagaaaaaatagacaggcactgctgggagacagtggcagccagaactggagcactggaacaacagataaatatgggcgtctggaccgagagctccagagagccaattctcatttcattgaggagcagcaggcacagcagcagttgatcgtggaacagcaggatgagcagttggagctggtctctggcagcatcggggtgctgaagaacatgtcccagcgcatcggaggggagctggaggaacaggcagttatgttggaagatttctctcacgaattggagagcactcagtcccggctggacaatgtgatgaagaaacttgcaaaagtatctcatatgaccagtgatcggcgccaatggtgtgccatagccatcctctttgcagtcctgttggttgtgctcatcctcttcttagtgctgtgacggcggggcctctgggtgcgagttcctcctgcatatgaaccgaggggaggaggagaagctgagcacgtgtgacattgccgtctactcacattcctatcctggaaacatactgctgcactgacttttctccgtgtgaccccacaattgacatggctcctccatcccagcgctggaagggccagtgggaagaggaaatagatgtctgcactcctggctgcagctggacaacagaagccccatgccgcctgtccagttcggaggagaactagctgctgccttgccttccgggacctcgtttgctgaggagggacttacagactccactggtgttttgctgttgctcattccatgcatctttggcagctcttttcttctgctcagacccttccccgtgctcagacagtgcaccgctgtcccatctaaagaaacctgtcaggaatacgagcttctgggtatgtttcgtttcccattgctgtagcatttcttatcccctgagagctgatgattattgaggacagaaggctcagaaacagtttgtgacagaaaatgcagtgtttcatttttcagggataaatgctaagataaaattgcttttccaggtcatttttttttgtggtaagaataactaatggaaaataatgaaacaccctggggtttgggggtgctaacaacttgtggctttaactgacaggagcaattaaaaagagcaagagggttctgcattggcatagcttagggaagggttaatgatgtcgccacaggtcagctcctgatccttgccgacttgatgttgctgtaccagggcttcctccccagaggtgcagcttgcgttttgagggtgattgctacatatgttgttgctaaacagctcagtaacacacttgaatgaatttggataccagattgtcctcattacagttcttttactcttagggcactctacactgggggttggggttgggagtggttagtacatttattacatttattaagaaacgtaatgacataaaaggttagctctgggccagacttctcttactctgtgggtaatggcaaggatgtgtaggtaaacttggttcttttttttccctaagatgacagcttgattttatcatctgcagtcaaataactgagccaatccaaatttaaatgatagatgctttaattgagtttaagtagctgaaactgctgagacactaaactttaaccttctgatgactttttaaaatgcctcaaatgtgcacatgtatataggatatttttataacttccctgatgaataatctgatattaaagtagtatttggacccagagccagaactcggtggtggaggctgctggtctctcctcaccaccttcttttgcacttggaaagaacagcaacatctggatagagttctggctttgacttctcatttccttgtctttttgggtgcattcctcagcacactttttttttaaacctttttgttttgttttgtttgtatttcatgtggttttatttgggggttttggttttttcacccttttttgtgatttgcaatgatgtgcttgcccagctaacttttgaattgcactttttaataaatattcttaacaatttttgaagaaggatattttatctcatttgagatcatggtaggttaagaaaatatgcctgttgatgaaagctaaaagcaaatttatgaaactaaaagggtgattgacatccatgtttacactccgctctaatgtttgatatataaataagttattttcaaattaggaaaaaacagtgagtattacaaagggcttcagatgtttagagtactaggttatttatgttttacaaagtttgaatcttctataaactaagaaaggggatgatccttagatttgcattaaaatatagaagtcttttaaagtaaatgtgaaccttgtctaagtactgtaatccacacaacacattataagaagcaaaccagcatcttaaggaattataaaattaccctatttaaaagccatgctattgttctgctattaccagatttattgtgccacacaaaaggatcatgtgtgtcagcaggggccgtttggaacaaacctagtcattaatgagtaagatactcctgttagttcagggaccaagttttatgacccagaggcttaatgatgtttggatatatttcaaatcggcgtgcttacctcactgatttaaattattttctaaatagtggccattgtagacctgactcaggctgaagctaaatagagaacaatttagaaagttaactaacaatacagtgcattctacccgtagggccaccatgcccttctgcccctggctgatttgatcctgtgtctgatcccattgcaccctgactgggcagtccctacagaaccagtgttaatttgaagggcctccactcaggctccaaatgtggcagccaaagagaacaatccagggaacctacatttatttttaaggacaaatatttcctcctcagtggtcctaatgttcagggctttagagggaacccaggtggtctcttcaccctgtgtcctagaatgggagagtaagtagacagtggtgataaccccacactgcttataagtgcatctttatagtatttggggctttcctacccctttagccttctgtacctagtaccatattccagttttaaagaactggcagaatgtgatggataacagaggaagagctcaatttatgtttattggaagaacattttacttaaatgatttgaggggtgggagggagtgaactactgagtttgccagagtgaaaatccatctgaaaaactcagctacctttagtttttagtcctcatttttggtcttgtctctgcggactgtgaagaatcacaatgctctatatgccctggactgtgtggcaaatgcaggttgcagcgtgtgtgttacatgaggatcttccacaatttcagaatgcacgccagagctgaagggggaaacttggtaacttgcccattattctctgcttttagccagagttaaacagactgatgggtctggtagccaacaacttggcaacttccactccttctcacctcgtgagattaagggctgtgaaaagaaatctagtctaactccaacagaaatctgtctctgttaagtgttttaccttctgtaagtagagatggtagagccaagatttttcttttggtaatttccctgtctataaagtgagaccaaagggatatctgttccctgttacctttttggagaattcataacatttgaagatcaaaaaattgaatgataaatatgaatggcttttcaattctgtggactttgtaccatttggcttcaccttgtactgcaagatgaatttgtaaacaaaacaaaattggactgtctggaaagctaaagttctgaaatatggaatgtactgcctctaatttttctttgtcttcctctcactggcatttttttctctcccaggtttcttaagaataatgttttttaaaggaggctttttgcccatcaagaataaaaagaaataaaaccaaaaaaaaaaaaaaa

SEQ ID NO: 108 - DNA, 2295 bp, Homo sapiens
gagctgcaggcggcgagcgccattgtgagcagagccggcggggcaggaggcccgggcgcctgggtccccgcggcgcgggcggagcggccggccagccaggttctgtggcctgatccccaggaggagctactctgggttaccatgagagagaccttggaggccctcagctccctgggattctctgtgggacagccagagatggccccccaaagtgagcccagggaaggatcccataatgcccaggagcagatgtcctcttctagggaagagagagcactgggggtgtgctcagggcacgaggcccctacaccggaggaaggtgcccacacagaacaagccgaggctccctgcagaggccaggcgtgctcagcacagaaggctcagcctgtgggtacctgcccaggagaggagtggatgattcggaaggtgaaggtggaggacgaagatcaggaggcagaagaggaggtcgaatggccccagcatctatcgttacttcccagcccctttcccgcgcctgacctggggcatctggctgccgcgtacaaactggagccaggggccccgggggcactgagtgggctcgcgctgtctgggtggggtccgatgccggagaagccctacggctgcggggagtgtgagcggcgcttccgggaccagctgacgttgcgactgcaccagcggctgcaccggggcgagggcccctgcgcctgcccggactgcggccgcagcttcacgcagcgcgcccacatgctactgcatcagcgcagccaccgcggcgagcggcctttcccgtgctccgagtgcgacaagcgcttcagcaagaaggcccatctgacccgccacctgcgcacgcacacgggcgagcggccctacccgtgcgcggagtgcggcaagcgcttcagccagaagatccacctgggctcgcaccaaaagacccacaccggcgagcggcccttcccctgcacggaatgcgagaagcgctttcgcaagaagacgcacttgattcggcaccagcgcatccatacgggcgagaggccctaccagtgcgcacagtgcgcacgcagcttcacgcacaagcagcacttggtgcggcaccaaagggtgcaccagacggccggcccggccaggccctctcccgactcgtccgcttctcctcattccactgccccgtccccgaccccatcctttcccgggccaaagcctttcgcgtgctccgactgcggcttgagcttcggctggaaaaagaacctcgccacgcaccagtgtctgcaccgcagcgagggtcgcccctttgggtgcgatgagtgcgcactgggcgccaccgtggatgcccccgccgccaagcccctggccagcgcgcctggcggaccgggctgcggcccaggatccgatcccgtggtgccccagcgcgccccctcgggcgagcggtccttcttctgcccggactgcgggcgcggcttctcccatgggcagcacctggcgcggcacccgcgcgtgcacacgggcgaacggcccttcgcctgcacgcagtgtgaccgccgcttcggctcgcggcctaatctggtcgcccactccagggcccacagcggcgccaggcctttcgcctgcgctcagtgcggccgccgcttcagccgcaagtcgcacctgggccgccaccaggcggtgcacactggcagccgcccccacgcctgcgccgtctgcgcccgcagcttcagctccaaaaccaacctagtccgccaccaggcgatccacacaggctcccgccccttctcctgcccgcagtgcggaaagagcttcagccgcaagacccacctggtgcggcaccagctcattcacggcgaagccgcccacgcggccccggacgccgcccttgcggccccagcctggtccgctccccccgaggtggcgccgcccccgctcttcttctgagcctagttctcacgaggaccctttcttgcccacagtttcgagaggcccgtgccatgagaccgcctggggtgagcaaggcgacctgggctgctgcccgaaggtttggccgccgcgggacacctgtttccttcccgcagtgtctgcgtccgcacagcatacccagctcggacctcctaggacagagactcagcgaacccttgctgggaaccgctgagctgaagttcttggaaggctcccacccaggtgccccgttggaaagcagatatttcccggacccagcgcggcctcaaccagggcaggaaagagtggttatttatgtacttaaagtttcattaaagttaaaatcggaaaaaaaaaaaaaaaaaa

SEQ ID NO: 109 - DNA, 6834 bp, Homo sapiens
gggcaagctcagcgcacttggcttaaggggcggcgcgctccctgcctgctgctgggcggagggaaggcggcaagagctgcggagcccctggaagagcttccaggaaccctgcgctgtgggataaaggaatgaggttcagaaaggggcagggagttgcccgcagccgcaccgcacgtcttcagcccgaccgttgtcctgacctctctgtcccgtcccctgcccagtctcaccatggccttctggacacagctgatgctgctgctctggaagaatttcatgtatcgccggagacagccggtccagctcctggtcgaattgctgtggcctctcttcctcttcttcatcctggtggctgttcgccactcccacccgcccctggagcaccatgaatgccacttcccaaacaagccactgccatcggcgggcaccgtgccctggctccagggtctcatctgtaatgtgaacaacacctgctttccgcagctgacaccgggcgaggagcccgggcgcctgagcaacttcaacgactccctggtctcccggctgctagccgatgcccgcactgtgctgggaggggccagtgcccacaggacgctggctggcctagggaagctgatcgccacgctgagggctgcacgcagcacggcccagcctcaaccaaccaagcagtctccactggaaccacccatgctggatgtcgcggagctgctgacgtcactgctgcgcacggaatccctggggttggcactgggccaagcccaggagcccttgcacagcttgttggaggccgctgaggacctggcccaggagctcctggcgctgcgcagcctggtggagcttcgggcactgctgcagagaccccgagggaccagcggccccctggagttgctgtcagaggccctctgcagtgtcaggggacctagcagcacagtgggcccctccctcaactggtacgaggctagtgacctgatggagctggtggggcaggagccagaatccgccctgccagacagcagcctgagccccgcctgctcggagctgattggagccctggacagccacccgctgtcccgcctgctctggagacgcctgaagcctctgatcctcgggaagctactctttgcaccagatacaccttttacccggaagctcatggcccaggtgaaccggaccttcgaggagctcaccctgctgagggatgtccgggaggtgtgggagatgctgggaccccggatcttcaccttcatgaacgacagttccaatgtggccatgctgcagcggctcctgcagatgcaggatgaaggaagaaggcagcccagacctggaggccgggaccacatggaggccctgcgatcctttctggaccctgggagcggtggctacagctggcaggacgcacacgctgatgtggggcacctggtgggcacgctgggccgagtgacggagtgcctgtccttggacaagctggaggcggcaccctcagaggcagccctggtgtcgcgggccctgcaactgctcgcggaacatcgattctgggccggcgtcgtcttcttgggacctgaggactcttcagaccccacagagcacccaaccccagacctgggccccggccacgtgcgcatcaaaatccgcatggacattgacgtggtcacgaggaccaataagatcagggacaggttttgggaccctggcccagccgcggaccccctgaccgacctgcgctacgtgtggggcggcttcgtgtacctgcaagacctggtggagcgtgcagccgtccgcgtgctcagcggcgccaacccccgggccggcctctacctgcagcagatgccctatccgtgctatgtggacgacgtgttcctgcgtgtgctgagccggtcgctgccgctcttcctgacgctggcctggatctactccgtgacactgacagtgaaggccgtggtgcgggagaaggagacgcggctgcgggacaccatgcgcgccatggggctcagccgcgcggtgctctggctaggctggttcctcagctgcctcgggcccttcctgctcagcgccgcactgctggttctggtgctcaagctgggagacatcctcccctacagccacccgggcgtggtcttcctgttcttggcagccttcgcggtggccacggtgacccagagcttcctgctcagcgccttcttctcccgcgccaacctggctgcggcctgcggcggcctggcctacttctccctctacctgccctacgtgctgtgtgtggcttggcgggaccggctgcccgcgggtggccgcgtggccgcgagcctgctgtcgcccgtggccttcggcttcggctgcgagagcctggctctgctggaggagcagggcgagggcgcgcagtggcacaacgtgggcacccggcctacggcagacgtcttcagcctggcccaggtctctggccttctgctgctggacgcggcgctctacggcctcgccacctggtacctggaagctgtgtgcccaggccagtacgggatccctgaaccatggaattttccttttcggaggagctactggtgcggacctcggccccccaagagtccagccccttgccccaccccgctggacccaaaggtgctggtagaagaggcaccgcccggcctgagtcctggcgtctccgttcgcagcctggagaagcgctttcctggaagcccgcagccagccctgcgggggctcagcctggacttctaccagggccacatcaccgccttcctgggccacaacggggccggcaagaccaccaccctgtccatcttgagtggcctcttcccacccagtggtggctctgccttcatcctgggccacgacgtccgctccagcatggccgccatccggccccacctgggcgtctgtcctcagtacaacgtgctgtttgacatgctgaccgtggacgagcacgtctggttctatgggcggctgaagggtctgagtgccgctgtagtgggccccgagcaggaccgtctgctgcaggatgtggggctggtctccaagcagagtgtgcagactcgccacctctctggtgggatgcaacggaagctgtccgtggccattgcctttgtgggcggctcccaagttgttatcctggacgagcctacggctggcgtggatcctgcttcccgccgcggtatttgggagctgctgctcaaataccgagaaggtcgcacgctgatcctctccacccaccacctggatgaggcagagctgctgggagaccgtgtggccgtggtggcaggtggccgcttgtgctgctgtggctccccactcttcctgcgccgtcacctgggctccggctactacctgacgctggtgaaggcccgcctgcccctgaccaccaatgagaaggctgacactgacatggagggcagtgtggacaccaggcaggaaaagaagaatggcagccagggcagcagagtcggcactcctcagctgctggccctggtacagcactgggtgcccggggcacggctggtggaggagctgccacacgagctggtgctggtgctgccctacacgggtgcccatgacggcagcttcgccacactcttccgagagctagacacgcggctggcggagctgaggctcactggctacgggatctccgacaccagcctcgaggagatcttcctgaaggtggtggaggagtgtgctgcggacacagatatggaggatggcagctgcgggcagcacctatgcacaggcattgctggcctagacgtaaccctacggctcaagatgccgccacaggagacagcgctggagaacggggaaccagctgggtcagccccagagactgaccagggctctgggccagacgccgtgggccgggtacagggctgggcactgacccgccagcagctccaggccctgcttctcaagcgctttctgcttgcccgccgcagccgccgcggcctgttcgcccagatcgtgctgcctgccctctttgtgggcctggccctcgtgttcagcctcatcgtgcctcctttcgggcactacccggctctgcggctcagtcccaccatgtacggtgctcaggtgtccttcttcagtgaggacgccccaggggaccctggacgtgcccggctgctcgaggcgctgctgcaggaggcaggactggaggagcccccagtgcagcatagctcccacaggttctcggcaccagaagttcctgctgaagtggccaaggtcttggccagtggcaactggaccccagagtctccatccccagcctgccagtgtagccggcccggtgcccggcgcctgctgcccgactgcccggctgcagctggtggtccccctccgccccaggcagtgaccggctctggggaagtggttcagaacctgacaggccggaacctgtctgacttcctggtcaagacctacccgcgcctggtgcgccagggcctgaagactaagaagtgggtgaatgaggtcagatacggaggcttctcgctggggggccgagacccaggcctgccctcgggccaagagttgggccgctcagtggaggagttgtgggcgctgctgagtcccctgcctggcggggccctcgaccgtgtcctgaaaaacctcacagcctgggctcacagcctggatgctcaggacagtctcaagatctggttcaacaacaaaggctggcactccatggtggcctttgtcaaccgagccagcaacgcaatcctccgtgctcacctgcccccaggcccggcccgccacgcccacagcatcaccacactcaaccaccccttgaacctcaccaaggagcagctgtctgagggtgcactgatggcctcctcggtggacgtcctcgtctccatctgtgtggtctttgccatgtcctttgtcccggccagcttcactcttgtcctcattgaggagcgagtcacccgagccaagcacctgcagctcatggggggcctgtcccccaccctctactggcttggcaactttctctgggacatgtgtaactacttggtgccagcatgcatcgtggtgctcatctttctggccttccagcagagggcatatgtggcccctgccaacctgcctgctctcctgctgttgctactactgtatggctggtcgatcacaccgctcatgtacccagcctccttcttcttctccgtgcccagcacagcctatgtggtgctcacctgcataaacctctttattggcatcaatggaagcatggccacctttgtgcttgagctcttctctgatcagaagctgcaggaggtgagccggatcttgaaacaggtcttccttatcttcccccacttctgcttgggccgggggctcattgacatggtgcggaaccaggccatggctgatgcctttgagcgcttgggagacaggcagttccagtcacccctgcgctgggaggtggtcggcaagaacctcttggccatggtgatacaggggcccctcttccttctcttcacactactgctgcagcaccgaagccaactcctgccacagcccagggtgaggtctctgccactcctgggagaggaggacgaggatgtagcccgtgaacgggagcgggtggtccaaggagccacccagggggatgtgttggtgctgaggaacttgaccaaggtataccgtgggcagaggatgccagctgttgaccgcttgtgcctggggattccccctggtgagtgttttgggctgctgggtgtgaatggagcagggaagacgtccacgtttcgcatggtgacgggggacacattggccagcaggggcgaggctgtgctggcaggccacagcgtggcccgggaacccagtgctgcgcacctcagcatgggatactgccctcaatccgatgccatctttgagctgctgacgggccgcgagcacctggagctgcttgcgcgcctgcgcggtgtcccggaggcccaggttgcccagaccgctggctcgggcctggcgcgtctgggactctcatggtacgcagaccggcctgcaggcacctacagcggagggaacaaacgcaagctggcgacggccctggcgctggttggggacccagccgtggtgtttctggacgagccgaccacaggcatggaccccagcgcgcggcgcttcctttggaacagccttttggccgtggtgcgggagggccgttcagtgatgctcacctcccatagcatggaggagtgtgaagcgctctgctcgcgcctggccatcatggtgaatgggcggttccgctgcctgggcagcccgcaacatctcaagggcagattcgcggcgggtcacacactgaccctgcgggtgcccgccgcaaggtcccagccggcagcggccttcgtggcggccgagttccctggggcggagctgcgcgaggcacatggaggccgcctgcgcttccagctgccgccgggagggcgctgcgccctggcgcgcgtctttggagagctggcggtgcacggcgcagagcacggcgtggaggacttttccgtgagccagacgatgctggaggaggtattcttgtacttctccaaggaccaggggaaggacgaggacaccgaagagcagaaggaggcaggagtgggagtggaccccgcgccaggcctgcagcaccccaaacgcgtcagccagttcctcgatgaccctagcactgccgagactgtgctctgagcctccctcccctgcggggccgcggggaggccctgggaatggcaagggcaaggtagagtgcctaggagccctggactcaggctggcagaggggctggtgccctggagaaaataaagagaaggctggagagaagccgtggtggtgaaaaaaaaaaaaaaaaaa

SEQ ID NO: 110 - DNA, 1805 bp, Homo sapiens
ggcctccttgtccgcggggcggggcagcgcgccttcctcttcctgggcagcctcgggacggggcgccgcggccgggcgggcagcatgaataaccctataccttccaatttgaaatcagaagcaaaaaaggctgccaaaatattaagagaattcacagaaataacttccagaaatggacctgataagatcattcctgctcacgtaattgcgaaggctaaaggccttgcaattctgtctgtgatcaaagccgggttcctggtgactgccagaggaggcagcgggattgtagtggcgcgccttccagatggaaaatggtctgcaccctcagccattgggatagctggccttggtggaggatttgaaataggaattgaggtatcagacttggtgataattctgaattatgaccgtgctgtagaagcttttgcaaaaggcggaaatctgaccctcggagggaacttgactgtggcggttgggcccttgggaaggaacttggaaggaaacgtggccctgagaagctccgctgccgtcttcacgtactgcaagtcaaggggactctttgcaggcgtgtctttagaagggagctgtttgattgaaaggaaagaaactaatagaaaattttattgtcaagatatccgagcttatgacattttatttggagatacaccgcggcctgctcaagccgaagatctttatgaaattcttgattcctttactgaaaagtatgaaaatgaaggacaacgaatcaatgcaagaaaagcagcaagggagcagaggaagtcttctgctaaagaattacctccaaagccattgtcaagaccacagcagtcatctgcaccagtccagctgaactctggctctcaaagtaacagaaatgaatataagctctatcctggactttccagctatcatgagagagttggcaatttgaatcaacccatagaagtgacagcgctgtattcatttgaaggacagcagcctggggatttgaattttcaagctggagacagaatcacagttatatcaaaaacagattcacattttgattggtgggaaggaaaacttcgaggtcaaactggcatttttccagccaactacgtaaccatgaattaaagcgtatactattttcttctttgagaattacaaaaaaattatttctacactgacaggatttactagttaagcaatgtttaatataaattttaaaaaacttctgttctacaaaatttccattccgtatgtaaaagattttgtttttctatataaaaagagctgactgacatatctttaaatactttgtactaactttatcacacttactgtgtcatagaatatcatacagtttatacgctcatagttctcttgtgaacacttcaaacatcgctaagcatttgatctggccatgtatatggtagctgtgttttaatttgagaatcttgagggtagagccacaaatttcaattcttacatttccatttgcaaagtgactagagaaaaagaaatcagcttaaatgaggtattaagtaatgtttagagtcgtaggtattaactagaatataaatccttagaaattgtctttataccttcaaaaattatactatgcatttatcatagaaatgtgattacaaagaagtctgactaccatgtctttaaacatatggcatctctcaacttttcttccttatggggctacatttgttcatttccagcagtagcataaacttacggtgacatggtagacttgtctctaaataaaatttttaaatgtttactaagttaatatttcaaaaaaaaaaaaaaaaaaa

SEQ ID NO: 111 - DNA, 4408 bp, Homo sapiens
agtcgcgggggcggcggggggggggcggaggctccgtggaaatgtgtcggtgacattgaatggggagaccgagcgcgagcgaggcgcgcgcgcgcacacgcgcactcacggccccgctcgctccgagatccccggccacgtaagtaactattaataccgcctcgccgggggatgcgggcgtgctgagcgcggggattggcctcgggcaccgtcggccgtcccctttaatttttaaatacacggtcccctcttttctctggggggggcaagcaagaaatcaaagaaggaggagacaagccgtcaattttctccaaaacaaaccccaccgggcaatttggtctcggggtagggggagacggggtgattgcaaattattccaggacgagatccagttctccagcgggaaaggggcaaaggaacgccgcgcgttggaagggccagggacgcagctccccttgcagcgcccgcaggacccccgcaagctcgtgccggcgaaatcggagaccgccgatctgtcctcgttctctcctgcacgtctggctgcattcggaggaagacctggggcgcgagcgagcggcgacagcatgagcctgtgctgacctccgcgcggcgggccgagcccagggctttgtcgcggtacctgcgcccagcccgcgccgcaactctgtgcccagcttttgcaatcttttgttggcagcgctgaccgcaccaagttaaatgctcccttgcaatttttcttttttttgtttgtttgtttaatttttggagagctcgcgatcttggaaaagcctcagacgccatctacagttaaaacgtaggtaactgccctctcccgcaccccccccttacacgccccccaccctttccaccaaaaaaagggggtgcagcgcggattctggctgccgtgcgtcgccagccggtagacccgtgcttgtttcctttctctttttgtttggcttctaacgcgttgggactgagtcgccgccgtgagctccccgaagactgcacaaactaccgcgggctcctccgccccgtctgcgattcggaagccggcctgggggtcgcgtcgggagccctggcgctgcagctccgcaccttagcagcccgggtactcatccagatccacgccggggacacacacacagagtaactaaaagtgcggcgattctgcacatcgccgactgctttggggtaacaaaaagacccgagttgcctgccgaccgaggacccccgggagccgggctcggagcagacgaggtatccggcggcgcccatttgggggcttctaactctttctccacgcagcccctcttctgtcccctcccctctcgctcccttttaaaatcagtggcaccgaggcgcctgcagccgcactcgccagcgactcatctctccagcgggtttttttttgtttgtcgtgtgcgatcctcacactcatgaacatacacaggtctacccccatcacaatagcgagatatgggagatcgcggaacaaaacccaggatttcgaagagttgtcgtctataaggtccgcggagcccagccagagtttcagcccgaacctcggctccccgagcccgcccgagactccgaacttgtcgcattgcgtttcttgtatcgggaaatacttattgttggaacctctggagggagaccacgtttttcgtgccgtgcatctgcacagcggagaggagctggtgtgcaaggtgtttgatatcagctgctaccaggaatccctggcaccgtgcttttgcctgtctgctcatagtaacatcaaccaaatcactgaaattatcctgggtgagaccaaagcctatgtgttctttgagcgaagctatggggacatgcattccttcgtccgcacctgcaagaagctgagagaggaggaggcagccagactgttctaccagattgcctcggcagtggcccactgccatgacggggggctggtgctgcgggacctcaagctgcggaaattcatctttaaggacgaagagaggactcgggtcaagctggaaagcctggaagacgcctacattctgcggggagatgatgattccctctccgacaagcatggctgcccggcttacgtaagcccagagatcttgaacaccagtggcagctactcgggcaaagcagccgacgtgtggagcctgggggtgatgctgtacaccatgttggtggggcggtaccctttccatgacattgaacccagctccctcttcagcaagatccggcgtggccagttcaacattccagagactctgtcgcccaaggccaagtgcctcatccgaagcattctgcgtcgggagccctcagagcggctgacctcgcaggaaattctggaccatccttggttttctacagattttagcgtctcgaattcagcatatggtgctaaggaagtgtctgaccagctggtgccggacgtcaacatggaagagaacttggaccctttctttaactgagctcatgccccacggagacttagcaggttccaggagtgagcgagggcagcggaaaggagttcttccgggggacacgaattgcctggctgagtagcaagaaagacacactcttaagtttcttggttcagagcaggaaaaccttcaaggagctgactgaccacgtagcatgggggcaagaggcgtgggatggggattggggtgagatggatgggagcccgctggagcttgtcttccctaacatagcctgggagaccaccccttgccacttgggccacttccgcctaccccacttttcattttgttccaaaatagttgcagatcctgacagaatcaaaactctctgcctcaaacacacatcctggcatcgcactgttagcatttaacttcttgttaggattcagggaaggaacagttggccaagaattttttttcttttaaacaagccaaccacctagctggtaattaatgaggttcacttaaaaaaaaaattcggtgcacacagactgacatgaaacctgggtgctacagtaaaagaaaacaaaagtccagtttgtgtctcttaatcgctcacttcaactcatttcttctaaataaactatttaatatcctggtcaggaaatgacatgttaatgctttgctccctgaagggggaaaaaatctgtcctttaacaagctattctgttttgtgtcaattggttcgtggcaggaagctattagaagtcaaacgtccagatgcattactgctatcttagtttaaagggggaaagaaaagggaagaagaaaggaaaagagaaatccaactcctttttcatgttttgcttttgaacaatgagggtttgtgtgacaggcattcctctttgctgagatgatagcaatggcctgagattttagcaagctcctggagtctgatgcttttgcagtactctgatcgcaactaaacatttgtctttgttttattagaaactagtgaaacaaagcaggttgtcccacatgtataaaatacagggcagctatttagttttctttacagagaatgatccttttaaggcttgtaaggccctctggtttggacaaaaaccctcagtagagacaagcgggaaggataattagctgaaagctatgatgatataaataaaaacagctctctatcccaatacgcacctttgtattttcaagaactcttctatttattaaggaaaatgtcacattgtgatgtattaagccagtacttcaattacgggttgacttgggatgacatattacatgctgtagttaacatttataattctttttccttgtttgagtatttctgtctctgaaataaccttttacttggcttttctagatagctttatttgatttcgagtggcaaaatgttttttattacggcttttctattgctgtatgatacagaactcttttggcataaatatttgtgttcccagtacctcacttgttcggatttgactgcctgtatatgttttgtgaaatggtcctgtttttgggtaggtgacacgtggactctagtatgtaaatgttacttgaatctgtgcttcataatagtgtgtggcatgtatgtgcagactcttggatgctttatgcctgcgcagcaggagccctgtcctcacgttcccaggagggcggcttcacccttcgtaaccaggagacaaggcggccatggatttgcccttgattctattttgctaatggaagatagaaaggagagaaggttttttttttttttaacattctgaagatggtgctgtgtcaagaaggaccttttttttcccctctcccctattttttaagtaccttggaggaggagaggttggtgacatgcatggtggggatctatggcctctggtgctttgtcctgtatttggtttaatgtttttgtcctaatctcttcaatcaataaaattgtgcgtatttaactaaaa

SEQ ID NO: 112 - DNA, 3707 bp, Homo sapiens
ggcatctctcgcgtgctcttgcttgcgcactaatttgtcctccaccgcctcccgttcaggccggctctcctgcggggcggggaaaggggtgggaagaggctgggagctgcggccgctgtgccagggtgaccggtagagttgtagccgaggtggcggcgcggggcggggcgggcggagagagaaggaaggaggtggttgtgcaggatggcgacggcggcctacgagcagctgaagctgcatatcacacctgaaaaattttatgtggaagcttgtgatgatggagcagatgacgtacttaccattgaccgtgtgtccacagaggttacccttgcagtcaagaaagatgttcctccttcagctgtcacaagaccaatatttggtatactgggcacaatccatctggtggcaggtaattatcttatagtcattaccaaaaagataaaagtaggtgaatttttcagtcatgtagtctggaaagcaacagattttgatgtcctttcttataagaagacaatgttgcacttaactgatattcagttacaagataataaaaccttcctagcgatgctaaaccatgtcttgaatgtggatggattttacttttcaacaacatatgatttgacccatactttgcagcggctatccaacactagtcctgaattccaagaaatgagtctcttggaaagggcagatcagcggtttgtatggaatggtcatcttctaagagaactttctgcacagccagaggttcatcggtttgcccttccagtgttacatggctttattaccatgcattcatgttctattaatggaaaatactttgattggattctcatctcgaggaggagctgtttcagagctggtgtgcgctattatgtaagaggaattgattcggaaggccatgcagctaactttgtagaaacagaacaaattgtgcactacaatgggagcaaagcttcgtttgtacagactcgaggatcaatacctgttttctggtcccaaagaccaaacctcaagtacaaaccactgccacagatcagcaaagtagcaaatcacatggacggtttccaaaggcattttgattcccaagtaattatttatggaaaacaagttataatcaatctgattaaccagaagggctcggagaagccacttgagcagacatttgcaacaatggtgtcttccttgggaagtggaatgatgagatacattgcctttgacttccataaggaatgtaaaaatatgagatgggatcgactaagtattttattggatcaggtagcagaaatgcaagatgaattaagttattttctagtggactctgctggccaggtggtggcaaaccaggaaggcgtgttccgaagcaattgcatggattgtctagatagaaccaatgtgatccagagtttgttagctcgtcgttcacttcaggcccaacttcagagactaggagttttgcatgtgggacaaaagcttgaagaacaagatgaatttgagaagatttacaaaaatgcctgggctgacaacgcaaatgcttgtgccaagcaatatgcgggaactggtgccttgaagactgactttaccagaactggaaagagaactcatttgggacttataatggatggctggaactcaatgatacgatattataagaacaacttttccgatggatttagacaagattccatagacttatttcttggaaactattcagtggatgaattagaatctcatagtcctttaagtgttccaagggactggaaattcctggctttgcctattatcatggttgttgccttttcaatgtgcattatctgtttgcttatggctggtgacacttggacagaaacactggcctatgtgctcttctggggagttgcaagcattggaacattttttatcattctttacaatggcaaagattttgtcgatgctcccagactggtccagaaagaaaagatagactgaatttgtatttgtggaaagcggcttggcttggaagattccattgtgcagaactggagtctttactgacccgctttccacatcagcccaaggtctttttaatgcctttatccaaaagcacatcttgtgctccatgcaggatgatgacagaattgatctgatgttactgccttgatggtctctttactattgggacagttagatttataatttgaagctattctgtaattaaaatataacctgaattcagcttgcagaatggaagctgaatctgttcattgtattctattgattgtcaatttaattagctgttgcagaataagtaatatattttaaaaacctagctcctttcattatttaaaacagcaaaattatttttgtagctcagtttcattattgtcattgtagaagcggtcactattagcaggcatacttttccacacatctttggacttttcttaaaagttcagtaataagctaactgtgtttataaaatgtaagtctcttacagacatcaagtagtttgatgagacagtctgtgacttcatgataggaaagaggaggatgaggtctggggttctttaaagtctctggtgggctgcctcatgactttaatcagcttgaactgccagtgcaccagcagtttaggtgtgatgagagaattcagatatactttatctttttaaaaaagtgtaaataaaatcaaagaatgtaaagtctatctcttacgctagaggtccaaagctgcctctgttttaaagattatcccaatgtggaagatgcccatgactggtcagctacttcctcctatacattttggtttctttgagggtcactcattgagacacgcaggcctctgagagggtcttgttctagatttcatattgcacttggagggtaacagctgctttttcacgcatggtactcttgatgtttttcactctgtcaaggattttgttggctatcaatgaatgtgtctaaaacttagtgcttccaggtagttatagtactccaaatcaaggaccaacttaaacgttaatttttgtgcaaaaacaaacctgaaaaatatgcttcggaaactgtgcatagttctaattgtaagtcagattgtatattcaaattgtaattaagagatttaaatattagaacggtatgtaaggtagtataattaccactattttaaataattcagttaaacactgctgcaatatttcagtgttgtgcttgaaaatatgtacagtttttttccaatattaataccttatgttgtccttaaatatttctaaaagcgcctttatttcagcattacctttttttcatcactatcttttataaaacattaatataagtcgttacttttagaaactaaaggaaataatagctggaaaaccctctgtagtttaaaatcagtcattaaactcacaatagggtaagtaaatatagccacctgttaacatgtaaataagcataatttgttccaaagatggaatattgaaacttagttcatgtctgctgtaaaatattatttaaatgctgctgggcatttcacttaaagaacttaatgtcaacagctacaacaaagaccaaatctgaactgctaatgtggctgctttgtagggaatggactaatatcagtgtgttagatcttaaggtatcagtatttcagaatcctgcgacgattttatttctaaattcatgtactgtatgtccataagtgaaaataaaatgtcatattcttttct

SEQ ID NO: 113 - DNA, 3890 bp, Homo sapiens
ggcagaggcggcgccagccatgttggccgggcggaggtcttcgctgaggcccggggcggggtggcgccacccctgattgcggtgccacggactgctcctgctgggcggagaggacagattttgcaaagcggaggctgcgacgggtcctgcagggggacagtgaggaaagggccgcctcgtctccgctcctgggggaccgcagaaataagaatcaaactccacaatgacaacctatttggaattcattcaacaaaatgaagaacgagatggagtccgatttagttggaatgtttggccatcaagtcgactggaagctacaagaatggttgttcctgtggcagccctgtttacaccactgaaagagagacctgacttaccacctattcaatatgaacctgttctgtgtagtaggaccacttgccgtgcagttttgaatcctttatgtcaagtggattatcgagcaaaactttgggcttgcaacttttgttaccaaaggaatcagtttccacctagttatgctggtatatctgaactgaatcagcctgctgaacttttacctcagttttctagcattgaatatgtagttctgcgtggtcctcagatgcctttgatattcctctatgtggttgatacttgcatggaagatgaagatttacaagccctgaaagaatccatgcagatgtcattaagtcttttaccacctacagctttggttggacttattacttttgggagaatggttcaggttcatgaacttggatgtgaaggcatttcaaaaagctatgtcttcagaggaacaaaagatttgtctgccaaacaactgcaggaaatgctggggctctctaaagtaccacttactcaagcaacacgtggtcctcaggtacagcagccacctccttccaacagattcttacaaccagtacagaaaatagacatgaatctcacagatcttctgggagaactccagcgagacccttggcctgtaccacagggaaagagacctttgcgttcctctggggtggcactttccatagctgtaggactgctggagtgtacttttcccaacactggtgctcgtatcatgatgttcattggtggtcctgctactcaggggcctggaatggtggttggagatgagttgaagacacctataagatcgtggcatgacattgacaaagacaatgccaaatatgttaaaaagggaactaagcattttgaagcattggctaatcgagctgctacaactggccatgttattgatatctatgcgtgtgcattagatcagacaggtctcctggagatgaaatgctgtcccaaccttactggaggatacatggtaatgggtgattctttcaatacttccttattcaaacaaacttttcaaagagtctttaccaaagacatgcatggacagtttaaaatgggctttggtggtacgctagaaataaagacctcaagggaaataaagatttcaggagctattggaccctgtgtgtcactcaattctaaaggaccctgtgtgtctgaaaatgagataggaacaggtggcacatgtcagtggaagatatgtggacttagtcccactacaaccttagccatatattttgaggttgtcaatcagcataatgctccaattcctcaaggagggcgtggtgcaatccagtttgtgactcagtatcagcattcaagtgggcagagacgcatccgagtgaccaccattgctaggaactgggcagatgctcaaactcaaatccaaaacattgctgcatcttttgaccaggaggcagctgccattcttatggcccggctagcaatatatagagcagaaacagaagaaggtccagatgtgcttaggtggctggacagacagctcattcgactgtgtcagaaatttggagaatatcataaagatgacccaagttccttcagattttcagaaactttctccctttatccacagtttatgtttcatttaagaagatcttctttcctgcaagtttttaacaatagtcctgatgagagttcatattatcgtcaccattttatgcgtcaagatctgacccagtctctaattatgattcagcctatcctgtatgcgtattcttttagtggaccaccagagccggttcttcttgatagcagtagcattcttgcagatcgtattcttctcatggacacattcttccagattttgatttatcatggtgagaccatagcacagtggcggaagtcaggataccaggatatgcctgagtatgaaaatttccgccaccttctgcaagccccagtggatgatgcacaggaaattcttcactccagatttccaatgccaagatacattgacactgaacatggaggcagccaggcccgtttcctcctttcaaaagtcaacccttcacagactcataataatatgtatgcctgggggcaggagtctggagcacctattcttacagatgatgttagtttacaagtgtttatggatcacttgaagaaacttgctgtgtccagtgctgcttgaagtgctaataatgttaaagacacttaagaagatgaaataatattcaaatttcattttttcctttttccatttatctgtggaaaccaacagatattgctctatattttttgtattagtatggtttgagacaacatatggaaaatgttcacatttgtagattaagctggaattataatgagagcaataagaacaaatttattttgcttaccacagtgttatagctggttctagaaatttgaagtctttataacttaattatgtttaataaaaaatagagtctgcctcgtactacagatgtaactcatttgtatattgcagacagacccaaagtggcactgaattttcttgctcaccttttaaaaacttgttccttaattttagccagaaagcaaaaaaacaatagtaatgataaatgtgaacatttttgcttattcattgaatatttttctgtaattttcagcacttatgtatacactttttctgtacttactaggttaaggcagatttatttttatgatttgtttaggaattatttgattttataatggtaattttcatgatgataatgtttttggttatttggaaagatagtttagagatgaaaggtttttttgggtaacaatcccgcagctgacaaaaaatgtgaaatttccacaaaatatccaacttatgtgactaaacgcagtagtttttttaaaaggggagatagaaaataaatggttttgttggagtgcattttagtaagcctttgcagtaaaatgacggttgtaactactaaaccaaatttagttttcacagcatggttttgttgttttccccttgtttttcagaggtaaattttgcattatatccttcagtattttaacactattttggcagtttacacattactttttgtttttccttcctttttgtgaaatgtattaagttgtggttcttattgaaacagtattatataatgtttgcttaattatatcatgtgatgctcagttctattttgatttattcattagtattcacttttacctttaaagtttacttgtagcaaatatgtttacattgataaagccagatatgttttgacaatgaaatttacatatcaagtactgcaaataaaaggtggtgctatgatatatgcttaggaggacagttttaatgattgtacttgcatgaacacaatcatatgatggtaaagcagaaacttaagaaaaaattgtttatgtgttatattcaattagcttaaataagttgctttgttatattttatttgaattgaactacgctaggcctaaatgccaataaaatatacttttcactgttaaaaaaaaaaaaaaaaaaaaaaaaaaaaaaaaaaaaaaaaaaaaaaaaa

SEQ ID NO: 114 - DNA, 5217 bp, Homo sapiens
atgcattcttctagcatctttaacacctataaagagcgagtcagaagaacaagtagaggtgtgattgcctatatcagttcttccagctcagcctcaagccctgcctcttgtcacagtgagggttctgagaatagtttccagtcctcctcctcttctgttccatcttctccaaatagctctaattctgataccaatggtaatcccaagaatggtgatctcgccaatattgaaggcatcttgaagaatgatcgaatagattgttctatgaaaacaagcaaatcgagtgcacctgggatgacaaaaagtcatagtggtgtgacaaaatttagtggcatggttctactgtgtaaagtctgtggggatgtggcgtcaggattccactatggagttcatgcttgcgaaggctgtaagggtttctttcggagaagtattcaacaaaacatccagtacaagaagtgcctgaagaatgaaaactgttctataatgagaatgaataggaacagatgtcagcaatgtcgcttcaaaaagtgtctgtctgttggaatgtcaagagatgctgttcggtttggtcgtattcctaagcgtgaaaaacagaggatgctaattgaaatgcaaagtgcaatgaagaccatgatgaacagccagttcagtggtcacttgcaaaatgacacattagtagaacatcatgaacagacagccttgccagcccaggaacagctgcgacccaagccccaactggagcaagaaaacatcaaaagctcttctcctccatcttctgattttgcaaaggaagaagtgattggcatggtgaccagagctcacaaggatacctttatgtataatcaagagcagcaagaaaactcagctgagagcatgcagccccagagaggagaacggattcccaagaacatggagcaatataatttaaatcatgatcattgcggcaatgggcttagcagccattttccctgtagtgagagccagcagcatctcaatggacagttcaaagggaggaatataatgcattacccaaatggtcatgccatttgtattgcaaatggacattgtatgaacttctccaatgcttatactcaaagagtatgtgatagagttccgatagatggattttctcagaatgagaacaagaatagttacctgtgcaacactggaggaagaatgcatctggtttgtccaatgagtaagtctccatatgtggatcctcataaatcaggacatgaaatctgggaagaattttcgatgagcttcactccagcagtgaaagaagtggtggaatttgcaaagcgtattcctgggttcagagatctctctcagcatgaccaggtcaaccttttaaaggctgggacttttgaggttttaatggtacggttcgcatcattatttgatgcaaaggaacgtactgtcacctttttaagtggaaagaaatatagtgtggatgatttacactcaatgggagcaggggatctgctaaactctatgtttgaatttagtgagaagctaaatgccctccaacttagtgatgaagagatgagtttgtttacagctgttgtcctggtatctgcagatcgatctggaatagaaaacgtcaactctgtggaggctttgcaggaaactctcattcgtgcactaaggaccttaataatgaaaaaccatccaaatgaggcctctatttttacaaaactgcttctaaagttgccagatcttcgatctttaaacaacatgcactctgaggagctcttggcctttaaagttcacccttaaggcctttgtttatttaaacatgaactgatggtaactgtacattttgtgctaaaatgcatatttatatgtgtataccatatgtggagatagaaaagacctttaagacaataaaagattgtaggctatctctgtaatcatgcaatagctgttcggattgagaactcttcagccatgattagacgttgactgcatctccctgatagaccaatcagctgtgtcgcacttaaactggagaagttacactgaagtataatcacactgaatgttagactttttcatctgccaaaaccaaaaaccattttgatctccctgtggttatcaatataacgcacaatcacaagtgtatgaggacttagaaattaatcctttgtggtaggagttctgttgaatgatggaaatcttattactaccacaagcctatttgatctggtaattggagacttcgggatttaggagatctccatgtctgtatttactctaccactgctaaagtgtgtggtcctgggtagtttacttgcttgcggaaaatgagaattgatggtgtccccaatgccccacctcacagagttactaaaaaatgtctgtaaagcatatttacctcttgggagataggcactatgtaaataaggtaaaatttctgttattacaattattcataataatattcttttcttatttctaagcctttctgggaaatcatttcagtccacaccaaccatattattcagggttcctgccatatgtgtggggtatcctactgatacacacgtattcaaagtttatgggtacaacaaagacatagtacatgtacataatatgtatgtgaatatagttaaatatatttcttcacaatattttaaactgtgaagaactttatcatacaggaaacttaaaacaagaggtgtcaaaagacccaaattaggtgcattttacttgtttatgatggcataaccattgctttaaaatgtttagacagtagaatattgaatttatgctctatttttgtttatttaagcaacacttaatgtaaaagtgcaacaggcaattgaatccaaatttcaacgacaaaaaaaaaaacatgtattttagagttcatctttggcaaaatctttggttcagggtactagttgtttaaaagttgattcatattcttaccttgtgctgagaaaggttgcattgctgccccttatacacatgctgcagcttgatgttaaagaatttttattctttctgaagaactaattaatgtttaaagcaactgtttaatatgatggcatgtgtgtgtgtgcgtgcgtgtgtatgttctgagtccacttcttttttcctaaataacactacagggattttgtcatattagatttaatttataatttgaaaaatcatctagtgtgtgacctacaggcttagaaatggtatagtcaaagacattttatccacatttctaatagtggacttgattaagtagataagatcagcatctgtttatggtagtaggagaaatagccaaagttgaggattttatgtatgttttcctgtttacctggaaaatagcaattaattggattttttggtaaagattgccttctgtataatgtttggattatataaaattgcaaaaatgataacagcccgctttactgtactaagcctgttactttcatgacgtgtgagcagaatgccttattttgtaatcttgtttaacttgttgctactgggacttgatttactgtggcactagttaagtaagttaaaaaaaagttaaaccctctcattattaaagaggaaaggcgatggtgatgtctgtagtacaatataaaccataattgtgatttaccttaagtaggtataactcttatgggatatacagtatagtttttgtgaatctttacatgatagcattatctttttataattttttttcctaagataaacaaatgcatagttttcttctatgggtgatagaaacagctttttgaagtaatgaaaacctcaaaagatcatgttgattcttaatttttgccttttgcataagcctctttataacatgtatctttaaaacaattaagtctttaggaatgtgtaaccagaactatgttagtattgcttataaaactttagttaggttcaatatatacatatatacatctctatataggtatatagatttgcattttgtcttgtaaaattttatttgaataaattcttcctgtaggtaatgggaaacaaaattaatagttcatatgtcactcatagcatttctatatttgaaagtagcccaatataaaacttttgattctaaaattaaaccagcagcctattacaagcacattctttgattgagtcattggttataaacttactaaatgcagagaaagcagccaatttaggaaacttctgagttggtgggacactgttgattaataatgtactgtatgaattaagtgatgctttaactttgattttacattttaaagttaaaatgtgggcattatgtcagcaaacttaagggcattatgtcagcaagctaaaacattttttttcctgtgcttttaatgtatctctttacatgatctgagagaggattcaagttgatagaaatagctgaggggaaaagggggaacatcttgggatgaagcttgtccttatggtgatggtttaattacagattaaaaaattagaaggaaatttcagtggattaagtgtatagctttcatatctacatttcaagaaattaccattgtaacttgataagagatgatttattttatgtaaacatctttgcaaagcaaggtgtagcagctcagctagatttattactgtgcacgaaagtaaatacctatctcaattattctttttcttttccaatataaagtttgctgaatgtacaagaagagtttatcacttaggatatagaatttttttaggggttgggggaggggatctgttaggaaactgttacctataaacaaagattgactggattcgatccaaaagataaaacttgaagctattctggaactaacatggaaaaatgaaatggctattgtttaaaaaaatgatagaaatacattgttgatgggatatgagttaagtttattttctacaaactgtaattgatgaggacatggataatatcttcatgtttctgagaagtaatctgtatgtggggggaggggataataaatatttctaaccaactgtggtgtttggtgtctaatctaccttgccttttttgtaaaactaataatttaactcactacaagtatctttcccctgagcatagcaggatgttttatgtaaatctctgattcagcatggggaaatgtgtgtatatgtatatatgtgtgtgtgtatatacacacatatatatgtatatgtgtatatatgtatgtgtatatatatatatgtatatatacatgcacacacacacacagggct

SEQ ID NO: 115 - DNA, 866 bp, Homo sapiens
tcctctttttccggctggaaccatggagggtgtagaagagaagaagaaggaggttcctgctgtgccagaaacccttaagaaaaagcgaaggaatttcgcagagctgaagatcaagcgcctgagaaagaagtttgcccaaaagatgcttcgaaaggcaaggaggaagcttatctatgaaaaagcaaagcactatcacaaggaatataggcagatgtacagaactgaaattcgaatggcgaggatggcaagaaaagctggcaacttctatgtacctgcagaacccaaattggcgtttgtcatcagaatcagaggtatcaatggagtgagcccaaaggttcgaaaggtgttgcagcttcttcgccttcgtcaaatcttcaatggaacctttgtgaagctcaacaaggcttcgattaacatgctgaggattgtagagccatatattgcatgggggtaccccaatctgaagtcagtaaatgaactaatctacaagcgtggttatggcaaaatcaataagaagcgaattgctttgacagataacgctttgattgctcgatctcttggtaaatacggcatcatctgcatggaggatttgattcatgagatctatactgttggaaaacgcttcaaagaggcaaataacttcctgtggcccttcaaattgtcttctccacgaggtggaatgaagaaaaagaccacccattttgtagaaggtggagatgctggcaacagggaggaccagatcaacaggcttattagaagaatgaactaaggtgtctaccatgattatttttctaagctggttggttaataaacagtacctgctctcaaattgaaataaaaaaaaaaaaaaaaaaaaaaaaaaaaaa

SEQ ID NO: 116 - DNA, 2051 bp, Homo sapiens
tcatttcatgttatgttttcatttcccctctgtctgagagattgctctgatgtctttccttccataagtcctacggagatcgagcttacctcatttttctcccaggcctaggagctcaattaccaggatcactttcttccccagggtgtactacagacctccacatgttggacagtaggattcagcagagaatgagtcccacatcctcttttcatccataagccactcttcccaactactcttccgccttccattgtccctatgtctactttactgctcaatctggattttggggaacctcctcccaaaaaggcattagaaggaaatgccaagcaccgaaattttgtcaagaagcggaggctcttagaacggagaggctttctgagtaaaaagaaccaaccccctagcaaggcgcctaagttgcactctgaaccttcaaagaaaggggagactcctacggtcgatggcacttggaagaccccttccttcccaaaaaagaagacagctgcttccagcaatgggtcaggacagcccctggacaagaaagctgcagtgtcttggttgacccctgccccttcaaaaaaggctgattctgttgctgctaaagtagatttgctgggggagttccagagtgcccttccaaagatcaatagccacccaacccgctctcagaagaagagctcccagaagaaatcctctaaaaagaaccatcctcagaagaatgccccacagaactccacccaagctcattcagagaataaatgctccggagcatcccagaagttgccacggaagatggtggcaattgactgtgagatggtgggcacaggaccaaaggggcatgttagttccttggctcgatgtagcattgtcaactacaacggagatgtgctttatgacgagtacattcttcccccctgccacattgtggactaccgaaccaggtggagtggtatccggaagcagcacatggtgaatgccacacccttcaagattgctcgaggccagatcttgaagatactcacagggaagatagtggtggggcatgccatccacaacgacttcaaagcccttcagtactttcaccccaaatccctcacccgtgacacctcccatatcccccccctcaaccggaaggctgactgcccggagaatgccaccatgtctctgaagcatctcaccaagaagctgctaaaccgggatatccaggttgggaagagcggacattcctctgtggaagatgcccaggccaccatggagctatataagttggttgaagtcgagtgggaagagcacctagcccggaatccccctacagactagtggcaatggggacgctggtgatatgaggaggcagaggcagcacccaggagaaacagggcagtggaccaatggacagctccaccagctccacatctttggaagctagatttggggagagagaagctctaccccagacttaatacccattgaaatttcacctcaggtgttgtgtcctgtgtctggttaagtgtcccatggaaggggaaagccttcacgtcagaacccaaccctataccttttacttcttaaatggtgctaaccacaggtgtcccagggtgctctgtgccagttaagatttttaactttcaaggggcagggcatactgggaaatgtagtttcccaaactgccttatcacttgggtggacatatgtctccttttatgccttttggtcttgagtaattaacagcatcctcttccacgctcagaagtgttctggttggggccaggcatggtggctcacgcctgtagtcccaacacttagggaggccgaggcgggcggatcacctgagatcaggagttcaagaccagcctggccaacatggcgaattcccgttctctactaaaaatacaaaaaatgtgtggggtgtggtggcaggagcctgtaatcctagctactcaggaggctgaggcaggagaatcgcttgagcccaggaggcggagattgcagtgagccgagatcgtgtcactgcactccagcctgggtgacaagagtgagactccgtctcc

SEQ ID NO: 117 - DNA, 2065 bp, Homo sapiens
gggtctccgaacctgaaaccgggagcttcctgctcgtgttcgctgttgagaagctacccgcggggttgtagacctcggacctcatggcagagataattcaggaacgcatagaagatcggctcccggaattggaacagctggagcgcattggactgttcagtcatgcggagattaaggctatcattaagaaggcttccgatctagagtacaaaatccagagaagaacccttttcaaggaagactttatcaattatgttcaatatgaaattaatcttttggagctgatccagagaagaagaacacgcattggatattcatttaagaaggatgagattgagaattctattgtacaccgggtacaaggtgttttccagcgtgcctcagcaaaatggaaagacgatgttcaactttggctctcctatgtggctttttgtaagaagtgggctactaaaactcgacttagcaaggtattctctgccatgttggcgattcattccaacaaaccagctttgtggattatggcagccaaatgggaaatggaagatcgattgtcttcagaaagcgcaaggcaactatttcttcgcgcactgcgctttcatccagagtgcccaaaactttataaagaatactttaggatggagctgatgcatgctgaaaaactgaggaaggagaaggaagaatttgaaaaagccagtatggatgtggagaatcctgattattctgaagaaatccttaagggcgagttggcatggatcatctacaaaaattctgtaagcataattaaaggtgcagaatttcacgtgtcactgctttcgattgcacagctatttgactttgccaaagatctacaaaaagagatttatgatgaccttcaggctctacacacagatgatcctctcacttgggattatgtggcaaggcgagaattagagattgagtcacagacagaagagcagcctacaacgaaacaagccaaagcagtggaggtcggccggaaggaggagaggtgctgtgctgtgtatgaagaggcagtgaagactctgccaacagaggccatgtggaagtgttacatcaccttttgcttggaaagatttactaagaagtcaaatagtgggttccttagagggaagaggttggaaagaaccatgactgtattcaggaaggcacatgaactgaagcttctgtcagaatgccaatacaagcagttgagtgtttcgttgctgtgttataacttcctgagggaagctctggaagtggcagtagctggaactgaattgtttagagactctgggacaatgtggcagctgaagctgcaggtgctgatcgagtcaaagagccctgacatagccatgctttttgaagaagcctttgtgcacctgaaaccccaggtttgtctgccattgtggatttcctgggcagagtggagtgaaggtgccaaaagccaagaagacactgaggcagtctttaagaaagctctcttagctgtcataggtgccgactcagtaaccctgaagaataagtacctggattgggcttatcgaagtggtggctacaaaaaggccagagctgtgtttaaaagtttacaggagagccgaccattttcagttgactttttcaggaaaatgattcagtttgaaaaggagcaagaatcctgcaatatggcgaacataagagaatattatgagagagctttgagagagtttggatccgcagattctgatctttggatggattatatgaaagaagaattgaaccacccccttggtagacctgagaactgtggacagatctactggcgagcgatgaaaatgttgcagggagagtcagcagaggcatttgtagctaaacatgctatgcatcagactggccatttatgaagatgaagaatacagtcagctttgtgaaatagtattgcaagcaagccccgtgggcaaatttgtattgagtccatctgtaatttgctcagtgatggcagacaagatggctgtctggttttgagacacactttaattttatgttaacttgttaaatctttttaaaaattaaaaaatttttatgattgaga

SEQ ID NO: 118 - DNA, 395 bp, Homo sapiens
tccaccacgcctcccacctgccccactgcttcttctcctctcccttaggaactctagcttcacctcgcttcgtaatggaccccaattgctcctgctccactagctcttcctgcacctgcaccagctcctgcaaatgcagagagtgcaaatgcacctcctgcaagacgagctgctgctcctgctgccccgtgggctgtgccaagtgtgcccagggatgtgtttgcaaagggacatctgacaagtgcagctgctgctcctgatgtagggaaagctgtgttcccagaagtagaaagtgtacaaacctggaattgttttccatacaaccctgacccattagtacatttgggtttctaaaaataaaatatgttaatgataataaaagttgactttattct

SEQ ID NO: 119 - DNA, 6970 bp, Homo sapiens
gtggctgaggccggcagcagcgggcggcagctgcggcgcaaccggctccggagctgcctggcgcggccgggcgggcggcgccgctcaggctcgggctccggctgggcccggcgcggcctcggggctgcccatggggcgcggggggccgggccggtgacgccggacgcccatggacgcctctgaggagccgctgccgccggtgatctacaccatggagaacaagcccatcgtcacctgtgctggagatcagaatttatttacctctgtttatccaacgctctctcagcagcttccaagagaaccaatggaatggagaaggtcctatggccgggctccgaagatgattcacctagagtctaactttgttcaattcaaagaggagctgctgcccaaagaaggaaacaaagctctgctcacgtttcccttcctccatatttactggacagagtgctgtgataccgaagtgtataaagctacagtaaaagatgacctcaccaagtggcagaatgttctgaaggctcatagctctgtggactggttaatagtgatagttgaaaatgatgccaagaaaaaaaacaaaaccaacatccttccccgaacctctattgtggacaaaataagaaatgatttttgtaataaacagagtgacaggtgtgttgtgctctccgaccccttgaaggactcttctcgaactcaggaatcctggaatgccttcctgaccaaactcaggacattgcttcttatgtcttttaccaaaaacctaggcaagtttgaggatgacatgagaaccttgagggagaagaggactgagccaggctggagcttttgtgaatatttcatggttcaggaggagcttgcctttgttttcgagatgctgcagcagttcgaggacgccctggtgcagtacgacgaactggacgccctcttctctcagtatgtggtcaacttcggggccggggatggtgccaactggctgacttttttctgccagccagtgaagagctggaacggattgatcctccgaaaacccatagatatggagaagcgggaatcgatccagaggcgagaagccaccctgttagatctgcgcagttacctgttctctcgccagtgcaccttgctgctcttcctgcagaggccgtgggaggtggcccagcgcgccctagagctgctgcacaactgcgtgcaggaactgaagctcttagaagtctctgtcccacctggtgctctggactgctgggtgtttctgagctgtctggaggtgttgcagaggatagaaggctgctgtgaccgggcacagatcgactcaaacattgcccacactgtggggctatggagctatgccacagaaaagttaaagtccttgggctatctatgtggacttgtgtcagagaaaggacctaactcagaagatctcaacaggacagttgaccttttggcaggtttgggagctgagcgaccagaaacagccaacacagctcagagtccttataagaaactgaaagaagcattatcgtcagtggaagcttttgaaaaacactacttagatttgtcccatgccaccattgaaatgtatacaagcattgggaggattcgatctgctaagtttgttggaaaagatctggcagagttttacatgaggaaaaaggctccacaaaaggcagaaatctatcttcaaggagcactgaaaaactacctggctgagggctgggcactccccatcacacacacaaggaagcagctggccgaatgtcaaaagcaccttggacaaattgaaaactacctgcagaccagcagcctcttagccagtgaccaccacctcactgaagaggagcgcaagcacttctgccaggagatacttgactttgccagccagccgtcagacagcccaggtcataagatagtgctacccatgcattcctttgcacaactgcgagatctccattttgatccctccaatgccgtggtccacgtgggcggcgttttgtgcgttgagataaccatgtacagccagatgcctgtgcctgttcacgtggagcagattgtggtcaatgtccacttcagcattgagaaaaacagctaccggaagactgcggagtggcttaccaagcacaagacgtccaatgggatcattaactttccacccgagaccgcacctttccctgtatcccaaaacagtttgcccgcgctggagttgtatgaaatgtttgagagaagcccatctgataactccttgaacacgactgggattatctgcagaaacgtccacatgctcctgagaaggcaggagagcagctcctctctagagatgccctcaggggtggctctggaggagggtgcccacgtgctgaggtgcagccacgtgaccctggaaccaggggccaaccagataacattcaggactcaggccaaggaacctggaacgtatacactcaggcagctgtgcgcctcggtgggctccgtgtggttcgtcctccctcacatctaccccattgtgcagtacgacgtgtactcacaggagccccagctgcacgtggagccgctggctgatagccttctggcaggcattcctcagagagtcaagttcactgtcactaccggccattatacgataaagaatggagacagcctgcagcttagcaatgccgaagccatgctcatcctgtgccaggcggagagcagggctgtggtctactccaacacgagagaacagtcttctgaggccgcgctccggattcagtcctccgacaaggtcacgagcatcagtctgcctgttgcgcctgcgtaccacgtgatcgaatttgaactggaagttctctctttaccttcagccccagcactcggaggggagagtgacatgctggggatggcagagccccacaggaagcataaggacaaacagagaactggccgctgcatggttaccacagaccacaaagtgtcgattgactgcccgtggtccatctactccacagtcatcgcactgaccttcagcgtacccttcaggaccacacacagcctcctgtcctcaggaacacggaaatatgttcaagtttgtgtccagaatttgtcagaacttgactttcagctgtcagatagttatcttgtagataccggtgatagtaccgacctgcaactagtaccactgaacacgcagtcccagcagcccatctacagcaagcagtcggtgttcttcgtctgggaactcaagtggacagaagagcctcccccttctctgcattgccggttctctgttggattttccccagcttctgaggaacagctgtctatctccttaaagccgtatacttatgaatttaaagtggaaaatttttttacattatacaacgtgaaggctgagatctttcccccttcgggaatggagtattgcagaacaggctccctctgctccctggaggttttgatcacgaggctctcagacctcttggaggtggataaagatgaagcactgactgaatctgatgagcatttttcgacaaagcttatgtatgaagttgtcgacaacagtagcaactgggcagtgtgtgggaaaagctgcggtgtcatctccatgccagtggctgctcgggccactcacagggtccacatggaagtgatgccgctcttcgccgggtatctccccctgcccgacgtcaggctgttcaagtacctcccccatcattctgcacactcctcccaactggacgctgacagctggatagaaaacgacagcctgtcagtagacaagcacggggacgaccagccggacagcagcagcctcaagagcaggggcagcgtgcattcggcctgcagcagcgagcacaaaggcctacccatgccccggctgcaggcactgccggccggccaggtcttcaactccagctcgggcacacaagtcctggtcatccccagccaagatgaccacgtcctggaagtcagtgtaacatgacaacgccagggtgaacacacgccacttcccagctaggagtgcactttatgggactgtgactggactcttccgttctggctccagccagaccttcagtggtcctgcctggccgtggggacatcagagagtgtcatcacgcagctggccagctgagttctgttgttgttttcatgccgcctgtgatctcagattcctgcttttctcaccccgtccccatgctggtgtccgacgccgcttactcagagccctggcctccctccccctacctcacacgctgctcatgaaagtttccacccacgctgtctccacggaacagcctccgtctgctggctcttcgtggaaggccatttgtctttcaggtagacactcagcagccctcacggtcttagtgacgtgtgtgcctttctggtcacacagctgcccagtttcctgatcggggtggatttgtgtcccctaaggggtaaaacagccgtttaccgcagatcctctcattgtgcttttctagaataacacccttctaggggaggcgggtgggggagggagggatcataaccccttctgtgccttgggatgccggagctgggggacctggaggcccatcagccggagccacgtgaaaggtactgaagaaagctgagacccggctgtgaggagcgcctcagcggtgaggtggtttagggataaatgtttctggaaccctgtggtcccccataatgttgatagaatatcatatgcactgggagttaaatatatttaatttaatgatcattatatatgtgggggttaatatgttgtttttctgtccctttaaagtctttacatgtaattgtagctgtataatcgttatttttcttttgcatcttaagtcttagaaattaagatattccatcgtgaggatgagagaggtcctcagtgtgtttttggtctggttgtagggaaggactcaagtcctggaatgtcctccactggtctactgagttgcagtcacactgttccaatggattatttgctttcggttgtaaatttaattgtacatatggttgatttattatttttaaaaatacagactaactgatgtaatgtttatgtataagttgcaccaaaaatcaaggacaaaaataagtgtgtttgtttttacaggtgtgaaagtcacagcttgtaaataagtgttgtatgtattaaaccttttccagttctccaaagcgatgtatttttgtacacttgaaatagagtactcttaatttactgggcaaatgtgcttggaattgaacttgacaagattagctcaagcagatagagtcgggtccagcagtgggtggccctcgtgtgaatccccgtggatgtgcaagttgtggagagaaggagcaccgggttcctgcccagcactgtgcttgcgggaggcggtggggcatgggaggaaggaggcacagaccggggaaatatgacagccgtcatttccagtattctctgtgttgtcttttagctcattcaataaataaaggtggtgtgatttttttttcctcctgtctttttcatttgtagaaactggagacgtgtaaagaagataaataattgtgtaattaaactttccagaaatttatcttcctcatgtgcagtttaacaaacttggtcaaactagttagcaaattagaacttcagaatctaatgatagtttagggtttctaaaataaggttttttattgtaaaaattgacgattgccctgcatttctaccaagtcctgtgaataaagagatgggagatttgattccgtcagaagagactgtaatccgtgtcgtcagcctgggagccttccccagtgtaatgtagctttctctcttaccttctggaagagggaatgtttcatttattactgtttgattttcttgtatctggttctactcccaggatgaaattatccaactacatatatatttagaggaagaaagtgaaggggaaatttaaaatgtttacggcgcttaattgcctggaaatgaaatgaaatcaaatttatcagtttttttccccctaattacccaaaagatcttttgcaaactatgttacatgaatgcttctgcctctttaagacaaagaagaatgtcacccaaaattgtcatttttttcttaatgttcatcataaaagtcctaaaagagtaactgtaattggatgtttattgtttttatctaaagtaaggtgtatgtgtttgagacaagctggttttgttgataaagagatgttaaataattgtgaagccagatatgcaatgtgtatctgaaaagcaaggaatttgcagccgttttacaaatatctgtggaacatgtaaatactgtcaaatggaaaataaaataagttataatttttgtgaatttcatgggatgtcctatgattggaaaaattataactcttctgattctaatgtggaaattgttgtatttaatctgaaaatgactttacctacaacagttccattgtcagcacagcctaggaaggtcagatcctgtattaattactcttagtggagatgccagatatcccatacagaattagcagagaaaatacacacaggcttctattcaaattttctttagtgcttaaaattaagttttaaaatgaaatcagacactgcaggtttgtatataaaatgaaaagctatactactttttacaaaagggcaaactgggctgatgtaaatgttttactttcaactgtgttctttaaaataaatcctacctggtttttaaattttatttttcatgaaaatgctcctttctctacatttattcatcctatatacatcaggctgtaagaccccccccagtcatcattaatacaatgtgttgggattctgtgactggaaaaggtgacaagttggtgactttgacactgcaggtattccattttcatggtttactatgaaaagtcatttttcatattatgtaatatattgttagattaaaaccattgtattaagactttaaaatgtaagcattgtaattctgaaaatacacattttaagaagaaa

SEQ ID NO: 120 - DNA, 3077 bp, Homo sapiens
agacccttccagctgccgctgtcgtctttgcttcagccgcagtcgccactggctgcctgaggtgctcttacagcctgttccaagtgtggcttaatccgtctccaccaccagatctttctccgtggattcctctgctaagaccgctgccatgccagtgacggtaacccgcaccaccatcacaaccaccacgacgtcatcttcgggcctggggtcccccatgatcgtggggtcccctcgggccctgacacagcccctgggtctccttcgcctgctgcagctggtgtctacctgcgtggccttctcgctggtggctagcgtgggcgcctggacggggtccatgggcaactggtccatgttcacctggtgcttctgcttctccgtgaccctgatcatcctcatcgtggagctgtgcgggctccaggcccgcttccccctgtcttggcgcaacttccccatcaccttcgcctgctatgcggccctcttctgcctctcggcctccatcatctaccccaccacctatgtccagttcctgtcccacggccgttcgcgggaccacgccatcgccgccaccttcttctcctgcatcgcgtgtgtggcttacgccaccgaagtggcctggacccgggcccggcccggcgagatcactggctatatggccaccgtacccgggctgctgaaggtgctggagaccttcgttgcctgcatcatcttcgcgttcatcagcgaccccaacctgtaccagcaccagccggccctggagtggtgcgtggcggtgtacgccatctgcttcatcctagcggccatcgccatcctgctgaacctgggggagtgcaccaacgtgctacccatccccttccccagcttcctgtcggggctggccttgctgtctgtcctcctctatgccaccgcccttgttctctggcccctctaccagttcgatgagaagtatggcggccagcctcggcgctcgagagatgtaagctgcagccgcagccatgcctactacgtgtgtgcctgggaccgccgactggctgtggccatcctgacggccatcaacctactggcgtatgtggctgacctggtgcactctgcccacctggtttttgtcaaggtctaagactctcccaagaggctcccgttccctctccaacctctttgttcttcttgcccgagttttctttatggagtacttctttcctccgcctttcctctgttttcctcttcctgtctcccctccctcccacctttttctttccttcccaattccttgcactctaaccagttcttggatgcatcttcttccttccctttcctcttgctgtttccttcctgtgttgttttgttgcccacatcctgttttcacccctgagctgtttctctttttcttttcttttttttttttttttttttttaagacggattctcactctgtggcccaggctggagtgcagtggtgcgatctcgactcactgcaacccccgcctcctgggttcaagcgattctcctgccccagcctcccaagtagctgggaggacaggtgtgagctgccgcacccagcctgtttctctttttccactcttcttttttctcatctcttttctgggttgcctgtcggctttcttatctgcctgttttgcaagcaccttctcctgtgtccttgggagccctgagacttctttctctccttgcctccacccacctccaaaggtgctgagctcacatccacaccccttgcagccgtccatgccacagccccccaaggggccccattgccaaagcatgcctgcccaccctcgctgtgccttagtcagtgtgtacgtgtgtgtgtgtgtgtgtgtgtgtgtgtgtgtttggggggtggggggtgggtagctggggattgggccctctttctcccagtggaggaaggtgtgcagtgtacttcccctttaaattaaaaaacatatatatatatatatttggaggtcagtaatttccaatgggcgggaggctttaagcaccgaccctgggtccctaggccccgcctggcactcagccttgccagagattggctccagaatttttgccaggcttacagaacacccactgcctagaggccatcttaaaggaagcaggggctggatgcctttcatcccaactattctctgtggtatcaaaaagaaaaaaaaaaaaaaagaaggagtcggggccgggcgtggtggctcacgcctgtaatcccagcactttgggagaccaagtcaggcaatcatctgaagtcaggagttcaagaccagcctggccaacatggtgaaagcatgtctctattaaaaatacaaaaattagccgggcgtggtggcgggcgcctgtaatcccaggtatttggggggactgagacaggagaatcccttcaacccgggaggtggaggttgcagtaagtcaagatggcaccactgtgctccagcctgggggacagagcgagactccatctcaaaaaaaaaaaggaatcggacgaagaaccacaggatgttgaagacaactgtctgaagtatttgtgagggacagcgatgtggccctctgtgttaagaataacgtgtcctgctttggcagagagaagaaaatagccactgcccgctttcaaggcaagatcgaccttttctgttttgttttgtttttctttctttttcctggccatgaggacaaaaattactgagtggcccttaaagagggaagtttgttttcagctgttctcttttgcccgtaggtgggagggtggggattgctgcgtcctagctagaggaatggctttgcttgaatgtgtagtgcacacgcacgggtgtttctgtgtgctagttgcttcttgctgctgcttcctgcttgtctgggactcacatacataacgtgatatatatatatatatatataaatgtataaatatatattttatttttttttaaatccctggagcttctggttcctatcagttcctgttgttaatcgtagaaccgttgtcccttcccccattcccgtatccatcatgttctttttcttttaaatatcaatataaaggtaaaagaaaaaaaaaaaaaaaaaaaaaaaaa

SEQ ID NO: 121 - DNA, 3434 bp, Homo sapiens
aatcaaaaaacttattcttccaaagagagattgttattattcctcacgatgacccgacagtctctgctttctttttcctttcttccagaaggagatttaaccatagtagaaagaatggagaactattaactgcctttcttctgtgggctgtgattttcagaggggaatgctaagaggtgattttcaatgttgggactcaaaggtgaagacactgaaggacagaatttttggcagaggaaagatcttcttcggtcaccatacttgagttagctctagggaagtggaggtttccatttggaattctatagcttcttccaggtcatagtgtctgccccccaccttccagtatctcctgatatgcagcatgaatgaaaatggcaagtttcctggccttccttctgctcaactttcgtgtctgcctccttttgcttcagctgctcatgcctcactcagctcagttttctgtgcttggaccctctgggcccatcctggccatggtgggtgaagacgctgatctgccctgtcacctgttcccgaccatgagtgcagagaccatggagctgaagtgggtgagttccagcctaaggcaggtggtgaacgtgtatgcagatggaaaggaagtggaagacaggcagagtgcaccgtatcgagggagaacttcgattctgcgggatggcatcactgcagggaaggctgctctccgaatacacaacgtcacagcctctgacagtggaaagtacttgtgttatttccaagatggtgacttctatgaaaaagccctggtggagctgaaggttgcagcactgggttctgatcttcacgttgatgtgaagggttacaaggatggagggatccatctggagtgcaggtccactggctggtacccccaaccccaaatacagtggagcaacaacaagggagagaacatcccgactgtggaagcacctgtggttgcagacggagtgggcctgtatgcagtagcagcatctgtgatcatgagaggcagctctggggagggtgtatcctgtaccatcagaagttccctcctcggcctggaaaagacagccagcatttccatcgcagaccccttcttcaggagcgcccagaggtggatcgccgccctggcagggaccctgcctgtcttgctgctgcttcttgggggagccggttacttcctgtggcaacagcaggaggaaaaaaagactcagttcagaaagaaaaagagagagcaagagttgagagaaatggcatggagcacaatgaagcaagaacaaagcacaagagtgaagctcctggaggaactcagatggagaagtatccagtatgcatctcggggagagagacattcagcctataatgaatggaaaaaggccctcttcaagcctgcggatgtgattctggatccaaaaacagcaaaccccatcctccttgtttctgaggaccagaggagtgtgcagcgtgccaaggagccccaggatctgccagacaaccctgagagatttaattggcattattgtgttctcggctgtgagagcttcatatcagggagacattactgggaggtggaggtaggggacaggaaagagtggcatataggggtgtgcagtaagaatgtgcagagaaaaggctgggtcaaaatgacacctgagaatggattctggactatggggctgactgatgggaataagtatcggactctaactgagcccagaaccaacctgaaacttcctaagccccctaagaaagtgggggtcttcctggactatgagactggagatatctcattctacaatgctgtggatggatcgcatattcatactttcctggacgtctccttctctgaggctctatatcctgttttcagaattttgaccttggagcccacggccctgactatttgtccagcgtgaaaagaagaagagagttcctccaattctgaccgagtgctgatcattccctagagacaccagtaaccccgggcttagctaacgaaagtggggagcctcaggctgaagtaacttttctctgcttctccctgcccagctcagagctgagggcctccccctccacagcaaccaatcacaaccataaagctacaagcacgcactgaagcactttactgatactcattcaattattcatatgacagttgtttgagtttggtaccatcttattttccccttatacagataaggaaactggggtgcagaaaagtgaattgactacaaagtagacatgactagttaacaacacagctgggatctaaacagcaataactaacattaatggagaacttaaaatgctctgagtgctgtgttatgagctttggtggatgtcactcctttaatcctcgcaacaccctgtcgggtagtctcatttagcaagtatggaagttgaggcagggcaacattaagcaacttacataactcatgcagtaatttctgcagttgggagatgttcagcttcagtccccggccctatggccgttcttttccaccctgtttcttcccccataggaagaacccacctgtagccctgaggttcttttcccaggatggctccaggataaggatcactgtaggtggttgtggagttgacacccctgttgactccttcccagctgattgtcagagccttagacccagcacgccttggattagctctgcagagtgtcttggttgagagaataacctcaccgtacccacatgacacgtgatttggaaagagactagaggccacacttgataaatcatggggaacagatgtgttccacccaacaaatgtgataagtgatcatgcagccagagccagccttccttcaatcaaggtttccaggcagagcaaataccctagagattctctgtgatataggaaatttggatgaagggagctagaagaaatacagggatttttttttttttttaagatggagtcttactctgttgctaggctggagtgcagtggtgcgatctcagctccctgcaacctccacctcctgggttcaaacaattctcctgcctcagcctcccgagtactgggaatataggtgcacgccaccacacccaacaaatttttgtacttttagtacagatgagggttcactatgttggccaggatggtctcgatctcttgacctcatgatccacccacctcggtctcccaaagtgctgggattacaggcttgagccaccgggtgaccggcttacagggatatttttaatcccgttatggactctgtctccaggagaggggtctatccacccctgctcattggtggatgttaaaccaatattcctttcaactgctgcctgctagggaaaaactactcctcattatcatcattattattgctctccactgtatcccctctacctggcatgtgcttgtcaagttctagttgttcaataaatttgttaataatgctgactcttcaa

SEQ ID NO: 122 - DNA, 3270 bp, Homo sapiens
acttttcttttcctctttgactgagcaccgaggggcagttggcagcttcacctcagagctgcaggaaggaacggggcagtgaaaatcgaatcgggtgtgatcctaggccaagctcatggcccagcagggccagcaggggcagatggcaagtggagacagcaatctcaacttcaggatggtcgcagagatccagaacgtagagggtcagaacctgcaggagcaggtttgccctgagcccattttcaggttcttcagagaaaacaaggtggagattgcaagtgcaataacaaggccatttcctttccttatgggcctccgagaccgctccttcatctccgagcagatgtatgaacattttcaagaagcttttagaaacctggtcccagtgacaagagtgatgtattgtgtactcagtgaactggagaagacatttggctggtcacatctggaagcattgttcagcaggattaacctgatggcctatcctgatttaaacgagatttacagaagcttccagaatgtatgctatgaacactcacctctccaaatgaataatgtaaacgatttagaagatagacccagattactaccatatggtaaacaagagaacagcaatgcctgtcatgaaatggatgatatagcagtgcctcaggaagccttgagctcctcgccaaggtgtgagccaggtttctcttcagagtcttgtgagcagttagctctcccaaaggctggtggaggagatgctgaagatgcacccagcctactaccaggtgggggagtgtcctgtaaacttgctatacaaatagatgaaggagaatcagaagaaatgcccaagttactgccttatgatacagaagttctagaaagcaacgggatgatagatgcggcaaggacatacagcacagcaccaggggagaaacagggagaggaggaaggcaggaacagtcccagaaaaagaaaccaagacaaggagaagtaccaagagagtccagagggaagagacaaagagacctttgatctaaaaactccccaagtcactaatgaaggagaaccagagaaggggctctgtctactaccaggtgaaggagaagagggcagtgatgactgttcagaaatgtgtgatggagaagagccccaggaagcctctagctccctagcaagatgtgggtcagtttcttgtttatctgcagagacctttgatctaaagactccccaagtcactaatgaaggagaaccagagaaggagctcagtctactaccaggtgaaggagaagagggcagtgatgactgttcggaaatgtgtgatggagaagagcgccaggaagcctctagctccctagcaagacgtgggtcagtgtctagtgaactagaaaatcacccaatgaatgaagaaggagaatcagaagagcttgcttctagcctgctatatgataatgtaccaggagcggagcaatcagcatatgaaaatgagaagtgttcctgtgtcatgtgtttctcagaagaggtgccaggaagcccagaagcaaggacggaaagtgatcaagcgtgtggcacaatggatactgtggatattgcaaacaactccactttgggaaaacccaagaggaaaagaagaaaaaagagggggcatggctggagcagaatgagaatgagaaggcaggaaaacagccaacaaaatgataatagcaaagccgacggccaggtggtctccagtgaaaagaaggcgaacgtgaatctgaaagacctttccaagattagggggagaaagagaggcaaacctggaacccgcttcactcagagtgacagagctgcacagaaaagagtccgatcaagagcttcaagaaagcacaaagatgaaactgtggattttaaggctcctttgcttccagtgacctgtggtggggtgaagggaattttacataagaagaaattgcagcaaggaatcttggtgaagtgtatacagactgaggatggaaaatggttcacccccacggaatttgaaatcaaaggaggccatgcaagatcaaagaactggaggctgagtgtgcgctgtggcgggtggcccctacgatggctgatggagaatggatttctgcctgatcctccaagaatacgttacaggaaaaaaaagagaatactgaagtctcaaaacaatagctcagttgacccttgtatgagaaacctggatgagtgtgaggtgtgccgggacggaggggagctgttctgttgcgacacttgttcaagagtcttccatgaggactgtcacatcccgcctgtggaagctgagaggaccccgtggaattgcatcttctgcaggatgaaggagtctccgggaagccaacagtgttgtcaggaatctgaggtcctggagaggcagatgtgtcctgaggaacagttgaaatgtgagttcctcctcttgaaagtctattgctgttctgagagctccttttttgccaagattccatactattattatattagagaggcgtgtcaaggcctgaaggagcccatgtggttggataaaatcaagaaaaggctgaatgagcacggttacccccaagtggaggggtttgtacaagacatgcgcctcatcttccagaaccacagggcctcttacaagtacaaggattttggccaaatgggatttagactggaggctgagtttgagaagaatttcaaggaagtgtttgctattcaggaaacaaatgggaacaattgactggattagtggatgctgaaagcattcagcaaatggcaccctaaaatatgccgctggtttgccactgacttcaaaatgaggtcacttgggcacagcacatgcagggaggggcttttctctgagcctccttcatctgcccaaagacaaatcctcaaaaggaaattcaatcatcatgaatcacaaccccaagtatctcatcagccagggaagagtaagtgggatcacagggaaggatgttggcagcgacaccatcccatacaggctcttacctcttctcctgagggctgctccagacaacatttattacccagaagaccttttgtctgaaaaccagccaagctttattcaggacacacttcttgccttcactttcccacttccgtggccacctccatgcagaagccctaagcccacattctttcgatagctcacggtggtgcatgagtgtccatcatctgactcttctcggagtctcatattttgtgggactcctgtgcaaacatatgttattaaaatttttttcctcctgttaaaaaaaaaaaaaaaaaaaa

SEQ ID NO: 123 - DNA, 5946 bp, Homo sapiens
ttttttttttttttttgcttaaaaaaaagccatgacggctctcccacaattcatcttccctgcgccatctttgtattatttctaatttattttggatgtcaaaaggcactgatgaagatattttctctggagtctccttctttctaacccggctctcccgatgtgaaccgagccgtcgtccgcccgccgccgccgccgccgccgccgccgcccgccccgcagcccaccatgtctcgccgcaagcaaggcaaaccccagcacttaagcaaacgggaattctcgcccgagcctcttgaagccattcttacagatgatgaaccagaccacggcccgttgggagctccagaaggggatcatgacctcctcacctgtgggcagtgccagatgaacttcccattgggggacattcttatttttatcgagcacaaacggaaacaatgcaatggcagcctctgcttagaaaaagctgtggataagccaccttccccttcaccaatcgagatgaaaaaagcatccaatcccgtggaggttggcatccaggtcacgccagaggatgacgattgtttatcaacgtcatctagaggaatttgccccaaacaggaacacatagcagataaacttctgcactggaggggcctctcctcccctcgttctgcacatggagctctaatccccacgcctgggatgagtgcagaatatgccccgcagggtatttgtaaagatgagcccagcagctacacatgtacaacttgcaaacagccattcaccagtgcatggtttctcttgcaacacgcacagaacactcatggattaagaatctacttagaaagcgaacacggaagtcccctgaccccgcgggttggtatcccttcaggactaggtgcagaatgtccttcccagccacctctccatgggattcatattgcagacaataacccctttaacctgctaagaataccaggatcagtatcgagagaggcttccggcctggcagaagggcgctttccacccactccccccctgtttagtccaccaccgagacatcacttggacccccaccgcatagagcgcctgggggcggaagagatggccctggccacccatcacccgagtgcctttgacagggtgctgcggttgaatccaatggctatggagcctcccgccatggatttctctaggagacttagagagctggcagggaacacgtctagcccaccgctgtccccaggccggcccagccctatgcaaaggttactgcaaccattccagccaggtagcaagccgcccttcctggcgacgccccccctccctcctctgcaatccgcccctcctccctcccagcccccggtcaagtccaagtcatgcgagttctgcggcaagacgttcaaatttcagagcaacctggtggtgcaccggcgcagccacacgggcgagaagccctacaagtgcaacctgtgcgaccacgcgtgcacccaggccagcaagctgaagcgccacatgaagacgcacatgcacaaatcgtcccccatgacggtcaagtccgacgacggtctctccaccgccagctccccggaacccggcaccagcgacttggtgggcagcgccagcagcgcgctcaagtccgtggtggccaagttcaagagcgagaacgaccccaacctgatcccggagaacggggacgaggaggaagaggaggacgacgaggaagaggaagaagaggaggaagaggaggaggaggagctgacggagagcgagagggtggactacggcttcgggctgagcctggaggcggcgcgccaccacgagaacagctcgcggggcgcggtcgtgggcgtgggcgacgagagccgcgccctgcccgacgtcatgcagggcatggtgctcagctccatgcagcacttcagcgaggccttccaccaggtcctgggcgagaagcataagcgcggccacctggccgaggccgagggccacagggacacttgcgacgaagactcggtggccggcgagtcggaccgcatagacgatggcactgttaatggccgcggctgctccccgggcgagtcggcctcggggggcctgtccaaaaagctgctgctgggcagccccagctcgctgagccccttctctaagcgcatcaagctcgagaaggagttcgacctgcccccggccgcgatgcccaacacggagaacgtgtactcgcagtggctcgccggctacgcggcctccaggcagctcaaagatcccttccttagcttcggagactccagacaatcgccttttgcctcctcgtcggagcactcctcggagaacgggagtttgcgcttctccacaccgcccggggagctggacggagggatctcggggcgcagcggcacgggaagtggagggagcacgccccatattagtggtccgggcccgggcaggcccagctcaaaagagggcagacgcagcgacacttgtgagtactgtgggaaagtcttcaagaactgtagcaatctcactgtccacaggagaagccacacgggcgaaaggccttataaatgcgagctgtgcaactatgcctgtgcccagagtagcaagctcaccaggcacatgaaaacgcatggccaggtggggaaggacgtttacaaatgtgaaatttgtaagatgccttttagcgtgtacagtaccctggagaaacacatgaaaaaatggcacagtgatcgagtgttgaataatgatataaaaactgaatagaggtatattaatacccctccctcactcccacctgacaccccctttttcaccactccccttccccatcgccctccagccccactccctgtaggatttttttctagtcccatgtgatttaaacaaacaaacaaacaaacagaagtaacgaagctaagaatatgagagtgcttgtcaccagcacacctgttttttttctttttctttttcttttttctttttccttttttttttttttcctttatgttctcaccgtttgaatgcatgatctgtatggggcaatactattgcattttacgcaaactttgagcctttctcttgtgcaataatttacatgttgtgtatgtttttttttaaacttagacagcatgtatggtatgttatggctattttaaattgtccctaattcgttgctgagcaaacatgttgctgtttccagttccgttctgagagaaaaagagagagagagagaaaaagaccatgctgcatacattctgtaatacatatcatgtacagttttattttataacgtgaggaggaaaaacagtctttggattaaccctctatagacagaatagatagcactgaaaaaaaatctctatgagctaaatgtctgtctctaaagggttaaatgtatcaattggaaaggaagaaaaaaggccttgaattgacaaattaacagaaaaacagaacaagtttattctatcatttggttttaaaatatgagtgccttggatctattaaaaccacatcgatggttctttctacttgttataaacttgtagcttaattcagcattgggtgaggtaataaaccttaggaactagcatataattctatattgtatttctcacaacaatggctacctaaaaagatgacccattatgtcctagttaatcatcatttttcctttagtttaattttataaacaaaactgattataccagtataaaagctactttgctcctggtgagagcttaaaagaaatgggctgttttgcccaaagttttattttttttaaacaatgattaaattgaatgtgtaatgtgcaaaagccctggaacgcaattaaatacactagtaaggagttcattttatgaagatatttgctttaataatgtctttttaaaaatactggcaccaaaagaaatagatccagatctacttggttgtcaagtggacaatcaaatgataaactttaagaccttgtataccatattgaaaggaagaggctgacaataaggtttgacagaggggaacagaagaaaataatatgatttattagcacaacgtggtactatttgccatttaaaactagaacaggtatataagctaatattgatacaatgatgattaactatgaattcttaagacttgcatttaaatgtgacattcttaaaaaaagaagagaaagaattttaagagtagcagtatatatgtctgtgctccctaaaagttgtacttcatttcttttccatacactgtgtgctatttgtgttaacatggaagaggattcattgtttttatttttatttttttaattttttcttttttattaagctagcatctgccccagttggtgttcaaatagcacttgactctgcctgtgatatctgtatcttttctctaatcagagatacagaggttgagtataaaataaacctgctcagataggacaattaagtgcactgtacaattttcccagtttacaggtctatacttaagggaaaagttgcaagaatgctgaaaaaaaattgaacacaatctcattgaggagcattttttaaaaactaaaaaaaaaaaaactttgccagccatttacttgactattgagcttacttacttggacgcaacattgcaagcgctgtgaatggaaacagaatacacttaacatagaaatgaatgattgctttcgcttctacagtgcaaggatttttttgtacaaaacttttttaaatataaatgttaagaaaaattttttttaaaaaacacttcattatgtttaggggggaactgcattttagggttccattgtcttggtggtgttacaagacttgttatccatttaaaaatggtagtggaaattctatgccttggatacacaccgctcttcaggttgtaaaaaaaaaaaacatacattggggaaaggtttaagattatatagtacttaaatataggaaaatgcacactcatgttgattcctatgctaaaatacatttatggtcttttttctgtatttctagaatggtatttgaattaaatgttcatctagtgttaggcactatagtatttatattgaagcttgtatttttaactgttgcttgttctcttaaaaggtatcaatgtaccttttttggtagtggaaaaaaaaaagacaggctgccacagtatatttttttaatttggcaggataatatagtgcaaattatttgtatgcttcaaaaaaaaaaaaaagagagaaacaaaaaagtgtgacattacagatgagaagccatataatggcggtttgggggagcctgctagaatgtcacatggatggctgtcataggggttgtacatatccttttttgttcctttttcctgctgccatactgtatgcagtactgcaagctaataacgttggtttgttatgtagtgtgctttttgtccctttccttctatcaccctacattccagcatcttaccttcatatgcagtaaaagaaagaaagaaaaaaaaaggaaaaaaaaaaaaaaaccaatgttttgcagtttttttcattgccaaaaactaaatggtgctttatatttagattggaaagaatttcatatgcaaagcatattaaagagaaagcccgctttagtcaatacttttttgtaaatggcaatgcagaatattttgttattggccttttctattcctgtaatgaaagctgtttgtcgtaacttgaaattttatcttttactatgggagtcactatttattattgcttatgtgccctgttcaaaacagaggcacttaatttgatcttttatttttctttgtttttatttttttttttatttagatgaccaaaggtcattacaacctggctttttattgtatttgtttctggtctttgttaagttctattggaaaaaccactgtctgtgtttttttggcagttgtctgcattaacctgttcatacacccattttgtccctttattgaaaaaataaaaaaaattaaagtaca

SEQ ID NO: 124 - DNA, 1519 bp, Homo sapiens
ctcgtgagctcccggcccgctgccgcagggactgggagcgggctccgcagcgcactctagcccgcggctcggctcagtcggtctgcgaggatccggcccgccgccccccgggggacccgatggcctcggagggcctggcgggggcgctggcttccgtgctggctggccaggggtccagcgtgcacagctgcgactcggcgccggccggggagccgccggcgcccgtgcggctgcggaagaacgtgtgctacgtggtgctggccgtgttcctcagcgagcaggatgaggtgctactgatccaggaggccaagagggagtgccgggggtcgtggtacctgcctgcggggagaatggagccaggggagaccatcgtggaggcgctgcagcgggaggtgaaggaggaggcggggctgcactgtgagcccgagacactgctgtccgtggaggagcggggcccctcctgggtccgcttcgtgttcctcgctcgccccacaggtggaattctcaagacttccaaggaggccgatgcggagtccctgcaggctgcctggtacccacggacctccctgcccactccgctgcgagcccatgacatcctgcacctggttgaactagccgcccagtatcgccagcaagccaggcaccctctcattctgccccaagagctaccctgtgatctggtctgccagcggctcgtggctacctttaccagcgcccagacagtgtgggtgttagtgggcacagtggggatgcctcacttgcctgtcactgcctgtggcctcgaccctatggagcagaggggtggcatgaagatggccgtcctgcggctgctgcaggagtgtctgaccctgcaccacttggtggtggagatcaaggggttgcttggactgcagcacctgggccgagatcacagtgatggcatctgtttgaatgtgctggtgaccgtggcttttcggagcccagggatccaggatgaacccccaaaagttcggggtgagaacttctcttggtggaaggtgatggaggaagacctgcaaagccagctcctccagcggcttcagggatcctctgttgtcccagtgaacagatagagaggtgggggaggtgacagggagctaggcagccgtgctccctccagtgcggacttgtctccctctgagggaggcaagaggctggcgatcagggatcttgttgcattgggagcaggggcggctctcctggtccccaggagagatgctttgaggagcattcctctagattgcacaagggacagtgcctttaaccaagcgaggagtccaaagctcaggacctgactaccctgagggcacgctgacgcctcttcccagggggatggggagctttctgcacccccagtggcatctcctcatcacgttctgtgccgtccttgggaaaggcctgcattctgatccttccaggcccttcgagcatggaggggcactggggaaggtcccccgagggaggagcacgttgctgagtaaagaggtgttactcaccttgc

SEQ ID NO: 125 - DNA, 2072 bp, Homo sapiens
cgccgtgcccgcggagagagcgcggcgcgggaggccggcggccggccggctgcatggcgcgctgcgagaggctgcgcggagcggccctgcgcgacgtgctgggccgggcgcagggggtcctgttcgactgtgacggggtgctgtggaacggcgagcgcgccgtgccgggcgccccggagctgctggagcggctggcgcgggccggcaaggcggctctgtttgtgagcaacaacagccggcgcgcgcggcccgagctggccctgcgcttcgcgcgcctcggcttcggggggctgcgcgccgagcagctcttcagctccgcgctgtgcgccgcgcgcctgctgcgccagcgcctgcccgggcctccggacgcgccgggcgccgtgttcgtgctgggcggcgaggggctgcgcgccgagctgcgcgccgcggggctgcgcctggccggggacccgagcgcgggggacggcgcggccccgcgcgtgcgcgccgtgcttgtgggctacgacgagcacttctccttcgccaagctgagggaggcgtgcgcgcacctgcgcgaccccgagtgcctactcgtggccaccgaccgtgacccatggcacccgctgagcgacggcagccggacccctggcaccgggagcctggccgctgcagtggagacagcctcgggacgccaggccctggtggtgggcaagcccagcccctacatgttcgagtgcatcacggagaacttcagcatcgaccccgcacgcacgcttatggtgggtgaccgcctggagaccgacatcctctttggccaccgctgcggcatgaccactgtgctcacgctcacaggagtctcccgcctagaagaggcccaggcctacctagcggccggccagcacgacctcgtgccccattactatgtggagagcatcgcagacttgacagaggggttggaggactgagcccactgcacctgcagccacaggcccacccctccccactccctgatcccgtaggtggaggcgatgggtcacgagccatgttaagcacaaccggctccttggtccagttctgcaccggggtggggctgggacccggggaaggtttgagggcccttgcaaccccctcccagcagtggctgggcactctttgctgccccagaagctggtcccctatggattcatcttggcctgacccagccaggtggccttatttcttccctgtcacctcccctccttgaaatctgggccctggtgcctgctgaagattccctctatccctgagtacttagtcttctcccccttccctggggcttctagagctctctctgcccctcaggtcctggcccttgggtccttgtcaaccagaggtctagggaaccacaacccttattgtcctgggtggaccaatccaaaggctaagtgatagtgactcatcaatgttgggtcctgtggggtaccagtttaggttcctaagtaatagtgaccctttcacgtcctggagcccgagtggaccaatcggaagcctaagtgacgatgaccctcgcatgtcctaggtccctgggtggacccatcaggaccccaagtgatagtgacccagtggtcttttagatcctcagtagaacagtccagaagcctgagagacagtggccccttgataatctgggtctcacgggaccagctaggggtccaggtttcagtcagtaaataagagtggtccacgtcctaaagacacctctcctttacaaagacttgtgatgctctggggcttctgtggccaagccccaccctttcctggtcatggtacccgtacagcgttgatggccacagctcgaaggggggctttcgtgtccccctgtgcggtcagtgttttcagtaccacctctctcccgtgcccacttggctatttacttatttatttattgtgtgccagtgatggtgggtgggggctgggccttccccgccacctccacccctgttgtgacctgtccttccgtacttaataaagtgcgcgtgggagtgttaaaaaaaaaaaaaaaaaaaaaaaaaaaaaaaaaaaaaaaaaaaaaaaaaaaaaaaaaaaaaaaaaaa

SEQ ID NO: 126 - DNA, 912 bp, Homo sapiens
agacgttcttcgccgagagtcgttggggtttcctgcttcaacagtgcttggatggaacccagccctcgtcccctaccccggccagccgcccatagccagccctccgtcacctcttcaccgcgccctgggactgccccaaggcccccgccgcagctccagcgccgcgcagcagccgccgccgccgcctctccttagtcactgccatgacgaccgcgtccacctcgcaggtgcgccagaactaccaccaggactcagaggccgccatcaaccgccagatcaacctggagctctacacctcctacctttacctgtccacgtcttactactttgacctcgatgatgtggctttgaagaactttgccaaatactttcttcaccaatctcatgaggagagggaacatgctgagaaactgttgaagctgcagaaccaacgaggtggccgaatccttcttcaggatatcaagaaaccagactgtgatgactgggagagtgggctgaatgcgatggagtgtgcactacatttggaaaaaaatgtgtatcagtcaccactggaactgcacaaaccggccactgacaaaaatgacccccattggtgtgacttcattgagacacattgcctgaatgagcaggtgaagccatcaaagaatggggtgaccacgtgaccaacttgtgcaagatgggagcacccgaatctggcttggcagaatatctctttgacaagcactccctgggagacagtgataatgaaagctaagcctcaggctaatttccccatagccgtggggtgacttccctggtcaccaaggcagtgcatgcatgttgggttttcctttaccttttctataagttgtatcaaaacatccacttaagttctttgatttgtaccattccttcaaataaagaaatttggta

SEQ ID NO: 127 - DNA, 2100 bp, Homo sapiens
gcggaagtggcggcggcgccggcctggcctggcctggctgaggggaggcggcgggcgggcgcgatggcggaggccgggccacaggcgccgccgcccccgggcactccaagccggcacgaaaagagcctgggactgctcaccaccaagttcgtgtcccttctgcaggaggccaaggacggcgtgcttgacctcaagctggcagctgacaccctagctgtacgccagaagcggcggatttacgacattaccaatgttttggaaggtatcgggctaatcgagaaaaagtccaagaacagcatccagtggaagggtgtggggcctggctgcaatacccgggagattgctgacaaactgattgagctcaaggcagagatcgaggagctgcagcagcgggagcaagaactagaccagcacaaggtgtgggtgcagcagagcatccggaacgtcacagaggacgtgcagaacagctgtttggcctacgtcactcatgaggacatctgcagatgctttgctggagataccctcttggccatccgggccccatcaggcaccagcctggaggtgcccatcccagagggtctcaatgggcagaagaagtaccagattcacctgaagagtgtgagtggtcccattgaggttctgctggtgaacaaggaggcatggagctcaccccctgtggctgtgcctgtgccaccacctgaagatttgctccagagcccatctgctgtttctacacctccacctctgcccaagcctgccctagcccagtcccaggaagcctcacgtccaaatagtcctcagctcactcccactgctgtccctggcagtgcagaagtccagggaatggctggcccagcagctgagatcacagtgagtggcggccctgggactgatagcaaggacagtggtgagctcagttcactcccactgggcccaacaacactggacacccggccactgcagtcttctgccctgctggacagcagcagcagcagcagcagcagcagcagcagcagcagcaacagtaacagcagcagttcgtccggacccaacccttctacctcctttgagcccatcaaggcagaccccacaggtgttttggaactccccaaagagctgtcagaaatctttgatcccacacgagagtgcatgagctcggagctgctggaggagttgatgtcctcagaagtgtttgcccctctgcttcgtctttctccacccccgggagaccacgattatatctacaacctggacgagagtgaaggtgtctgtgacctctttgatgtgcctgttctcaacctctgactgacagggacatgccctgtgtggctgggacccagactgtctgacctgggggttgcctggggacctctcccacccgacccctacagagcttgagagccacagacgcctggcttctccggcctcccctcaccgcacagttctggccacagctcccgctcctgtgctggcacttctgtgctcgcagagcaggggaacaggactcagcccccatcaccgtggagccaaagtgtttgcttctccctttctgcggccttcgccagcccaggctcggctgccacccagtggcacagaaccgaggagctgccattaccccccatagggggcagtgtcttgttcctgccagcctcagtgtcttgcttctgccagctccttcccctaggagggaagggtggggtggaactgggcacatgccagcaccacttctagcttccttcgctatcccccaccccctgaccctccagctcctcctggccctctcacgtgcccacttctgctgggcctttagccctagaacctgcaggtggtgggggcggctaccaagaaggaacagaggtctctggggaggagtctgggtggtccagccctgatgattggccccacctcctgctgccccataaccctctcttcatttcggctttttcatttaccctcatttagagccatttgcagagatttagaaagatttacagtaacgaatggattcctatataaagattatttttatactttttgcagcaaaaggaaattgtaatatttgtacagtgttcaagtgaataaaaaccatgcctaaggcta

SEQ ID NO: 128 - DNA, 1527 bp, Homo sapiens
aggaaactgaggccctgagaattgactcattcagatcacttcccatgatcacgcagctgagcagtttccaatacagaattcagatttggggttccctacttccaatccaggtctctgtgctccacacttgtctttcgtgctccatgtttgaagaaattaatattgtggaagaacagttttaaggcttagaggaacttgagttaggatccgtacttggcagatgaggaaattgattctcatggatgtaaattcactgtttgaggccacaacagggcatcatggtgggaggcttgaagaggaaacactctgatttggaagaggaggaggagaggtgggagtggagtccagcaggccttcagagctaccagcaagccctgctccgcatctccctagacaaagtccagcgcagcctgggcccccgagcacccagcctccgcaggcatgtcctcatccataacaccctccaacagctgcaggctgcacttcgcctggctcccgcccctgccctgccccccgagcccctcttcctgggcgaggaggatttctccctgtcagccaccattggctctatcctcagggagctggacacctccatggatgggactgagccccctcagaatccagtgactccccttggcctccagaatgaagtgccaccccagcctgatccagtcttcttagaagctctgagctcccggtacttgggggactctggcctggatgacttctttctggacattgacacatctgcggtagaaaaggagcctgcacgggccccaccagagcctcctcacaacctcttctgtgccccaggttcttgggagtggaatgaactggatcacatcatggaaatcattctggggtcctaaaactgtgatagaggggatcgatccttcctcatgtcatcttcggtggcctggatccctgaatgcaactctgggtgtgtgtttttgtgggggctcgaagcagtgactatggcctcctttgttcccatttcagggttccacaaactgtcttgcatgtgtgtgtgtgtctggttaccccgaccttctgtgaaggtgggtcttcctgaattaatttatctattccaaatgccttaacgagactctgtttctgggagtctgattttccacttacacatttcttccacctttcctgctagttcccactcccctgtgaccactggggcctcagggaagataaagaaagctgggcctgtcgaaggatgacagggatgtgctgccaggttgctatagaaacccaggctctgcctcttgcaccttgagggggtgggaggggctggtgtcctccctccaggctgaaccccacttcctcggcaggaccccagtctcagcagcctcctgatttcataaccaggccggaccacgtgcaatagggtggaaaccaaactgctccatgccgggttatttaaaagaaaggcagagtttgtggtggcttttttttttttttttggattgtttgtaatttttttaaataaaagtattttggaaggagggaaaaaaaaaa

SEQ ID NO: 129 - DNA, 8177 bp, Homo sapiens
agctctgcctgcgccaggagcgcgcgggtgcgcgcggccgcgccctcgcacagatcccagctgggtcacccgcactgagtcaacagactgagcgcgtccaggcctgacagctctgcggctcgggccctgaggtttattcagaaaacatgtccactgcaattagggaggtaggagtttggagacagaccagaacacttctactgaagaattacttaattaaatgcagaaccaaaaagagtagtgttcaggaaattctttttccactattttttttattttggttaatattaattagcatgatgcatccaaataagaaatatgaagaagtgcctaatatagaactcaatcctatggacaagtttactctttctaatctaattcttggatatactccagtgactaatattacaagcagcatcatgcagaaagtgtctactgatcatctacctgatgtcataattactgaagaatatacaaatgaaaaagaaatgttaacatccagtctctctaagccgagcaactttgtaggtgtggttttcaaagactccatgtcctatgaacttcgtttttttcctgatatgattccagtatcttctatttatatggattcaagagctggctgttcaaaatcatgtgaggctgctcagtactggtcctcaggtttcacagttttacaagcatccatagatgctgccattatacagttgaagaccaatgtttctctttggaaggagctggagtcaactaaagctgttattatgggagaaactgctgttgtagaaatagatacctttccccgaggagtaattttaatatacctagttatagcattttcaccttttggatactttttggcaattcatatcgtagcagaaaaagaaaaaaaaataaaagaatttttaaagataatgggacttcatgatactgccttttggctttcctgggttcttctatatacaagtttaatttttcttatgtcccttcttatggcagtcattgcgacagcttctttgttatttcctcaaagtagcagcattgtgatatttctgctttttttcctttatggattatcatctgtattttttgctttaatgctgacacctctttttaaaaaatcaaaacatgtgggaatagttgaattttttgttactgtggcttttggatttattggccttatgataatcctcatagaaagttttcccaaatcgttagtgtggcttttcagtcctttctgtcactgtacttttgtgattggtattgcacaggtcatgcatttagaagattttaatgaaggtgcttcattttcaaatttgactgcaggcccatatcctctaattattacaattatcatgctcacacttaatagtatattctatgtcctcttggctgtctatcttgatcaagtcattccaggggaatttggcttacggagatcatctttatattttctgaagccttcatattggtcaaagagcaaaagaaattatgaggagttatcagagggcaatgttaatggaaatattagttttagtgaaattattgagccagtttcttcagaatttgtaggaaaagaagccataagaattagtggtattcagaagacatacagaaagaagggtgaaaatgtggaggctttgagaaatttgtcatttgacatatatgagggtcagattactgccttacttggccacagtggaacaggaaagagtacattgatgaatattctttgtggactctgcccaccttctgatgggtttgcatctatatatggacacagagtctcagaaatagatgaaatgtttgaagcaagaaaaatgattggcatttgtccacagttagatatacactttgatgttttgacagtagaagaaaatttatcaattttggcttcaatcaaagggataccagccaacaatataatacaagaagtgcagaaggttttactagatttagacatgcagactatcaaagataaccaagctaaaaaattaagtggtggtcaaaaaagaaagctgtcattaggaattgctgttcttgggaacccaaagatactgctgctagatgaaccaacagctggaatggacccctgttctcgacatattgtatggaatcttttaaaatacagaaaagccaatcgggtgacagtgttcagtactcatttcatggatgaagctgacattcttgcagataggaaagctgtgatatcacaaggaatgctgaaatgtgttggttcttcaatgttcctcaaaagtaaatgggggatcggctaccgcctgagcatgtacatagacaaatattgtgccacagaatctctttcttcactggttaaacaacatatacctggagctactttattacaacagaatgaccaacaacttgtgtatagcttgcctttcaaggacatggacaaattttcaggtttgttttctgccctagacagtcattcaaatttgggtgtcatttcttatggtgtttccatgacgactttggaagacgtatttttaaagctagaagttgaagcagaaattgaccaagcagattatagtgtatttactcagcagccactggaggaagaaatggattcaaaatcttttgatgaaatggaacagagcttacttattctttctgaaaccaaggctgctctagtgagcaccatgagcctttggaaacaacagatgtatacaatagcaaagtttcatttctttaccttgaaacgtgaaagtaaatcagtgagatcagtgttgcttctgcttttaatttttttcacagttcagatttttatgtttttggttcatcactcttttaaaaatgctgtggttcccatcaaacttgttccagacttatattttctaaaacctggagacaaaccacataaatacaaaacaagtctgcttcttcaaaattctgctgactcagatatcagtgatcttattagctttttcacaagccagaacataatggtgacgatgattaatgacagtgactatgtatccgtggctccccatagtgcggctttaaatgtgatgcattcagaaaaggactatgtttttgcagctgttttcaacagtactatggtttattctttacctatattagtgaatatcattagtaactactatctttatcatttaaatgtgactgaaaccatccagatctggagtaccccattctttcaagaaattactgatatagtttttaaaattgagctgtattttcaagcagctttgcttggaatcattgttactgcaatgccaccttactttgccatggaaaatgcagagaatcataagatcaaagcttatactcaacttaaactttcaggtcttttgccatctgcatattggattggacaagctgttgttgatatccccttattttttatcattcttattttgatgctaggaagcttattggcatttcattatggattatatttttatactgtaaagttccttgctgtggttttttgccttattggttatgttccatcagttattctgttcacttatattgcttctttcacctttaagaaaattttaaataccaaagaattttggtcatttatctattctgtggcagcgttggcttgtattgcaatcactgaaataactttctttatgggatacacaattgcaactattcttcattatgccttttgtatcatcattccaatctatccacttctaggttgcctgatttctttcataaagatttcttggaagaatgtacgaaaaaatgtggacacctataatccatgggataggctttcagtagctgttatatcgccttacctgcagtgtgtactgtggattttcctcttacaatactatgagaaaaaatatggaggcagatcaataagaaaagatccctttttcagaaacctttcaacgaagtctaaaaataggaagcttccagaaccaccagacaatgaggatgaagatgaagatgtcaaagctgaaagactaaaggtcaaagagctgatgggttgccagtgttgtgaggagaaaccatccattatggtcagcaatttgcataaagaatatgatgacaagaaagattttcttctttcaagaaaagtaaagaaagtggcaactaaatacatctctttctgtgtgaaaaaaggagagatcttaggactattgggtccaaatggtgctggcaaaagcacaattattaatattctggttggtgatattgaaccaacttcaggccaggtatttttaggagattattcttcagagacaagtgaagatgatgattcactgaagtgtatgggttactgtcctcagataaaccctttgtggccagatactacattgcaggaacattttgaaatttatggagctgtcaaaggaatgagtgcaagtgacatgaaagaagtcataagtcgaataacacatgcacttgatttaaaagaacatcttcagaagactgtaaagaaactacctgcaggaatcaaacgaaagttgtgttttgctctaagtatgctagggaatcctcagattactttgctagatgaaccatctacaggtatggatcccaaagccaaacagcacatgtggcgagcaattcgaactgcatttaaaaacagaaagcgggctgctattctgaccactcactatatggaggaggcagaggctgtctgtgatcgagtagctatcatggtgtctgggcagttaagatgtatcggaacagtacaacatctaaagagtaaatttggaaaaggctactttttggaaattaaattgaaggactggatagaaaacctagaagtagaccgccttcaaagagaaattcagtatattttcccaaatgcaagccgtcaggaaagtttttcttctattttggcttataaaattcctaaggaagatgttcagtccctttcacaatctttttttaagctggaagaagctaaacatgcttttgccattgaagaatatagcttttctcaagcaacattggaacaggtttttgtagaactcactaaagaacaagaggaggaagataatagttgtggaactttaaacagcacactttggtgggaacgaacacaagaagatagagtagtattttgaatttgtattgttcggtctgcttactgggacttctttctttttcacttaattttaactttggtttaaaaagttttttattggaatggtaactggagaaccaagaacgcacttgaaatttttctaagctccttaattgaaatgctgtggttgtgtgttttgcttttctttaaataaaacgtatgtataattaagtgaagctgcatgtttgtattgaagtatattgaactatatagtttgtatgtcatctttttcaccattcagaaacagtgcttctgaatttgtgatttaaaggaattgtaatagaatagttttatttttaagttatctttaagtttatgccatcttcttaaataagtacgtaatgttccaatctaaataaaaaactaattcataactaatgcatagaaaagatacataaagcaatgtgaaagtttcttgcttctcctttttaatttctaaaaaagccactttgaatggaagttgtcatccgtaaaagctgaagtgtaagcactaggaaatctcaatatagagatttgaggaaagttatatccactaggtggcagtcattgatcataataagtgaaatgagcccttgttctagtacatgattttaggcttaggtaattaggtatgtgaaattacatttctttaatttaaagtaaaattcagaaggttttagttattataattaaaggaagactgtgtgtagaatcttacgtaatagtctgattctttgactctgtggctagaatgacagttatctatggaggtggtagaattaagccataccttttccttcatcactcttggaacatataaattttttgtcatcttccttgcaaagggcacatttaattttgttcttgaataaaatattttattgggtatttgtttttattggtaaactttagtgaatctcttctataaaattgtaagtagatcagtgtgtagatttatttagtaacttacctcattgactttggaacatggtaggatatgaataaactctttcaagggttaaattaagaattgtaagtgcagtgcgcctatttctttttaataagaaccagaatttcatttttgatagagttaaaggcatggctaatattttcttagaaatacttccttgtacaacccatgtattggctcaaggtataaaatagtgtaaataatgctagttgacattacatttcaaccaaatgaaagtattaacttcataaaacaaatatattgagagtgtgattattgtattagacaacaacaacagcaatgacagaaggatttggtactgaattactttaaataagcaaaacctttcagtggcattattcattctttaatgtaggcaaaatttaatgaacttttagctttattgtgtaataagacatctgtgattttaggctctagcagtggatttaaaagtgttctttctcggtacaaagtacgtggctgatattttcccccattgctgggggcagttgctatacactttcctaaagtatatataatgttcacataaatacccagggacctcttttttgggatgtgcttttgtaattatgtgtaaccttgaatacttaagtttagtaaaagcaacaaaattatatctatagtttactaaggcagtcacgaaaaagcatagttttttttagaacctgaccatcctaagaaagttatgtcatctgaagatagagcatgactaatgaagaaaattacctgcttttgcacgtagatttggtaactttcactttacatttgtgaatgtgtaattggtgcaaagtaaattttttttcctgcaaagtgaaagttgagtagtcacaatcatgttatttattttgttcatttagttactttgcttttaatgtatatgaatacatgctcttgtaaacaattttaaaagacattcaaatttttttttagtttttatatactcagaatatattttggttgttaaattaaattatgttccctttttcacagtaacaaaatctgactcaggagaaatataacttaattcttaggaaaacaagggtaagtgagctggaaagcaaaggaggcaaaaagtgaaatatatttatttacagtgtacagttcatgtttatgaacatactaattttaaaatgtcttaaattactgatctcaaaacttttttctatgtcagtacagataaataaataaatatacatattaggcaaaagcaacatcaccaaccttatatttcccattcatggtcaaattttcaaaggaaagtaaaagctgagctttactgagtgagtgtttactgactaataaggcaagaaaaaacatgatgagtgtactttacatcttacttttgtgggctcttaatttttttctctagtttgttttcagtaaagacagtgggttttctttaaaataatttttttcttttaaatttgcacaaattatcttaggtcagtattttggttttaatcattaaaacatttttagagtaatgtaatttaacaaatattttaagtgattatgtttccagaaatggattctttggagagaactcggatgactatcagttttggccctgtaagatcgtggagatctgtaagatagatacttatataacttacataaaatatatataatatattacttatataacttatataactagctattattttatataactaactataatatgacaaatcctttgctagtagtactaacaacgttttataggagcacaattaattttacttaggataagtgttgttattattgtttttattgttgttctgttagttactcaaaacttcattctaattgtgccctgagtttgttaaaataccatactgtatttttgtgtaacatgtaaataggcattaatttttgagaaatagaaatgtttatccttaatgtatttttaatttgctaacattgattttttattttctttcctgaaatagcttatttcctaaaatgaaagaatttattctcagatgaataatttttatatcagctattcttatcaggtaaaagtttaattattttttatttataatatatgtaagcaattctcaatgctgctctttaagaaaaataaatatgattatattaataataagc

SEQ ID NO: 130 - DNA, 4074 bp, Homo sapiens
gacaggcctctcggcgagccggtgccccatcgggtaccgcacggctgccgcggcggccttaccctgccgcgagcgcctgtgacagcggcgccgctgtgctcgcgaccccggctccgggcctctgccgacctcaggggcaggaaagagtcgcccggcgggatgggcggggaggctgggtgcgcggcggccgtgggtgccgagggccgcgtgaagagcctgggtctggtgttcgaggacgagcgcaagggctgctattccagcggcgagacagtggccgggcacgtgctgctggaggcgtccgagccggtggccctgcgcgcgctgcgcctggaggcccaggggcgcgccaccgccgcctggggcccgagcacctgcccccgcgcctcggccagcaccgcggccctggctgtcttctcggaggtggagtacctgaacgtgcgcctcagcctgcgggagcccccggccggtgaaggcatcattttattacagcctggaaaacatgaatttccatttcgctttcaacttccatctgaacctttggtcacctcgtttactgggaaatatggaagcattcagtactgtgtgcgggcagtgttggaacgacccaaggtacctgatcagagtgtaaagcgggaactccaggttgttagtcatgtcgatgtcaacacaccagcattattaacccctgtattgaaaactcaagagaaaatggttggctgttggtttttcacttctggtccagtctcgctgagtgccaaaattgaaagaaagggatactgtaatggagaagctattccaatctatgcagaaatagaaaattgttcctctcgtctgattgttccaaaggctgctattttccaaacgcagacatatttggctagtggaaaaacaaagaccattcgacacatggtcgccaatgtgcgaggaaaccacatcgcttctgggagcacagacacatggaatgggaaaacgctaaaaatcccacctgttactccatccatcctggattgctgcattatcagagtggactattccttagctgtatacattcacattcctggtgctaaaaaattgatgctcgaactgccattagtgatcggtacaattccatataatggttttggcagcagaaactccagcattgccagccagttcagtatggatatgagctggttgacactgaccctgccagagcagcctgaagcaccaccaaattatgcagatgtggtatcagaggaagaattctctagacacattcctccttaccctcaaccccctaactgtgagggagaagtgtgctgtcctgtgtttgcctgtatacaagaattccggtttcaacccccacctctttattcagaggttgacccacatcctagcgacgtagaagagagccagcctgtttccttcattctctgaacgtatttcagaaatcactgtgttcatcatcaaattagaatgttggttcttttccttctgcctttttgggaaagagacaggaaagattcacttgaaaacataaatgaacgtcaagactgaaggcaatagaaattaaagaatgtgagaaagttctggtgggccggcaggattgccgcacaagtttatatgatggtcgtatatatatccctgttaaaaactgggatgaagatgtgcaaagtcacagaatgtaatggaagtcctgatggttacagagtaagtgaaagggtgcctgcgctgacgtgagagaaaggaatctgtaaacagtggaaacactgtgggagtttcccatggtgaagagtggaacgaaggcgatatgaactgaaggggtgaagacttgattttggagagggcaacaaaacaagggtgtgtgtgcataggagaatggcccactccaaatacgaagtgagatcctgagtctttgggtgcttcatgatttcctaccatattcaggcctaaagacattgaaaaagcatcttttcttgagatcatggtcatatgaggtcctaatgaagtactacagttttcattctttcaagggtagactaaaatatagtttataaatcggcagtacggtattatgaaaccaagaaagggtttcttgaaaagcttgtcggttcaaagaggaaagatgaatttcaatgtgaaaacacgttttgttgagggctgtactttttaccccctttaagtgctttaacaggatatacgtttgattttcctcatatcttatttacctaggagcatgtaagagaaagaagggagagaaaaggttgcatctgcaggatgccttgataactacacagtcccaaataaaaggcctttttctaacctacctctaatggggttatcagatatgtttttaaatctctcgccctgagtactcttcttgggagttgctgctgtttacagccacagtctcatctatcactaaatatgaaactgggccaaggggaaaattcagtaagttagcgttaaatggaagtaaatatatgtatacctaagagaatgtcaaaataaacaccaaaccaaaagaaggtaggagtgccatttttagaaaagacacaactttaattcctgtcaagagacctaggtctactgatggcagtcactgcattgtacattattccagttcttcagtaattctgtttaaactgtgattttctttattgtgttggtgcaatattttattatcatttaacctcaggatattcagaccaacaggattgtgttgctgctgaaagtctgagcagtgttttaccgtccccagcccccctcccacatggtcacatgttcacttgcttttccttccatctgttggttttgtgagctgagagcatctctggacacatggaagggagccagggattcctgtgatacagattttgaaccagcagagtactttggttttcttcatgtcctaagggtttgatccagaaaccctggtgcttcccctgcagaatactgtacttcatttaacagaatgattgatttttctttcaatcagcatgttcaccaaaaatagaaaagttcttctaaggttaaattttgtatttaaaagttagttggccatttgatcagggaattttctacacacattaggcaaatgtatgcttttcatcctctgggcttacctctctcctctgcaatcctggaagcatcgtgcatagttctttcattgtaagccgctatttaaattcccacaatgcaaaactgttagaccagtaattgtgctactgaaattgtcacaaaacgttattccttgatttggtttttaaattttgctttcgtgtgtgtgtctttaaacaggtaatgtgtatttaagtgttgtctaaacagttgatttttactttagaaaagatcatcttcaactgtttattgacttctgagttatatagttcatgccctgccaaggcattgttcgactccatgatactaaaacataatgaaagaaacaaactccagtatggagaagagaaagtttaattatttggttccatctagaaaagcaacaacttaaaggaatccttcactaggattgtcttatcacctttattagataaatcatgaagtgtccctgtgaaattgaagtgaaactatctctgtaggacttaagagaatagctaaaaggtgtgacttgccttattgaaatgatactggcatatctgactgtaagcagtaggttgaagatatcattttatgaatgtggagaattctacattgaaacagaaaatacctgggaatgaagattaaaaatgtagctgctgttatttgcttggttattcccctcttgctcttctttagtttgaaaaaacaaaaacgtggccttggaattttcattttgatgcagaaattttgaaattgaaaatgtgcatgttttggtgcacaaaatccttctgtgggcaaaactttgtttttgttttgcacagtaagaaacaataggcaagcgttatgtttttggtaagttaactatgaaagctttcttatttttattattaaaaatgtaacaatttaacccacaggaaaaaaaattactttgtatgcttgtttgaaccctatgggttcgttttattaataaaattattacactaatgctaaaaaaaa

SEQ ID NO: 131 - DNA, 2485 bp, Homo sapiens
tgccccgttgtgaggtgataaagtgttgcgctccgggacgccagcgccgcggctgccgcctctgctggggtctaggctgtttctctcgcgccaccactggccgccggccgcagctccaggtgtcctagccgcccagcctcgacgccgtcccgggacccctgtgctctgcgcgaagccctggccccgggggccggggcatgggccaggggcgcggggtgaagcggcttcccgcggggccgtgactgggcgggcttcagccatgaagaccctcatagccgcctactccggggtcctgcgcggcgagcgtcaggccgaggctgaccggagccagcgctctcacggaggacctgcgctgtcgcgcgaggggtctgggagatggggcactggatccagcatcctctccgccctccaggacctcttctctgtcacctggctcaataggtccaaggtggaaaagcagctacaggtcatctcagtgctccagtgggtcctgtccttccttgtactgggagtggcctgcagtgccatcctcatgtacatattctgcactgattgctggctcatcgctgtgctctacttcacttggctggtgtttgactggaacacacccaagaaaggtggcaggaggtcacagtgggtccgaaactgggctgtgtggcgctactttcgagactactttcccatccagctggtgaagacacacaacctgctgaccaccaggaactatatctttggataccacccccatggtatcatgggcctgggtgccttctgcaacttcagcacagaggccacagaagtgagcaagaagttcccaggcatacggccttacctggctacactggcaggcaacttccgaatgcctgtgttgagggagtacctgatgtctggaggtatctgccctgtcagccgggacaccatagactatttgctttcaaagaatgggagtggcaatgctatcatcatcgtggtcgggggtgcggctgagtctctgagctccatgcctggcaagaatgcagtcaccctgcggaaccgcaagggctttgtgaaactggccctgcgtcatggagctgacctggttcccatctactcctttggagagaatgaagtgtacaagcaggtgatcttcgaggagggctcctggggccgatgggtccagaagaagttccagaaatacattggtttcgccccatgcatcttccatggtcgaggcctcttctcctccgacacctgggggctggtgccctactccaagcccatcaccactgttgtgggagagcccatcaccatccccaagctggagcacccaacccagcaagacatcgacctgtaccacaccatgtacatggaggccctggtgaagctcttcgacaagcacaagaccaagttcggcctcccggagactgaggtcctggaggtgaactgagccagccttcggggccaattccctggaggaaccagctgcaaatcacttttttgctctgtaaatttggaagtgtcatgggtgtctgtgggttatttaaaagaaattataacaattttgctaaaccattacaatgttaggtcttttttaagaaggaaaaagtcagtatttcaagttctttcacttccagcttgccctgttctaggtggtggctaaatctgggcctaatctgggtggctcagctaacctctcttcttcccttcctgaagtgacaaaggaaactcagtcttcttggggaagaaggattgccattagtgacttggaccagttagatgattcactttttgcccctagggatgagaggcgaaagccacttctcatacaagcccctttattgccactaccccacgctcgtctagtcctgaaactgcaggaccagtttctctgccaaggggaggagttggagagcacagttgccccgttgtgtgagggcagtagtaggcatctggaatgctccagtttgatctcccttctgccacccctacctcacccctagtcactcatatcggagcctggactggcctccaggatgaggatgggggtggcaatgacaccctgcaggggaaaggactgccccccatgcaccattgcagggaggatgccgccaccatgagctaggtggagtaactggtttttcttgggtggctgatgacatggatgcagcacagactcagccttggcctggagcacatgcttactggtggcctcagtttaccttccccagatcctagattctggatgtgaggaagagatccctcttcagaaggggcctggccttctgagcagcagattagttccaaagcaggtggcccccgaacccaagcctcacttttctgtgccttcctgagggggttgggccggggaggaaacccaaccctctcctgtgtgttctgttatctcttgatgagatcattgcaccatgtcagacttttgtatatgccttgaaaataaatgaaagtgagaatcctcaaaaaaaaaaaaaaaaaaaaaaaaaaaaaaaaa

SEQ ID NO: 132 - DNA, 4580 bp, Homo sapiens
cttgctccggcctcctcgctcctgcctgagttcggggcctggtctgggcttcgtcctggggctgggaagtttctgcgctccccgctgtccagtctgcatctccgcgcctcccgccgggcccccgcggtcccctcccgcccgcttcccccgctgccctccctcgctgccccctaccctctcccggggctcccggccctctactcccttcgggcgcgggcccctcgccccgcccgggcgcgccccccctcccccgggtcctgcggccccggatgcccgggccccgaggggctgctggcggcctggcccctgagatgcgcggggcgggggcggcggggctgctggcgctgctgctgctgctgctgctgctgctgctgggcctgggcggcagggtcgagggggggccggccggcgagcggggcgcaggcgggggcggggcgctggcccgcgagcgcttcaaggtggtctttgcgccggtgatctgcaagcggacctgtctcaagggccagtgtcgggacagttgtcagcagggctccaacatgacgctcatcggagagaacggccacagcacagacacgctcacgggctccggcttccgcgtggtggtgtgccctctcccctgcatgaatggcggccagtgctcctcgcgaaaccagtgcctgtgtcccccggacttcactgggcgcttctgccaggtgcccgcaggaggagccggtgggggtaccggcggctcaggccccggcctgagcaggacaggggccctgtccacaggggcgctgccgcccctggctccggagggcgactctgtggccagcaagcacgccatctacgccgtccaggtgatcgctgaccctcctgggcccggggaggggcctcctgcccagcacgcagccttcctggtgcccctaggcccgggacagatctcagcagaagtgcaggccccgccccccgtggtgaatgtgcgcgtccatcacccgcccgaggcctcagtccaggtgcaccgcattgagagctcgaacgccgagagcgcagccccctcccagcacctgctgccgcaccccaagccctcgcacccccggccgcccacccagaagcccctgggccgctgctttcaggacactctgcccaagcagccgtgtggcagcaaccccctccccggcctcaccaagcaggaagactgctgcggtagcatcggcactgcctggggccagagcaagtgccacaagtgtccccagctgcagtacacaggagtgcagaagccagggcctgtacgtggggaagtgggcgctgactgtccccagggctacaagaggcttaacagcacccactgccaggacatcaacgagtgcgcaatgccgggcgtgtgtcgccatggtgactgcctcaacaaccctggctcctatcgctgtgtctgcccacctggccatagtttaggcccctcccgtacacagtgcattgcagacaaaccggaggagaagagcctgtgtttccgcctggtgagccctgagcaccagtgccagcacccactgaccacccgcctgacccgccagctctgctgctgcagtgtcggcaaggcctggggcgcgcggtgtcagcgctgcccaacagatggcaccgctgcgttcaaggagatctgcccagctgggaagggataccacattctcacctcccaccagacgctcaccattcagggcgagagtgacttttcccttttcctgcaccctgacgggccacccaagccccagcagcttccggagagccctagccaggctccaccacctgaggacacagaggaagagagaggggtgaccacggactcaccggtgagtgaggagaggtcagtgcagcagagccacccaactgccaccacgactcctgcccggccctaccccgagctgatctcccgtccctcgcccccgaccatgcgctggttcctgccggacttgcctccttcccgcagcgccgtagagatcgctcccactcaggtcacagagactgatgagtgccgactgaaccagaacatctgtggccacggagagtgcgtgccgggcccccctgactactcctgccactgcaaccccggctaccggtcacatccccagcaccgctactgcgtggatgtgaacgagtgcgaggcagagccctgtggcccggggaggggcatctgcatgaacaccggcggctcctacaattgccactgcaaccgcggctaccgcctgcacgtgggcgccggggggcgctcgtgcgtggacctgaacgaatgcgccaagccccacctgtgcggcgacggcggcttctgcatcaactttcccggtcactacaagtgcaactgctaccccggctaccggctcaaagcctcccggcctcctgtgtgcgaagacatcgacgagtgccgggacccaagctcttgcccggatggcaaatgcgagaacaagcccgggagcttcaagtgcatcgcctgtcagcctggctaccgcagccaggggggcggggcctgtcgcgacgtgaacgagtgcgccgagggcagcccctgctcgcctggctggtgcgagaacctcccgggctccttccgctgcacctgtgcccagggctacgcgcccgcgcccgacggccgcagttgcttggatgtggacgagtgtgaggctggggacgtgtgtgacaatggcatctgcagcaacacgccaggatctttccagtgtcagtgcctctctggctaccatctgtccagggaccggagccactgcgaggacattgatgagtgtgacttccctgcagcctgcattgggggtgactgcatcaataccaatggctcctacagatgtctttgcccccaggggcatcggctggtgggtggcaggaaatgccaagacatagatgagtgcagccaggacccgagcctgtgccttccccatggggcctgcaagaaccttcagggctcctatgtgtgtgtctgcgatgagggcttcactcccacccaggaccagcacggttgtgaggaggtggagcagccccaccacaagaaggagtgctacctgaacttcgatgacacagtgttctgcgacagcgtattggccaccaacgtgacccagcaggagtgctgctgctctctgggggccggctggggcgaccactgcgaaatctacccctgcccagtctacagctcagccgagttccacagcctctgcccagacggaaagggctacacccaggacaacaacatcgtcaactacggcatcccagcccaccgtgacatcgacgagtgcatgttgttcgggtcggagatttgcaaggagggcaagtgcgtgaacacgcagcctggctacgagtgctactgcaagcagggcttctactacgacgggaacctgctggaatgcgtggacgtggacgagtgcctggacgagtccaactgccggaacggagtgtgtgagaacacgcgcggcggctaccgctgtgcctgcacgccccctgccgagtacagtcccgcgcagcgccagtgcctgagcccggaagagatggagcgtgccccggagcggcgcgacgtgtgctggagccagcgcggagaggacggcatgtgcgctggccccctggccgggcctgccctcaccttcgacgactgctgctgccgccagggccgcggctggggcgcccaatgccgaccgtgcccgccgcgcggcgcggggtcccattgcccgacatcgcagagcgagagcaattccttctgggacacaagccccctgctgttggggaagcccccaagagatgaggacagttcagaggaggattcagacgagtgtcgctgcgtgagtggccgctgcgtgccgcggccgggcggcgccgtgtgcgagtgtcccggcggcttccagctcgacgcctcccgcgcccgctgcgtggatatcgacgagtgccgagagctgaaccagcgcgggctgctgtgcaagagcgagcgctgcgtgaacaccagcggctccttccgctgcgtctgcaaagccggcttcgcgcgcagccgcccgcacggggcctgcgttccccagcgccgccgctgacgccgccgacgccgccctcggcccagacctcggtgatcactgagggatttccgcgagctcggcctcacttctgccccgacttgtggctcggacccagggaccttcagggcccgcagaccctcccggcgccttgagacccgaggcgcccctaccggcccccctccccggttagcgggcggttgtaaggtctccggcgggcgctgcctgccttcctcccagagggtgtttcctagaaactgataaatcagatcgtgcctctttacccttggctttcgaagcaaattgatgttcacgtctgacgtgggcgcgggctgcgcagggcggcgccagaccccagccgcctcccaggggctagactgagcccggcacaaggggtgtgaaatagaatttattgtggctctgattatgtacacgtgagatggcctggctgggccggccgggctcacatggtttgtacaataaatacatctgtggggcgggctctccgcagccgggaagggccaccgccacggttcagtccaaaaaaaaaaaaaaaaaaaa

SEQ ID NO: 133 - DNA, 2516 bp, Homo sapiens
gagggaggagggcgggcgagctggagccggcaggcagcgggagcccgagagagccgcgtcgggagtgcggtctccatggcagtgctgggcgcagccggagagagcctgtccagggggctgagccccacccccaaatccctggggcatccagaagattcctgactggtcaagaaccagaggcaaaagagacctggaagtcccagcatggggaccagaaccccccagccagcctcatagttgggaaagtagccagcttgcctgccccatcaattgcagggatgcttaaggaaggccccgcccagtatgaaagctgaggattgcctctgctgaccctcagtctcctcccctgccctctacatctgccctcagctgggtccatcatgcaatgctgagcactggggtgagcctgggggcagcctgcctgctgacagggcgaggattgtggggatcatgggagtgtttgtgagtggggctcctgggtgagacctagcccccacccccacagagctcaagggggtggggggctgaggataggatggctcggggcggggcgggggcagaggaggcctccctgcgctccaacgcattgtcctggctggcctgtgggctcctggcgctgctggccaatgcctggatcatcctcagcatctcggccaagcagcagaagcacaagccactggagctgctgctctgcttcctagcgggcacacacatactcatggcagctgtgcccctcaccacctttgccgtggtgcagctgcgtcgtcaggcttcctccgactatgactggaacgagagtatctgcaaggtcttcgtgtccacctactacaccctggcgctggccacctgcttcacggtcgcctccctctcctaccatcgcatgtggatggtgcgctggcccgtcaactaccgcctcagcaacgccaagaagcaggcactgcatgccgtcatgggcatctggatggtcagcttcatcctctccacactgccctccattggctggcacaacaacggcgagcgctactatgcccgcggctgccagttcatagtctccaagatcggcctcggctttggcgtttgcttcagcctcttgctacttgggggaattgtcatgggtctggtctgtgtggccatcaccttctaccagacactgtgggcccggccccggagggctcggcaggcccggagagtggggggtggtggggggaccaaagcgggtgggccaggggccttgggtacccggccagcttttgaggtaccagccattgtggtggaggatgcccgagggaagcggcggtcctcgctggatggctcggagtctgccaagacatccctgcaggtcaccaacttggtcagcgccatcgtctttctctatgactcactcacaggggtgcccatcttggtggtgagcttcttctccctcaagtcggactcggcgcccccctggatggtgctggctgtgctgtggtgctccatggcacagacgctgctgctgccctccttcatctggtcctgcgagcgctaccgcgccgacgtgcgcacagtgtgggagcaatgcgtggccatcatgtctgaggaggatggagatgacgatgggggctgtgacgactatgcagagggccgagtttgcaaagttcgctttgatgctaacggagccacaggaccagggagccgggaccccgcccaggtgaagctgctgcctggaaggcacatgctcttccctcctcttgagagagtccactacttacaggtccccctatcccggcgtctgtcccatgatgagacaaacatcttctctacccctcgggaaccaggctccttcctgcacaagtggtcatcctctgatgacatccgggtcctcccagcccagagccgggccctcgggggtcctcctgagtacctgggacaaagacacaggttggaggacgaggaggacgaggaagaggctgaaggtggggggctggccagccttcgccaattcttggagagtggggttctggggtcaggtgggggacccccacggggtcctggcttcttccgggaggagatcaccaccttcatcgatgagacacctctgccttctccgactgcctcaccagggcactctcctcgtcggccccggccactgggcctctcaccccgccgactctcccttgggtcccctgagagcagagccgttggacttcctttgggactaagcgcagggagacgctgctccctgacggggggtgaagaaagtgcaagggcttggggaggatcctggggcccaggcaaccccatctttccccagctgaccctgtgagcccaagcaggcctgctgaactcagaggagaaagcctgagtgagtaacacctcattctggccgagagtagggcagctgcctccagactctggggagacgggcgctagatttggggctcagaaggccctgctctctcccatccaagtgaccagatgccctactcagcttccatcacccctagcaatatgtattaaagtctgaagtgttgccatgg

SEQ ID NO: 134 - DNA, 2596 bp, Homo sapiens
tgtcccagcctcctttgcgggtaaacagacatggccggcgaaggagatcagcaggacgctgcgcacaacatgggcaaccacctgccgctcctgcctgcagagagtgaggaagaagatgaaatggaagttgaagaccaggatagtaaagaagccaaaaaaccaaacatcataaattttgacaccagtctgccgacatcacatacatacctaggtgctgatatggaagaatttcatggcaggactttgcacgatgacgacagctgtcaggtgattccagttcttccacaagtgatgatgatcctgattcccggacagacattacctcttcagctttttcaccctcaagaagtcagtatggtgcggaatttaattcagaaagatagaacctttgctgttcttgcatacagcaatgtacaggaaagggaagcacagtttggaacaacagcagagatatatgcctatcgagaagaacaggattttggaattgagatagtgaaagtgaaagcaattggaagacaaaggttcaaagtccttgagctaagaacacagtcagatggaatccagcaagctaaagtgcaaattcttcccgaatgtgtgttgccttcaaccatgtctgcagttcaattagaatccctcaataagtgccagatatttccttcaaaacctgtctcaagagaagaccaatgttcatataaatggtggcagaaataccagaagagaaagtttcattgtgcaaatctaacttcatggcctcgctggctgtattccttatatgatgctgagaccttaatggacagaatcaagaaacagctacgtgaatgggatgaaaatctaaaagatgattctcttccttcaaatccaatagatttttcttacagagtagctgcttgtcttcctattgatgatgtattgagaattcagctccttaaaattggcagtgctatccagcgacttcgctgtgaattagacattatgaataaatgtacttccctttgctgtaaacaatgtcaagaaacagaaataacaaccaaaaatgaaatattcagtttatccttatgtgggccgatggcagcttatgtgaatcctcatggatatgtgcatgagacacttactgtgtataaggcttgcaacttgaatctgataggccggccttctacagaacacagctggtttcctgggtatgcctggactgttgcccagtgtaagatctgtgcaagccatattggatggaagtttacggccaccaaaaaagacatgtcacctcaaaaattttggggcttaacgcgatctgctctgttgcccacgatcccagacactgaagatgaaataagtccagacaaagtaatactttgcttgtaaacagatgtgatagagataaagttatctaacaaattggttatattctaagatctgctttggaaattattgcctctgatacatacctaagtaaacataacattaatacctaagtaaacataacattacttggagggttgcagtttctaagtgaaactgtatttgaaacttttaagtatactttaggaaacaagcatgaacggcagtctagaataccagaaacatctacttgggtagcttggtgccattatcctgtggaatctgatatgtctggtagcatgtcattgatgggacatgaagacatctttggaaatgatgagattatttcctgtgttaaaaaaaaaaaaaatcttaaattcctacaatgtgaaactgaaactaataatttgatcctgatgtatgggacagcgtatctgtaccagtgctctaaataacaaaagctagggtgacaagtacatgttccttttggaaagaagcaaggcaatgtatattaattattctaaaagggctttgttcctttccattttctttaacttctctgagatactgatttgtaaattttgaaaattagttaaaatatgcagttttttgagcccacgaatagttgtcatttcctttatgtgcctgttagtaaaaagtagtattgtgtatttgctcagtatctgaactataagcccatttatactgttccatacaaaagctatttttcaaaaattaatttgaaccaaaactactactatagggaaaagatgccaaaacatgtcccctcacccaggctaaacttgatactgtattattttgttcaatgtaaattgaagaaaatctgtaagtaagtaaaccttaagtgtgaaactaaacatgttctttgttcaaataatgtaaaatatctactcataattttaaagttctaaaaaggctgctttgccacctacctctttgcttatattcaagggtttagtgggtccttccttccacatttgtatgataactttcgttttattggtagtcctttgctactttaaaactaatcaggttaaatgtttactcaaatgtagtaatagtatgaggccaaaatacatgccttgaaggtggagtgaaatcagttgagtgtcacactgcatatttatgtaaatagagtaaatgaaaattcaagaatacttccaatcaggatatgcccctgccttattttttctaaggtctacttttactactttaataattttgggtttgtgtgaaaaaa

SEQ ID NO: 135 - DNA, 2310 bp, Homo sapiens
cgatttcattcctcgctccccacaggtccctctccccaaaatattcccatcttgtcctagcccatcccccagactatctcaaggaccagctgtccccacgcccccgacctccactaggcctgtgccacccgctgcctgcaggaagacgcccggtcccgggccgggttagccccatgggaacggggttcggtccgagcccggtgggaggctcccggagcgcagcctgggcccagcccaccccgcgccggcggccatggcaggcaccctggacctggacaagggctgcacggtggaggagctgctccgcgggtgcatcgaagccttcgatgactccgggaaggtgcgggacccgcagctggtgcgcatgttcctcatgatgcacccctggtacatcccctcctctcagctggcggccaagctgctccacatctaccaacaatcccggaaggacaactccaattccctgcaggtgaaaacgtgccacctggtcaggtactggatctccgccttcccagcggagtttgacttgaacccggagttggctgagcagatcaaggagctgaaggctctgctagaccaagaagggaaccgacggcacagcagcctaatcgacatagacagcgtccctacctacaagtggaagcggcaggtgactcagcggaaccctgtgggacagaaaaagcgcaagatgtccctgttgtttgaccacctggagcccatggagctggcggagcatctcacctacttggagtatcgctccttctgcaagatcctgtttcaggactatcacagtttcgtgactcatggctgcactgtggacaaccccgtcctggagcggttcatctccctcttcaacagcgtctcacagtgggtgcagctcatgatcctcagcaaacccacagccccgcagcgggccctggtcatcacacactttgtccacgtggcggagaagctgctacagctgcagaacttcaacacgctgatggcagtggtcgggggcctgagccacagctccatctcccgcctcaaggagacccacagccacgttagccctgagaccatcaagctctgggagggtctcacggaactagtgacggcgacaggcaactatggcaactaccggcgtcggctggcagcctgtgtgggcttccgcttcccgatcctgggtgtgcacctcaaggacctggtggccctgcagctggcactgcctgactggctggacccagcccggacccggctcaacggggccaagatgaagcagctctttagcatcctggaggagctggccatggtgaccagcctgcggccaccagtacaggccaaccccgacctgctgagcctgctcacggtgtctctggatcagtatcagacggaggatgagctgtaccagctgtccctgcagcgggagccgcgctccaagtcctcgccaaccagccccacgagttgcaccccaccaccccggcccccggtactggaggagtggacctcggctgccaaacccaagctggatcaggccctcgtggtggagcacatcgagaagatggtggagtctgtgttccggaactttgacgtcgatggggatggccacatctcacaggaagaattccagatcatccgtgggaacttcccttacctcagcgcctttggggacctcgaccagaaccaggatggctgcatcagcagggaggagatggtttcctatttcctgcgctccagctctgtgttgggggggcgcatgggcttcgtacacaacttccaggagagcaactccttgcgccccgtcgcctgccgccactgcaaagccctgatcctgggcatctacaagcagggcctcaaatgccgagcctgtggagtgaactgccacaagcagtgcaaggatcgcctgtcagttgagtgtcggcgcagggcccagagtgtgagcctggaggggtctgcaccctcaccctcacccatgcacagccaccatcaccgcgccttcagcttctctctgccccgccctggcaggcgaggctccaggcctccagagatccgtgaggaggaggtacagacggtggaggatggggtgtttgacatccacttgtaatagatgctgtggttggatcaaggactcattcctgccttggagaaaatacttcaaccagagcagggagcctgggggtgtcggggcaggaggctggggatgggggtgggatatgagggtggcatgcagctgagggcagggccagggctggtgtccctaaggttgtacagactcttgtgaatatttgtattttccagatggaataaaaaggcccgtgtaattaaccttca

SEQ ID NO: 136 - DNA, 783 bp, Homo sapiens
cgagtctcgctcaggctcggttttaccccggagtctattcgaagggggctgctacgtcagcgcgtctcagcgtaagacggcgctattccgctgtaacagcttccggcgggtcctggatgttgatgtcctgcatctaacgcggtgtaacccccgaagccgagcgagctccggaggaatttcagtatctgctacggtaacttcatcagcccgccaagatggcgatgcaagcggccaagagggcgaacattcgacttccacctgaagtaaatcggatattgtatataagaaatttgccatacaaaatcacagctgaagaaatgtatgatatatttgggaaatatggacctattcgtcaaatcagagtggggaacacacctgaaactagaggaacagcttatgtggtctatgaggacatctttgatgccaagaatgcatgtgatcacctatcgggattcaatgtttgtaacagataccttgtggttttgtactataatgccaacagggcatttcagaagatggacacaaagaagaaggaggaacagttgaagcttctcaaggagaaatatggcatcaacacagatccaccaaaataaatgttttctacattttcatttggactaaatcccacgaatgacaactaccacctttttttcctttttaattaatactaaatattgtgatttcttatttgaggttcaaaatgacctgcttgaaactttgatacatattggaatacattatgttaataaacttgtagctttttgtgaaacaaaaaaaaaaaaa

SEQ ID NO: 137 - DNA, 1202 bp, Homo sapiens
ccccagccctcagagcaacctcagcccagcccagcccagctccagctccagctccagcccgggccccatcatggccaaggactttcaagatatccagcagctgagctcggaggaaaatgaccatcctttccatcaagggccacctcctgcccagcccctggcacagcgtctctgctccatggtctgcttcagtctgcttgccctgagcttcaacatcctgctgctggtggtcatctgtgtgactgggtcccaaagtgagggtcacagaggtgcacagctgcaagccgagctgcggagcctgaaggaagctttcagcaacttctcctcgagcaccctgacggaggtccaggcaatcagcacccacggaggcagcgtgggtgacaagatcacatccctaggagccaagctggagaaacagcagcaggacctgaaagcagatcacgatgccctgctcttccatctgaagcacttccccgtggacctgcgcttcgtggcctgccagatggagctcctccacagcaacggctcccaaaggacctgctgccccgtcaactgggtggagcaccaaggcagctgctactggttctctcactccgggaaggcctgggctgaggcggagaagtactgccagctggagaacgcacacctggtggtcatcaactcctgggaggagcagaaattcattgtacaacacacgaaccccttcaatacctggataggtctcacggacagtgatggctcttggaaatgggtggatggcacagactataggcacaactacaagaactgggctgtcactcagccagataattggcacgggcacgagctgggtggaagtgaagactgtgttgaagtccagccggatggccgctggaacgatgacttctgcctgcaggtgtaccgctgggtgtgtgagaaaaggcggaatgccaccggcgaggtggcctgaccccagcacacctctggctaacccataccccacacctgcccagctctggcttctctgttgaggattttgaggaaaggaagaaacactgagacaggggtatggggaagagctgagcaaagagagaaaggaggtagtttaagagtccctgaccctggaggactgagatcccacctccttctgtaattcattgtaattattataatcgtcagcctcttcaatggcgtaggaaagaagaaacaaatgcttgaatctc

SEQ ID NO: 138 - DNA, 1271 bp, Homo sapiens
accgtagcgacgccgcggtccgccggatctccagcgctcagtccgcgccgcaggtggtgcttgtctgcagagtcatgacctctttccgcttggccctcatccagcttcagatttcttccatcaaatcagataacgtcactcgcgcttgtagcttcatccgggaggcagcaacgcaaggagccaaaatagtttctttgccggaatgctttaattctccatatggagcgaaatattttcctgaatatgcagagaaaattcctggtgaatccacacagaagctttctgaagtagcaaaggaatgcagcatatatctcattggaggctctatccctgaagaggatgctgggaaattatataacacctgtgctgtgtttgggcctgatggaactttactagcaaagtatagaaagatccatctgtttgacattgatgttcctggaaaaattacatttcaagaatctaaaacattgagtccgggtgatagtttctccacatttgatactccttactgcagagtgggtctgggcatctgctacgacatgcggtttgcagagcttgcacaaatctacgcacagagaggctgccagctgttggtatatccaggagcttttaatctgaccactggaccagcccattgggagttacttcagcgaagccgggctgttgataatcaggtgtatgtggccacagcctctcctgcccgggatgacaaagcctcctatgttgcctggggacacagcaccgtggtgaacccttggggggaggttctagccaaagctggcacagaagaagcaatcgtgtattcagacatagacctgaagaagctggctgaaatacgccagcaaatccccgtttttagacagaagcgatcagacctctatgctgtggagatgaaaaagccctaaagtttatgtttctaatgtgtcacagaataggacgatatgattctacaacataatcaactccctattaaattctttaatgaagattttttttttaattcggccttgtccttcctaggttctctattgagatgagaaagcctcattatgctgacattttccacgccacattaaatagttaaaaaggatgcagcctggagccagagagcagaaagctgggctggttctgaagcttcttccatacttaagttgcctccaagcagtttgtgaaagtatcagatcttggtatcctggtgattgattcacctaatataaatatatttgtgtcatgaacctcttatcccgttgctggagttgtaatctccatca

SEQ ID NO: 139 - DNA, 3129 bp, Homo sapiens
cccccacccccccaggggacaggcggagccggccttctccccgtctctagtagtttccgcaccgctgacgcatgcctgcgcgcacagctgggccgggcgcgtcctacgcagcagccgcgagccgggctgcgggtgccagacggttcccggcggggggcaggggcggggcgccgcaggaggccgggactcctggcggaggagccccaaggaggcccgcctgacgactgaccagttgccatggcatcctactacgagatcctagacgtgccgcgaagtgcgtccgctgatgacatcaagaaggcgtatcggcgcaaggctctccagtggcacccagacaaaaacccagataataaagagtttgctgagaagaaatttaaggaggtggccgaggcatatgaagtgctgtctgacaagcacaagcgggagatttacgaccgctatggccgggaagggctgacagggacaggaactggcccatctcgggcagaagctggcagtggtgggcctggcttcaccttcaccttccgcagccccgaggaggtcttccgggaattctttgggagtggagacccttttgcagagctctttgatgacctgggccccttctcagagcttcagaaccggggttcccgacactcaggccccttctttaccttctcttcctccttccctgggcactccgatttctcctcctcatctttctccttcagtcctggggctggtgcttttcgctctgtttctacatctaccacctttgtccaaggacgccgcatcaccacacgcagaatcatggagaacgggcaggagcgggtggaagtggaggaggatgggcagctgaagtcagtcacaatcaatggtgtcccagatgacctggcactgggcttggagctgagccgtcgcgagcagcagccgtcagtcacttccaggtctgggggcactcaggtccagcagacccctgcctcatgccccttggacagcgacctctctgaggatgaggacctgcagctggccatggcctacagcctgtcagagatggaggcagctgggaagaaacccgcaggtgggcgggaggcacagcaccgacggcaggggcggcccaaggcccagcaccaagatccaggcttgggggggacccaggagggtgcgaggggtgaagcaaccaaacgcagtccatccccagaggagaaggcctctcgctgcctcatcctctgaacaccgggcccaacctgatctgatccagatcttgactggggggtctgactcactgtgggaagagaagaggggagtatcctgagttgtaggaactgctttccaactccaagctccctccacaagtttccctcccaggccccccacaccccagtgtggacttgggatttgctgtgctcagcccagggctgataggtccctggtgaagcccagggtggggggtgtcagggcagtggaggggcccgaggagccaggttgcatttattggatggggagctccaaggggcattagtggtttgggctgggccttttgtgccctggtactctgccacctgtgttgctgatggtgtcaaggaaggaggacttggcctagggttgtctgagccggagccggcagctccactggagagcagtgcaggcagagtggagcctcctgctctcctggaccagctgcagacccccaaccctggtttctgtgccatgttgcgctctgaccgtctctgttgcttctcttctggtgttgcttctcctccctcccattctctctgcaactccctgcgggccgcatcgcttgctttcactgccgtctggctaggactcccttcttccttccttccccgagaaggcctcaatgtggcgaggaagatgctggggccggtagggctgtgagatcttctggggaggctagccgggtggggcgggagcctctcagctgtccagattcagaactggagcccactcctcctccctctcgttgcctcagcctgccctcaccctcaggactaggcagaggtgaggctggctcaccctgaagaggtgggataggaccgggggaccccagagggaggcctaggaggggactgcacccatactgcttccctaccacaaatcagggctcagggagaggccatgcggccagcccaggtctgcatgctgagccccatcctccacagcttgccgctgacgctctctcctgtcaccccgcccctgctctctccccagatgtgttctgagctggatgccgggttccagaatcgctgcacagttccaacaggacagcgccttcccccatgcgctgggaggggaccctccatttctccccctcacccatgctgagtgtagagccggggcctgggtggcgggtgggggccgggtgggaggtggcagtagtcttagcctgtgcactctcttccttgggtgtttggtgctggctcctggggactacaaatcccagagtgcggtgtgcccggcctcatttctgatagatcccgcttgggggaggtggtgtatggttacggagctgtgcatcttgggacatgtagtagcccaggtcggcttgtcactcgctgtgagatggggagattttgtcttttgatttatccctgtagggctggcagggttgtagatgaagggggaatgatctgagccttggttcccctgacacgtcttgctagccccagggttagagtgggcagggcagagccgcgcagcacctgggagcggtacctttcccttgggcagcctggggtcccaggaacaagccagggcgagtggcatgtctgcctgagcagggtgtggccccagaaagctgaggagtgtgggctggcagagagcttcgagggcaaggccacccgcgggggcgtgtgtgtggtggggcttggcatgtgatggcagctccaggcatgccgctgcttgtatggctttctttggcctctgaccctgctgcccattctttccaacatcacagatgaactgcctctcctcctccctgcctggggagcccagtggccagggaggggagtggtggagccagtcgctgtaacactgagcctcagagacgaaccaaaaccagctgggctgagctcagatccagggggaaatgctggaagtcaataaaactgagttttgagagcttgaaaa

SEQ ID NO: 140 - DNA, 2303 bp, Homo sapiens
gaattcgtccaaactgaggatcacaagtctccacattctgagtaggaggatgagggtctgagttaggatttgggtcctgcagggcttgctaaggaatcccctgatggcctaggattccacgcagagcacatctggtgtgagagagctcgctgcaagggtgaaggctccgccctatcagatagacaaccaggccaccaagaggcccagccctccaaaccctggatttgcaacatcctcaaagaacagcaacgggccttgagcagaattgagaaggaaatacccccacctgccctcagccgttaagtgggctttgctattcacaagggcctctgggtgtcctggcagagaggggagatggcacaggcaccaggtgctagggtgccagggcctcccgagaaggaacaggtgcaaagcaggcaattagcccagaaggtatccgtggggcaggcagcctagatctgatgggggaagccaccaggattacatcatctgctgtaacaactgctctgaaaagaagatatttttcaacctgaacttgcagtagctagtggagaggcaggaaaaaggaaatgaaaccagagacagagggaagctgagcgaaaatagaccttcccgagagaggaggaagcccggagagagacgcacggtcccctccccgcccctaggccgccgccccctctctgccctcggcggcgagcagcgcgccgcgacccgggccgaaggtgcgaggggctccgggcggccgggcgggcgcacaccatccccgcgggcggcgcggagccggcgacagcgcgcgagagggaccgggcggtggcggcggcgggaccgggatggaagggagcgcggtgactgtccttgagcgcggaggggcgagctcgccggcggagcgccggagcaagcggaggcgcaggagcggcggcgacggcggcggcggcggcggcgcccgagcacccgagggggtccgagccccggcagccggccagccccgcgccacaaagggagcgcccccgccgcccggcaccccgcctccctccccaatgtcctcggccatcgaaaggaagagcctggacccttcagaggaaccagtggatgaggtgctgcagatccccccatccctgctgacatgcggcggctgccagcagaacattggggaccgctacttcctgaaggccatcgaccagtactggcacgaggactgcctgagctgcgacctctgtggctgccggctgggtgaggtggggcggcgcctctactacaaactgggccggaagctctgccggagagactatctcaggctttttgggcaagacggtctctgcgcatcctgtgacaagcggattcgtgcctatgagatgacaatgcgggtgaaagacaaagtgtatcacctggaatgtttcaaatgcgccgcctgtcagaagcatttctgtgtaggtgacagatacctcctcatcaactctgacatagtgtgcgaacaggacatctacgagtggactaagatcaatgggatgatataggcccgagtccccgggcatctttggggaggtgttcactgaagacgccgtctccatggcatcttcgtcttcactcttaggcactttgggggtttgagggtggggtaagggatttcttaggggatggtagacctttattgggtatcaagacatagcatccaagtggcataattcaggggctgacacttcaaggtgacagaaggaccagcccttgagggagaacttatggccacagcccatccatagtaactgacatgattagcagaagaaaggaacatttaggggcaagcaggcgctgtgctatcatgatggaatttcatatctacagatagagagttgttgtgtacagacttgttgtgactttgacgcttgcgaactagagatgtgcaattgatttcttttcttcctggctttttaactcccctgtttcaatcactgtcctccacacaagggaaggacagaaaggagagtggccattctttttttcttggcccccttcccaaggccttaagctttggacccaaggaaaactgcatggagacgcatttcggttgagaatggaaaccacaacttttaaccaaacaattatttaaagcaatgctgatgaatcactgtttttagacaccttcattttgaggggaggagttccacagattgtttctatacaaatataaatcttaaaaagttgttcaactattttattatcctagattatatcaaagtatttgtcgtgtgtagaaaaaaaaacagctctgcaggcttaataaaaatgacagactgaaaaaaaaaaaa

SEQ ID NO: 141 - DNA, 1690 bp, Homo sapiens
tgctttctcaaaggccccacagtcctccacttcctggggaggtagctgcagaataaaaccagcagagactccttttctcctaaccgtcccggccaccgctgcctcagcctctgcctcccagcctctttctgagggaaaggacaagatgaagtggaaggcgcttttcaccgcggccatcctgcaggcacagttgccgattacagaggcacagagctttggcctgctggatcccaaactctgctacctgctggatggaatcctcttcatctatggtgtcattctcactgccttgttcctgagagtgaagttcagcaggagcgcagacgcccccgcgtaccagcagggccagaaccagctctataacgagctcaatctaggacgaagagaggagtacgatgttttggacaagagacgtggccgggaccctgagatggggggaaagccgcagagaaggaagaaccctcaggaaggcctgtacaatgaactgcagaaagataagatggcggaggcctacagtgagattgggatgaaaggcgagcgccggaggggcaaggggcacgatggcctttaccagggtctcagtacagccaccaaggacacctacgacgcccttcacatgcaggccctgccccctcgctaacagccaggggatttcaccactcaaaggccagacctgcagacgcccagattatgagacacaggatgaagcatttacaacccggttcactcttctcagccactgaagtattcccctttatgtacaggatgctttggttatatttagctccaaaccttcacacacagactgttgtccctgcactctttaagggagtgtactcccagggcttacggccctggccttgggccctctggtttgccggtggtgcaggtagacctgtctcctggcggttcctcgttctccctgggaggcgggcgcactgcctctcacagctgagttgttgagtctgttttgtaaagtccccagagaaagcgcagatgctagcacatgccctaatgtctgtatcactctgtgtctgagtggcttcactcctgctgtaaatttggcttctgttgtcaccttcacctcctttcaaggtaactgtactgggccatgttgtgcctccctggtgagagggccgggcagaggggcagatggaaaggagcctaggccaggtgcaaccagggagctgcaggggcatgggaaggtgggcgggcaggggagggtcagccagggcctgcgagggcagcgggagcctccctgcctcaggcctctgtgccgcaccattgaactgtaccatgtgctacaggggccagaagatgaacagactgaccttgatgagctgtgcacaaagtggcataaaaaacatgtggttacacagtgtgaataaagtgctgcggagcaagaggaggccgttgattcacttcacgctttcagcgaatgacaaaatcatctttgtgaaggcctcgcaggaagacccaacacatgggacctataactgcccagcggacagtggcaggacaggaaaaacccgtcaatgtactaggatactgctgcgtcattacagggcacaggccatggatggaaaacgctctctgctctgctttttttctactgttttaatttatactggcatgctaaagccttcctattttgcataataaatgcttcagtgaaaatgcaaaaaaaaaa

SEQ ID NO: 142 - DNA, 1891 bp, Homo sapiens
ccccgcgtgtctgctaggagagggcgggcagcgccgcggcgcgcgcgatccggctgacgcatctggccccggttccccaagaccagagcggggccgggagggagggggaagaggcgagagcgcggagggcgcgcgtgcgcattggcgcggggaggagcagggatcttggcagcgggcgaggaggctgcgagcgagccgcgaaccgagcgggcggcgggcgcgcgcaccatgggggagaaacccgggaccagggtcttcaagaagtcgagccctaactgcaagctcaccgtgtacttgggcaagcgggacttcgtagatcacctggacaaagtggaccctgtagtgtttgtgaccctcacctgcgccttccgctatggccgtgaagacctggatgtgctgggcttgtccttccgcaaagacctgttcatcgccacctaccaggccttccccccggtgcccaacccaccccggccccccacccgcctgcaggaccggctgctgaggaagctgggccagcatgcccaccccttcttcttcaccataccccagaatcttccatgctccgtcacactgcagccaggcccagaggatacaggaaaggcctgcggcgtagactttgagattcgagccttctgtgctaaatcactagaagagaaaagccacaaaaggaactctgtgcggctggtgatccgaaaggtgcagttcgccccggagaaacccggcccccagccttcagccgaaaccacacgccacttcctcatgtctgaccggtccctgcacctcgaggcttccctggacaaggagctgtactaccatggggagcccctcaatgtaaatgtccacgtcaccaacaactccaccaagaccgtcaagaagatcaaagtctctgtgagacagtacgccgacatctgcctcttcagcaccgcccagtacaagtgtcctgtggctcaactcgaacaagatgaccaggtatctcccagctccacattctgtaaggtgtacaccataaccccactgctcagcgacaaccgggagaagcggggtctcgccctggatgggaaactcaagcacgaggacaccaacctggcttccagcaccatcgtgaaggagggtgccaacaaggaggtgctgggaatcctggtgtcctacagggtcaaggtgaagctggtggtgtctcgaggcggggatgtctctgtggagctgccttttgttcttatgcaccccaagccccacgaccacatccccctccccagaccccagtcagccgctccggagacagatgtccctgtggacaccaacctcattgaatttgataccaactatgccacagatgatgacattgtgtttgaggactttgcccggcttcggctgaaggggatgaaggatgacgactatgatgatcaactctgctaggaagcggggtgggaagaagggaggggatggggttgggagaggtgagggcaggattaagatccccactgtcaatgggggattgtcccagcccctcttcccttcccctcacctggaagcttcttcaaccaatcccttcacactctctcccccatccccccaagatacacactggaccctctcttgctgaatgtgggcattaattttttgactgcagctctgcttctccagccccgccgtgggtggcaagctgtgttcatacctaaattttctggaaggggacagtgaaaagaggagtgacaggagggaaagggggagacaaaactcctactctcaacctcacaccaacacctcccattatcactctctctgcccccattccttcaagaggagaccctttggggacaaggccgtttctttgtttctgagcataaagaagaaaataaatcttttactaagcatgaaaaaaaaaaaaaaaaaa

SEQ ID NO: 143 - DNA, 742 bp, Homo sapiens
tccaggttcacacaactggaacccatctccaggaacaaacagctggaacccatctcccgttgaagggaaactgccagatttttgtaagattcttcctcctgggagcctgtgttggaagagatggtgatgggcctgggcgttttgttgttggtcttcgtgctgggtctgggtctgaccccaccgaccctggctcaggataactccaggtacacacacttcctgacccagcactatgatgccaaaccacagggccgggatgacagatactgtgaaagcatcatgaggagacggggcctgacctcaccctgcaaagacatcaacacatttattcatggcaacaagcgcagcatcaaggccatctgtgaaaacaagaatggaaaccctcacagagaaaacctaagaataagcaagtcttctttccaggtcaccacttgcaagctacatggaggttccccctggcctccatgccagtaccgagccacagcggggttcagaaacgttgttgttgcttgtgaaaatggcttacctgtccacttggatcagtcaattttccgtcgtccgtaaccagcgggcccctggtcaagtgctggctctgctgtccttgccttccatttcccctctgcacccagaacagtggtggcaacattcattgccaagggcccaaagaaagagctacctggaccttttgttttctgtttgacaacatgtttaataaataaaaatgtcttgatatcagtaagaa

SEQ ID NO: 144 - DNA, 14138 bp, Homo sapiens
gcactgcagcgccagcgtccgagcgggcggccgagctcccggagcggcctggccccgagccccgagcgggcgtcgctcagcagcaggtcgcggccgcagccccatccagccccgcgcccgccatgccgtccgcgggccccgcctgagctgcggcctccgcgcgcgggcgggcctggggacggcggggccatgcgcgcgctgccctaacgatgccgcccgccgcgcccgcccgcctggcgctggccctgggcctgggcctgtggctcggggcgctggcggggggccccgggcgcggctgcgggccctgcgagcccccctgcctctgcggcccagcgcccggcgccgcctgccgcgtcaactgctcgggccgcgggctgcggacgctcggtcccgcgctgcgcatccccgcggacgccacagcgctagacgtctcccacaacctgctccgggcgctggacgttgggctcctggcgaacctctcggcgctggcagagctggatataagcaacaacaagatttctacgttagaagaaggaatatttgctaatttatttaatttaagtgaaataaacctgagtgggaacccgtttgagtgtgactgtggcctggcgtggctgccgcgatgggcggaggagcagcaggtgcgggtggtgcagcccgaggcagccacgtgtgctgggcctggctccctggctggccagcctctgcttggcatccccttgctggacagtggctgtggtgaggagtatgtcgcctgcctccctgacaacagctcaggcaccgtggcagcagtgtccttttcagctgcccacgaaggcctgcttcagccagaggcctgcagcgccttctgcttctccaccggccagggcctcgcagccctctcggagcagggctggtgcctgtgtggggcggcccagccctccagtgcctcctttgcctgcctgtccctctgctccggccccccgccacctcctgcccccacctgtaggggccccaccctcctccagcacgtcttccctgcctccccaggggccaccctggtggggccccacggacctctggcctctggccagctagcagccttccacatcgctgccccgctccctgtcactgccacacgctgggacttcggagacggctccgccgaggtggatgccgctgggccggctgcctcgcatcgctatgtgctgcctgggcgctatcacgtgacggccgtgctggccctgggggccggctcagccctgctggggacagacgtgcaggtggaagcggcacctgccgccctggagctcgtgtgcccgtcctcggtgcagagtgacgagagccttgacctcagcatccagaaccgcggtggttcaggcctggaggccgcctacagcatcgtggccctgggcgaggagccggcccgagcggtgcacccgctctgcccctcggacacggagatcttccctggcaacgggcactgctaccgcctggtggtggagaaggcggcctggctgcaggcgcaggagcagtgtcaggcctgggccggggccgccctggcaatggtggacagtcccgccgtgcagcgcttcctggtctcccgggtcaccaggagcctagacgtgtggatcggcttctcgactgtgcagggggtggaggtgggcccagcgccgcagggcgaggccttcagcctggagagctgccagaactggctgcccggggagccacacccagccacagccgagcactgcgtccggctcgggcccaccgggtggtgtaacaccgacctgtgctcagcgccgcacagctacgtctgcgagctgcagcccggaggcccagtgcaggatgccgagaacctcctcgtgggagcgcccagtggggacctgcagggacccctgacgcctctggcacagcaggacggcctctcagccccgcacgagcccgtggaggtcatggtattcccgggcctgcgtctgagccgtgaagccttcctcaccacggccgaatttgggacccaggagctccggcggcccgcccagctgcggctgcaggtgtaccggctcctcagcacagcagggaccccggagaacggcagcgagcctgagagcaggtccccggacaacaggacccagctggcccccgcgtgcatgccagggggacgctggtgccctggagccaacatctgcttgccgctggacgcctcctgccacccccaggcctgcgccaatggctgcacgtcagggccagggctacccggggccccctatgcgctatggagagagttcctcttctccgttcccgcggggccccccgcgcagtactcggtcaccctccacggccaggatgtcctcatgctccctggtgacctcgttggcttgcagcacgacgctggccctggcgccctcctgcactgctcgccggctcccggccaccctggtccccaggccccgtacctctccgccaacgcctcgtcatggctgccccacttgccagcccagctggagggcacttgggcctgccctgcctgtgccctgcggctgcttgcagccacggaacagctcaccgtgctgctgggcttgaggcccaaccctggactgcggctgcctgggcgctatgaggtccgggcagaggtgggcaatggcgtgtccaggcacaacctctcctgcagctttgacgtggtctccccagtggctgggctgcgggtcatctaccctgccccccgcgacggccgcctctacgtgcccaccaacggctcagccttggtgctccaggtggactctggtgccaacgccacggccacggctcgctggcctgggggcagtgtcagcgcccgctttgagaatgtctgccctgccctggtggccaccttcgtgcccggctgcccctgggagaccaacgataccctgttctcagtggtagcactgccgtggctcagtgagggggagcacgtggtggacgtggtggtggaaaacagcgccagccgggccaacctcagcctgcgggtgacggcggaggagcccatctgtggcctccgcgccacgcccagccccgaggcccgtgtactgcagggagtcctagtgaggtacagccccgtggtggaggccggctcggacatggtcttccggtggaccatcaacgacaagcagtccctgaccttccagaacgtggtcttcaatgtcatttatcagagcgcggcggtcttcaagctctcactgacggcctccaaccacgtgagcaacgtcaccgtgaactacaacgtaaccgtggagcggatgaacaggatgcagggtctgcaggtctccacagtgccggccgtgctgtcccccaatgccacgctagcactgacggcgggcgtgctggtggactcggccgtggaggtggccttcctgtggacctttggggatggggagcaggccctccaccagttccagcctccgtacaacgagtccttcccggttccagacccctcggtggcccaggtgctggtggagcacaatgtcatgcacacctacgctgccccaggtgagtacctcctgaccgtgctggcatctaatgccttcgagaacctgacgcagcaggtgcctgtgagcgtgcgcgcctccctgccctccgtggctgtgggtgtgagtgacggcgtcctggtggccggccggcccgtcaccttctacccgcacccgctgccctcgcctgggggtgttctttacacgtgggacttcggggacggctcccctgtcctgacccagagccagccggctgccaaccacacctatgcctcgaggggcacctaccacgtgcgcctggaggtcaacaacacggtgagcggtgcggcggcccaggcggatgtgcgcgtctttgaggagctccgcggactcagcgtggacatgagcctggccgtggagcagggcgcccccgtggtggtcagcgccgcggtgcagacgggcgacaacatcacgtggaccttcgacatgggggacggcaccgtgctgtcgggcccggaggcaacagtggagcatgtgtacctgcgggcacagaactgcacagtgaccgtgggtgcggccagccccgccggccacctggcccggagcctgcacgtgctggtcttcgtcctggaggtgctgcgcgttgaacccgccgcctgcatccccacgcagcctgacgcgcggctcacggcctacgtcaccgggaacccggcccactacctcttcgactggaccttcggggatggctcctccaacacgaccgtgcgggggtgcccgacggtgacacacaacttcacgcggagcggcacgttccccctggcgctggtgctgtccagccgcgtgaacagggcgcattacttcaccagcatctgcgtggagccagaggtgggcaacgtcaccctgcagccagagaggcagtttgtgcagctcggggacgaggcctggctggtggcatgtgcctggcccccgttcccctaccgctacacctgggactttggcaccgaggaagccgcccccacccgtgccaggggccctgaggtgacgttcatctaccgagacccaggctcctatcttgtgacagtcaccgcgtccaacaacatctctgctgccaatgactcagccctggtggaggtgcaggagcccgtgctggtcaccagcatcaaggtcaatggctcccttgggctggagctgcagcagccgtacctgttctctgctgtgggccgtgggcgccccgccagctacctgtgggatctgggggacggtgggtggctcgagggtccggaggtcacccacgcttacaacagcacaggtgacttcaccgttagggtggccggctggaatgaggtgagccgcagcgaggcctggctcaatgtgacggtgaagcggcgcgtgcgggggctcgtcgtcaatgcaagccgcacggtggtgcccctgaatgggagcgtgagcttcagcacgtcgctggaggccggcagtgatgtgcgctattcctgggtgctctgtgaccgctgcacgcccatccctgggggtcctaccatctcttacaccttccgctccgtgggcaccttcaatatcatcgtcacggctgagaacgaggtgggctccgcccaggacagcatcttcgtctatgtcctgcagctcatagaggggctgcaggtggtgggcggtggccgctacttccccaccaaccacacggtacagctgcaggccgtggttagggatggcaccaacgtctcctacagctggactgcctggagggacaggggcccggccctggccggcagcggcaaaggcttctcgctcaccgtgctcgaggccggcacctaccatgtgcagctgcgggccaccaacatgctgggcagcgcctgggccgactgcaccatggacttcgtggagcctgtggggtggctgatggtggccgcctccccgaacccagctgccgtcaacacaagcgtcaccctcagtgccgagctggctggtggcagtggtgtcgtatacacttggtccttggaggaggggctgagctgggagacctccgagccatttaccacccatagcttccccacacccggcctgcacttggtcaccatgacggcagggaacccgctgggctcagccaacgccaccgtggaagtggatgtgcaggtgcctgtgagtggcctcagcatcagggccagcgagcccggaggcagcttcgtggcggccgggtcctctgtgcccttttgggggcagctggccacgggcaccaatgtgagctggtgctgggctgtgcccggcggcagcagcaagcgtggccctcatgtcaccatggtcttcccggatgctggcaccttctccatccggctcaatgcctccaacgcagtcagctgggtctcagccacgtacaacctcacggcggaggagcccatcgtgggcctggtgctgtgggccagcagcaaggtggtggcgcccgggcagctggtccattttcagatcctgctggctgccggctcagctgtcaccttccgcctgcaggtcggcggggccaaccccgaggtgctccccgggccccgtttctcccacagcttcccccgcgtcggagaccacgtggtgagcgtgcggggcaaaaaccacgtgagctgggcccaggcgcaggtgcgcatcgtggtgctggaggccgtgagtgggctgcaggtgcccaactgctgcgagcctggcatcgccacgggcactgagaggaacttcacagcccgcgtgcagcgcggctctcgggtcgcctacgcctggtacttctcgctgcagaaggtccagggcgactcgctggtcatcctgtcgggccgcgacgtcacctacacgcccgtggccgcggggctgttggagatccaggtgcgcgccttcaacgccctgggcagtgagaaccgcacgctggtgctggaggttcaggacgccgtccagtatgtggccctgcagagcggcccctgcttcaccaaccgctcggcgcagtttgaggccgccaccagccccagcccccggcgtgtggcctaccactgggactttggggatgggtcgccagggcaggacacagatgagcccagggccgagcactcctacctgaggcctggggactaccgcgtgcaggtgaacgcctccaacctggtgagcttcttcgtggcgcaggccacggtgaccgtccaggtgctggcctgccgggagccggaggtggacgtggtcctgcccctgcaggtgctgatgcggcgatcacagcgcaactacttggaggcccacgttgacctgcgcgactgcgtcacctaccagactgagtaccgctgggaggtgtatcgcaccgccagctgccagcggccggggcgcccagcgcgtgtggccctgcccggcgtggacgtgagccggcctcggctggtgctgccgcggctggcgctgcctgtggggcactactgctttgtgtttgtcgtgtcatttggggacacgccactgacacagagcatccaggccaatgtgacggtggcccccgagcgcctggtgcccatcattgagggtggctcataccgcgtgtggtcagacacacgggacctggtgctggatgggagcgagtcctacgaccccaacctggaggacggcgaccagacgccgctcagtttccactgggcctgtgtggcttcgacacagagggaggctggcgggtgtgcgctgaactttgggccccgcgggagcagcacggtcaccattccacgggagcggctggcggctggcgtggagtacaccttcagcctgaccgtgtggaaggccggccgcaaggaggaggccaccaaccagacggtgctgatccggagtggccgggtgcccattgtgtccttggagtgtgtgtcctgcaaggcacaggccgtgtacgaagtgagccgcagctcctacgtgtacttggagggccgctgcctcaattgcagcagcggctccaagcgagggcggtgggctgcacgtacgttcagcaacaagacgctggtgctggatgagaccaccacatccacgggcagtgcaggcatgcgactggtgctgcggcggggcgtgctgcgggacggcgagggatacaccttcacgctcacggtgctgggccgctctggcgaggaggagggctgcgcctccatccgcctgtcccccaaccgcccgccgctggggggctcttgccgcctcttcccactgggcgctgtgcacgccctcaccaccaaggtgcacttcgaatgcacgggctggcatgacgcggaggatgctggcgccccgctggtgtacgccctgctgctgcggcgctgtcgccagggccactgcgaggagttctgtgtctacaagggcagcctctccagctacggagccgtgctgcccccgggtttcaggccacacttcgaggtgggcctggccgtggtggtgcaggaccagctgggagccgctgtggtcgccctcaacaggtctttggccatcaccctcccagagcccaacggcagcgcaacggggctcacagtctggctgcacgggctcaccgctagtgtgctcccagggctgctgcggcaggccgatccccagcacgtcatcgagtactcgttggccctggtcaccgtgctgaacgagtacgagcgggccctggacgtggcggcagagcccaagcacgagcggcagcaccgagcccagatacgcaagaacatcacggagactctggtgtccctgagggtccacactgtggatgacatccagcagatcgctgctgcgctggcccagtgcatggggcccagcagggagctcgtatgccgctcgtgcctgaagcagacgctgcacaagctggaggccatgatgctcatcctgcaggcagagaccaccgcgggcaccgtgacgcccaccgccatcggagacagcatcctcaacatcacaggagacctcatccacctggccagctcggacgtgcgggcaccacagccctcagagctgggagccgagtcaccatctcggatggtggcgtcccaggcctacaacctgacctctgccctcatgcgcatcctcatgcgctcccgcgtgctcaacgaggagcccctgacgctggcgggcgaggagatcgtggcccagggcaagcgctcggacccgcggagcctgctgtgctatggcggcgccccagggcctggctgccacttctccatccccgaggctttcagcggggccctggccaacctcagtgacgtggtgcagctcatctttctggtggactccaatccctttccctttggctatatcagcaactacaccgtctccaccaaggtggcctcgatggcattccagacacaggccggcgcccagatccccatcgagcggctggcctcagagcgcgccatcaccgtgaaggtgcccaacaactcggactgggctgcccggggccaccgcagctccgccaactccgccaactccgttgtggtccagccccaggcctccgtcggtgctgtggtcaccctggacagcagcaaccctgcggccgggctgcatctgcagctcaactatacgctgctggacggccactacctgtctgaggaacctgagccctacctggcagtctacctacactcggagccccggcccaatgagcacaactgctcggctagcaggaggatccgcccagagtcactccagggtgctgaccaccggccctacaccttcttcatttccccggggagcagagacccagcggggagttaccatctgaacctctccagccacttccgctggtcggcgctgcaggtgtccgtgggcctgtacacgtccctgtgccagtacttcagcgaggaggacatggtgtggcggacagaggggctgctgcccctggaggagacctcgccccgccaggccgtctgcctcacccgccacctcaccgccttcggcgccagcctcttcgtgcccccaagccatgtccgctttgtgtttcctgagccgacagcggatgtaaactacatcgtcatgctgacatgtgctgtgtgcctggtgacctacatggtcatggccgccatcctgcacaagctggaccagttggatgccagccggggccgcgccatccctttctgtgggcagcggggccgcttcaagtacgagatcctcgtcaagacaggctggggccggggctcaggtaccacggcccacgtgggcatcatgctgtatggggtggacagccggagcggccaccggcacctggacggcgacagagccttccaccgcaacagcctggacatcttccggatcgccaccccgcacagcctgggtagcgtgtggaagatccgagtgtggcacgacaacaaagggctcagccctgcctggttcctgcagcacgtcatcgtcagggacctgcagacggcacgcagcgccttcttcctggtcaatgactggctttcggtggagacggaggccaacgggggcctggtggagaaggaggtgctggccgcgagcgacgcagcccttttgcgcttccggcgcctgctggtggctgagctgcagcgtggcttctttgacaagcacatctggctctccatatgggaccggccgcctcgtagccgtttcactcgcatccagagggccacctgctgcgttctcctcatctgcctcttcctgggcgccaacgccgtgtggtacggggctgttggcgactctgcctacagcacggggcatgtgtccaggctgagcccgctgagcgtcgacacagtcgctgttggcctggtgtccagcgtggttgtctatcccgtctacctggccatcctttttctcttccggatgtcccggagcaaggtggctgggagcccgagccccacacctgccgggcagcaggtgctggacatcgacagctgcctggactcgtccgtgctggacagctccttcctcacgttctcaggcctccacgctgagcaggcctttgttggacagatgaagagtgacttgtttctggatgattctaagagtctggtgtgctggccctccggcgagggaacgctcagttggccggacctgctcagtgacccgtccattgtgggtagcaatctgcggcagctggcacggggccaggcgggccatgggctgggcccagaggaggacggcttctccctggccagcccctactcgcctgccaaatccttctcagcatcagatgaagacctgatccagcaggtccttgccgagggggtcagcagcccagcccctacccaagacacccacatggaaacggacctgctcagcagcctgtccagcactcctggggagaagacagagacgctggcgctgcagaggctgggggagctggggccacccagcccaggcctgaactgggaacagccccaggcagcgaggctgtccaggacaggactggtggagggtctgcggaagcgcctgctgccggcctggtgtgcctccctggcccacgggctcagcctgctcctggtggctgtggctgtggctgtctcagggtgggtgggtgcgagcttccccccgggcgtgagtgttgcgtggctcctgtccagcagcgccagcttcctggcctcattcctcggctgggagccactgaaggtcttgctggaagccctgtacttctcactggtggccaagcggctgcacccggatgaagatgacaccctggtagagagcccggctgtgacgcctgtgagcgcacgtgtgccccgcgtacggccaccccacggctttgcactcttcctggccaaggaagaagcccgcaaggtcaagaggctacatggcatgctgcggagcctcctggtgtacatgctttttctgctggtgaccctgctggccagctatggggatgcctcatgccatgggcacgcctaccgtctgcaaagcgccatcaagcaggagctgcacagccgggccttcctggccatcacgcggtctgaggagctctggccatggatggcccacgtgctgctgccctacgtccacgggaaccagtccagcccagagctggggcccccacggctgcggcaggtgcggctgcaggaagcactctacccagaccctcccggccccagggtccacacgtgctcggccgcaggaggcttcagcaccagcgattacgacgttggctgggagagtcctcacaatggctcggggacgtgggcctattcagcgccggatctgctgggggcatggtcctggggctcctgtgccgtgtatgacagcgggggctacgtgcaggagctgggcctgagcctggaggagagccgcgaccggctgcgcttcctgcagctgcacaactggctggacaacaggagccgcgctgtgttcctggagctcacgcgctacagcccggccgtggggctgcacgccgccgtcacgctgcgcctcgagttcccggcggccggccgcgccctggccgccctcagcgtccgcccctttgcgctgcgccgcctcagcgcgggcctctcgctgcctctgctcacctcggtgtgcctgctgctgttcgccgtgcacttcgccgtggccgaggcccgtacttggcacagggaagggcgctggcgcgtgctgcggctcggagcctgggcgcggtggctgctggtggcgctgacggcggccacggcactggtacgcctcgcccagctgggtgccgctgaccgccagtggacccgtttcgtgcgcggccgcccgcgccgcttcactagcttcgaccaggtggcgcagctgagctccgcagcccgtggcctggcggcctcgctgctcttcctgcttttggtcaaggctgcccagcagctacgcttcgtgcgccagtggtccgtctttggcaagacattatgccgagctctgccagagctcctgggggtcaccttgggcctggtggtgctcggggtagcctacgcccagctggccatcctgctcgtgtcttcctgtgtggactccctctggagcgtggcccaggccctgttggtgctgtgccctgggactgggctctctaccctgtgtcctgccgagtcctggcacctgtcacccctgctgtgtgtggggctctgggcactgcggctgtggggcgccctacggctgggggctgttattctccgctggcgctaccacgccttgcgtggagagctgtaccggccggcctgggagccccaggactacgagatggtggagttgttcctgcgcaggctgcgcctctggatgggcctcagcaaggtcaaggagttccgccacaaagtccgctttgaagggatggagccgctgccctctcgctcctccaggggctccaaggtatccccggatgtgcccccacccagcgctggctccgatgcctcgcacccctccacctcctccagccagctggatgggctgagcgtgagcctgggccggctggggacaaggtgtgagcctgagccctcccgcctccaagccgtgttcgaggccctgctcacccagtttgaccgactcaaccaggccacagaggacgtctaccagctggagcagcagctgcacagcctgcaaggccgcaggagcagccgggcgcccgccggatcttcccgtggcccatccccgggcctgcggccagcactgcccagccgccttgcccgggccagtcggggtgtggacctggccactggccccagcaggacaccccttcgggccaagaacaaggtccaccccagcagcacttagtcctccttcctggcgggggtgggccgtggagtcggagtggacaccgctcagtattactttctgccgctgtcaaggccgagggccaggcagaatggctgcacgtaggttccccagagagcaggcaggggcatctgtctgtctgtgggcttcagcactttaaagaggctgtgtggccaaccaggacccagggtcccctccccagctcccttgggaaggacacagcagtattggacggtttctagcctctgagatgctaatttatttccccgagtcctcaggtacagcgggctgtgcccggccccaccccctgggcagatgtcccccactgctaaggctgctggcttcagggagggttagcctgcaccgccgccaccctgcccctaagttattacctctccagttcctaccgtactccctgcaccgtctcactgtgtgtctcgtgtcagtaatttatatggtgttaaaatgtgtatatttttgtatgtcactattttcactagggctgaggggcctgcgcccagagctggcctcccccaacacctgctgcgcttggtaggtgtggtggcgttatggcagcccggctgctgcttggatgcgagcttggccttgggccggtgctgggggcacagctgtctgccaggcactctcatcaccccagaggccttgtcatcctcccttgccccaggccaggtagcaagagagcagcgcccaggcctgctggcatcaggtctgggcaagtagcaggactaggcatgtcagaggaccccagggtggttagaggaaaagactcctcctgggggctggctcccagggtggaggaaggtgactgtgtgtgtgtgtgtgtgcgcgcgcgcacgcgcgagtgtgctgtatggcccaggcagcctcaaggccctcggagctggctgtgcctgcttctgtgtaccacttctgtgggcatggccgcttctagagcctcgacacccccccaacccccgcaccaagcagacaaagtcaataaaagagctgtctgactgc

SEQ ID NO: 145 - DNA, 7213 bp, Homo sapiens
cactagaatgtgaaggatcttcgcggttctgggtgcccagaaaggcggcgacgcggcggatgacaacattaggccgcgacgcgctcctggccaggcggcggctgtagtgttagctttggacgccgcagtagccgctgccggtagcaagccgactgagggaaggtgggggtccgcccgggctggtggacctcggggccgaaagttcccgccccgctcgggggctgagccggcagtgcctccgcggccgctgggcagcgcccttcgtccaggctcgcgccccagctgccgccgacgacagcggccgagagaagttggggtctgactagacgcttacggggcctcggaccccggcgccgcggcgacctcggaggaaccggctccttgcgtcccgcctccctgggagctccgcacgggatttgcagatttacagaatggctgcacattaatggaaagagaagcataaacctatcttctttcattatggagggaggtttggcagatggagaacctgatcgaacttcgcaaacagtgacgaatctcagcttctgacaccaggaaagatgagtcagcgccaaggaaaagaagcttatccaacgccaaccaaagatttgcatcagccatctcttagtccagcaagtcctcatagccagggttttgaaagagggaaggaagatatttctcaaaataaagatgaatcttcactttctatgtcaaagagcaagtctgaatctaaactttataatggctcagagaaggacagttcaacttcaagcaaactcacaaaaaaagaatctcttaaggtacaaaagaaaaattaccgagaagaaaagaaaagagccacaaaggagctgctcagtacaatcacagatccttctgttattgttatggctgattggttaaagattcgtggtactctaaagagctggaccaagttatggtgtgtgttgaaacctggggtgctactgatctataaaacccaaaaaaatggtcagtgggtaggaacagttcttctgaatgcctgtgaaatcattgaacgtccatcaaaaaaggatggcttttgtttcaaacttttccatcctttggagcaatctatttgggcagtgaagggtccaaaaggtgaagcggttggatccattactcaacccttacctagcagttatttgatcatccgagctacttcagagtcagatggaaggtgctggatggatgctttggagttggctttgaaatgttctagtcttcttaaacgtacaatgatcagagaaggaaaggaacatgacctgagcgtttcatcagatagcacacatgtgactttctatggcttactacgtgctaacaatctccacagtggtgataacttccagttaaatgatagtgaaattgaacgacaacattttaaggaccaagatatgtattctgataaatctgataaagaaaatgatcaagaacatgatgagtctgataatgaggtgatggggaaaagtgaagaaagtgacacagatacatcagaaagacaagatgactcatatatcgaacctgagcctgttgagcctttaaaggagactacctacactgaacagagccatgaagaacttggagaggcaggtgaggcttctcaaacagaaactgtatctgaagaaaacaaaagccttatctggacactattgaaacaagtccgtcctggcatggacctatccaaggtggttctgcctacatttattttggaaccccgttctttcctggataaactttcagattactactatcatgcagatttcctatctgaggcagctcttgaagaaaatccttatttccgtttgaagaaagtagtgaaatggtatttgtcaggattctataaaaagccaaagggactgaagaaaccttataatcctatacttggcgagactttccgttgtttatggattcatcccagaacaaacagcaaaactttttatattgctgaacaggtgtcccatcatccaccaatatctgccttttatgttagtaatcgaaaagatggattttgccttagcggtagtatcctggctaagtctaagttttatggaaactcattatctgcaatattagagggagaagcacggttaactttcttgaatagaggtgaagattatgtaatgacaatgccatacgctcattgtaaaggaattctttatggtacaatgacactggagcttggtggaacagtcaatattacatgtcaaaaaactggatacagtgcaatacttgaatttaaactaaagccattcctagggagtagtgactgtgttaatcaaatatcagggaaacttaaactgggaaaagaagtcctagctactttggaaggtcattgggatagtgaagtttttattactgataaaaagactgataattcagaggttttctggaatccaacacctgacattaagcaatggagattaataaggcacactgtaaaatttgaagaacagggagattttgaatcagagaaactctggcaacgggtaactcgagccataaatgccaaagaccaaactgaagctacccaagagaagtatgttttggaagaagctcaaagacaagctgccagggatcggaaaacaaaaaatgaagagtggtcttgcaaattatttgaacttgatccactcacaggagaatggcattacaagtttgcagatacccgaccatgggacccacttaatgatatgatacagtttgaaaaagatggtgttattcagaccaaagtgaaacatcgtactccaatggttagcgtccccaaaatgaaacataagccaaccaggcaacagaagaaagtagcaaaaggctattcctccccagaacctgacattcaagactcctctggaagtgaagctcaatcagtaaaaccaagtacaagaagaaagaaaggaatagaactgggagacattcagagttccatcgaatctataaaacaaacacaggaagaaattaaaagaaatattatggctcttcgaaatcatttagtttcaagcacaccggccacggattattttctgcaacaaaaagactacttcatcattttcctcctgattttgcttcaagtcataataaacttcatgttcaagtagaagttctctaccattgaatcagtgaactagaaagatctgatttggcctgggaccagtgttcaagttggtttggtctttattaaaaatcacaatattccgaaaacaaaaaaacctaggagataaatgtagaggtattgacttttcgtatcttttatcttcacactgaaacaagagctatcctatttgattattaaagtgagctatgtgttaagtgccaggacatttctagcttttgtgagaatgtgtctacatatgagtataataaacccacatgtatacacaattgtctcttatgtactcctacctgacagtagtctttgtattctatagtatgttctgagatataatgttaacattgttcataacaaaaaatgctatcaatcttataaatatatgtaatctattttcttcataaaacaggcacaaaagttttatcagtaaggaattacagattgagaaatgatggaataatagacataattaattcaatacactactgttaaaatcatttgcaaagcactcagctcaattatcttcttagaaagaaagaaaaagtatgaatggtcaaaatgaatacatcgagagagataaatggcaaattgcttttttaaaagtttacataagttttttttaacccctagaatttaatatttgtagatgcaggtaaatatatatacttacgtgtatatcagtataaaaacactggtgtgcaattaattggattgattataataccaccttaagcacttgctgaaaaaagtgtggtcaaaattgattgctgtccttttgtcttatttttgtttttcttaagtcagctggttcataacataggccaaattctagagatgtttatagagcatttgaagtgctgataatttatgttttttcattatgaaaacttattttagctttagactccagtgtgttcagtgaataagtagaatataaaaaaatataaccagtattttacttcaaaagccaaaaagaggcaataagaaaagacactttgtggtggcctttatgtgtgcattaaaattggtttctgtaaaacgtgtaataagttgagtatctacgaagagtatcaagttctgaagtttaatttttttattatcctcctctcttcttagtaacttctttctgtggcaaaaccacaattctttaagattcctattgttcaggctaaggcaaatttttttgtttgtttcttcagtttaatattttgattttgtgtttttacgtaaatatttatattccttgaaagcaatttttgccaaggtagttcagtttaggaatatgttgttctaaaatatgtcttagaatcctgaaagcatagattttgaaatgtttttttaatgaaaatgaaggtcagagagaataattgccctgaccacatttgcctttcagtaggaggaggctgtgaaatagtaaaattataatcgtttatgccatgataaatacaagattggtaaataaatacattgattggtaaattatgagaatcaaaatgataaaaagagcctgcttttttccctaaccaatatagctatcttaagtatccttaggtttctgtgaagaaccatttcccatgttttcttggcaaaataatgctgtattccatatgtacatgtgaaatgatgttttaaattgataaaagcttaaataagatctacctatacccagtattttcatgatattagaacaaatgggtttttggttatattttatatttgtcaatataatttttgtattcacattctgttacactctgcctattcattgatatatgatattctgtaaatattgtacaatttgatcttttttatggtttaaattagttaattacatacaaattgattggcttatcacaaaaatcatttcatcagtaaaccttgttaacattttgtactggtgacccacctcttaggactttggtcttatccacgtgtatgttgttttcatttggtccaaataatattttatttgtatgggtatcttctaagactaaataggtagttgtgttctttatttttaaaatttctttttagagcaaatgttatgggttcttacccaaagagtcaaaaactatttcttaagaaagagcagagttattcatgactgttctttatacactaaaagcatgcatctaatctaatagtcctcttattatgcttttagttgtatgagtctctttctatgaactgaacacaaaactcaggaattggtggcttaattttagatcagtgcttgtactaggcttagttatatgaatctttataacacataattactaactttgtagccatatatgtaattgactttgaatgttatttacctgaaattaatcttccttcacacatggaccgtaaacggttcccagttgtctgagagcctcatgagggtttctaggatttatgaccttatgaccagtttttttcatttaccaagattttattttcctacatgaaaatttaattgagtaataattattcacatgtgcattttctttttagctgttaaatgtactatgccatcatccaccatttagtaaaatgtagctggcccaggacatgtaaaaaaaaaaaaaaaacaacaacaataaatagggcatgtgaaatgttaagttacagcaatagatattttatttgtatttcatgttagtacttttttgttttatatcacttataaaggtacagtgtactctttgtcacagctcagttggtaaccgcattccattgaaaagttggccttgtaaaatacaactctcatttaatattcatgcttttgtgcctttaagaaaatattttttgtcattttttgtgttacagaactataatgtgattcaaggtgtttataggcttgtcataaaagggtcatttctgtgtgttactttctttttatatagctatagtatatttaaacaataatactatcttttataggggtttgtctatttacctattctttactcagacattgatgtagacttgtcagattattctgagtattgttaacagtgccttttcgatggaatcacactttttggctgtcaccttgtgccatatacacacaaaattttgtggaaggcagttttaactttctgaagaatatctgtcaaaatttaagaaaacaaatgtataaaattccattttttccagtgtttagcatttctagtaagcagtgaggttgtttgacatacagtgatgatggcattattgataagccatacatgagactgcagattatattgaatcatattaaatgtacagaaataaaatattagatttatatcaaattttccaatttgaaccagtggggaaaatcccacagaaatcagtaagtttacatttcaatttctatcttatttgactaagtggaaagagattctttaaaatgtataacctgccattatgtaatttggtttcattttattctacctgttgtgtgagtttagtatatttaatttactttttgttactctttacatactgtttatttttgttagtttttaattgaagatggactgttgaaattgtataggaccagtgtcttattaatatgattaatatatttagaagagccacgtgaaacccatgacaaaatgaatgtgaatattctttctaaaaatttagaaaatgttatctttttgcatttattatgtaaaactgttttacagtatcaaaatttttcacttaaagaaaaaaaatgccatgaaacatttgaactgatgagccacagaacttcagttgaaatttttttcactttttagcatgctaaatatacatctgagtttaaatgttctgtttaatggccattcataaattcaagcactaccactggtcagttttgtgtgatagaataaaaatatgttacctgcagtgtaagtacagcacactgtcaaattcttttccttaaggtgcacagtaaatgtacagatagttataggccactgttttgtaatgtagtacatttctaatctattattcctaacctattataactgtttgcagaaagaaaagaatttttctaataatctgtaaaattatgctaacttctacaagtaggcttctaaataaaatttttaaaaagagcaaaaaaaaaaaaaaaaaaaa

SEQ ID NO: 146 - DNA, 4252 bp, Homo sapiens
gccccgtcgcactcagagagctgggctggagctccaagcggaaaccgcgggagccgagcccagctaggaatgcagacctcctgaaaaccaagccgaggactgcggggtccggtgtccacgcagagtgtcagcttcctctggtgcaaccagcaagtcttccagtatgaatcccacagaaaccaaggctgtaaaaacagaacctgagaagaagtcacagtcaaccaagctgtctgtggttcatgagaaaaaatcccaagaaggaaagccaaaagaacacacagagccaaaaagcctacccaagcaggcatcagatacaggaagtaacgatgctcacaataaaaaagcagtttccagatcagctgaacagcagccatcagagaaatcaacagaaccaaagactaaaccacaagacatgatttctgctggtggagagagtgttgctggtatcactgcaatatctggcaagccgggtgacaagaaaaaagaaaagaaatcattaaccccagctgtgccagttgaatctaaaccggataaaccatcgggaaagtcaggcatggatgctgctttggatgacttaatagatactttaggaggacctgaagaaactgaagaagaaaatacaacgtatactggaccagaagtttcagatccaatgagttccacctacatagaggaattgggtaaaagagaagtcacaattcctccaaaatatagggaactattggctaaacccatagggccagatgatgctatagacgccttgtcatctgacttcacctgtgggtcgcctacagctgctggaaagaaaactgaaaaagaggaatctacagaagttttaaaagctcagtcagcagggacagtcagaagtgctgctccaccccaagagaagaaaagaaaggtggagaaggatacaatgagtgatcaagcactcgaggctctgtcggcttcactgggcacccggcaagcagaacctgagctcgacctccgctcaattaaggaagtcgatgaggcaaaagctaaagaagaaaaactagagaagtgtggtgaggatgatgaaacaatcccatctgagtacagattaaaaccagccacggataaagatggaaaaccactattgccagagcctgaagaaaaacccaagcctcggagtgaatcagaactcattgatgaactttcagaagattttgaccggtctgaatgtaaagagaaaccatctaagccaactgaaaagacagaagaatctaaggccgctgctccagctcctgtgtcggaggctgtgtgtcggacctccatgtgtagtatacagtcagcaccccctgagccggctaccttgaagggcacagtgccagatgatgctgtagaagccttggctgatagcctggggaaaaaggaagcagatccagaagatggaaaacctgtgatggataaagtcaaggagaaggccaaagaagaagaccgtgaaaagcttggtgaaaaagaagaaacaattcctcctgattatagattagaagaggtcaaggataaagatggaaagccactcctgccaaaagagtctaaggaacagcttccacccatgagtgaagacttccttctggatgctttgtctgaggacttctctggtccacaaaatgcttcatctcttaaatttgaagatgctaaacttgctgctgccatctctgaagtggtttcccaaaccccagcttcaacgacccaagctggagccccaccccgtgatacctcgcagagtgacaaagacctcgatgatgccttggataaactctctgacagtctaggacaaaggcagcctgacccagatgagaacaaaccaatggaagataaagtaaaggaaaaagctaaagctgaacatagagacaagcttggagaaagagatgacactatcccacctgaatacagacatctcctggatgataatggacaggacaaaccagtgaagccacctacaaagaaatcagaggattcaaagaaacctgcagatgaccaagaccccattgatgctctctcaggagatctggacagctgtccctccactacagaaacctcacagaacacagcaaaggataagtgcaagaaggctgcttccagctccaaagcacctaagaatggaggtaaagcgaaggattcagcaaagacaacagaggaaacttccaagccaaaagatgactaaagaaatacaagttaaggtatctggtatctgcatgtaaaatcttcagctggtggatggtgacttttgaagaacaaaaggctttggcaacagaaaacaattgttctgggtgatttctagaatggtttttgttgagtctctgaacatcctaaatattggtttgttattcttttccagaaagaaaatgaatttgactggttcacctgtgtactgagtattgataaactttgaatttttttaattgccttcaattgggagagaaagctttatatttgtaagaaatatatttgataaagtttcttaaagcaacaccaaaaaaacaaaagaaaagctaagtgaatttttgcacattctacacacagtgcctgtaaatctcatttgtattttcagtttgcccttaattttttttgttagtgtttagaaaacaatgttttaaacattcttcagtgttctgatttcttattaccccctttcctcttgggcttttgaactgtatttgatgttgctttgggataatgtttataagtcaaacataagatattgtacattgggcacatatctcctcttgggctgctaataataaattaataacaggtaacctggacaaaccaggaagcaccaaaccccttttcagtttgaactcttctttgccaggtgtgaggacttctgcatcttacagtcagcacagaacacactgagacttgaatcaagtcagcaacagagcaaaataaaggttagataagtccttgtgtagcaaatttcgagcataagaaataaaatctaattaattcttagggtactcatctgacttgaactctgttggtttactgtgttagtaaactgtgctttctattatctatacataaaacctgagcagcaactgtgtctttagagctattgccacattagcctttgcactgtatagcgtctggctttatggaacttaagtttaccaaatataaaaagaaacttctgcttttaaaaaaattatatatatatattaaatttgaaacctgcatttctcccacagcaatgtaagaagtaggctctgatgtcctaccactttgaatggttttctaatatcttaatgaatagttcctgaacattgcactgatatcatcgattagaattttgatatttaatttcatctttatttcctggtagagaatgcaggaaaagatgtcaggtacataacataaaacagattgggaatttattgtttccaaagggcatggccttccttagcatcagtttgaagcttttgttatgacttagctgacttgtggcagcggggcaagcaaaaacaataacactgcttataaatggcaccacatcttgttaacctcccccccaaatactctctgaaagtcatgcacatacctatgggattttacacaccaccagcttaaaatgctatgtctctatccatcagaaatagtcattattctatttttaaggcagcaacaagaaaagaaaaaacacttttcctgagggatttctaaccatgtatctaatcctcccatttgggcagtataggtgtttgcttttttgttttctttttttaagaaaaaccttgaaacctttgacactgacagatgtgtttgcaaggatacggcttcagtattactaatttccatgtgtatctggaagtatttttaaatggcataccaaaatccagaagtttaaagatgcctataaaagtaaacaacatttatttaaaaagaactctgaatatgccttcttttttaattagaaatatcttcgagacttgggtgtttgttaataactaataactggagtaagctacaggatctaaagcagccctttttacagtctagttaggagagagaaaataattgcaaatatccacttagaggcaaagaacaattttttattatcaaaaaggtttctgcacattgttgtggcaatattgtatctgtttagaaaatgggcttttccaaaagcaaacaaagataggttcctcaggtgaccaaaactgaaaatcaatatttccatgtttcattaatcaaggcataaaatacaattaaagcaaaatattttacattaaaa

SEQ ID NO: 147 - DNA, 5726 bp, Homo sapiens
gaagttacgttagattggccgccggtgacgggtggccgtgctgggggcgggagggcttctgtggtaggaagggaggtccgctcggccgggtgcgccgccccagtgctctgtgggatactggaagtctcgagcgtcggctccgggttcccagccctcctctggcccgcactcatagaaacattcacacaccccctgcctcccctctcttccctctccgcctcccccttccccccctcgcgataagaagacccggcggcaggagaggggatgaagatggcggacgcgaagcagaagcggaacgagcagctgaaacgctggatcggctccgagacggacctcgagcctccggtggtgaagcgccagaagaccaaggtgaagttcgacgatggcgccgtcttcctggctgcttgctccagcggcgacacggacgaggtcctcaagctgctgcaccgcggcgccgacatcaattacgccaatgtggacggactcactgccctgcaccaggcttgcattgatgacaatgttgatatggtgaagtttctggtagaaaatggagcaaatattaatcaacctgataatgaaggctggataccactacatgcagcagcttcctgtggatatcttgatattgcagagtttttgattggtcaaggagcacatgtaggggctgtcaacagtgaaggagatacacctttagatattgcggaggaggaggcaatggaagagctacttcaaaatgaagttaatcggcaaggggttgatatagaagcagctcgaaaggaagaagaacggatcatgcttagagatgccaggcagtggctaaatagtggtcatataaatgatgtccggcatgcaaaatctggaggtacagcacttcacgttgcagctgctaaaggctatacggaagttttaaaacttttaatacaggcaggctatgatgttaatattaaagactatgatggctggacacctcttcatgctgcagctcattggggtaaagaagaagcatgtcgaattttagtggacaatctgtgtgatatggagatggtcaacaaagtgggccaaacagcctttgatgtagcagatgaagacattttaggatatttagaagagttgcaaaagaaacaaaatctgctccatagtgaaaaacgggacaagaaatctccactaattgaatcaacagcaaatatggacaataatcagtcacagaagacctttaaaaacaaagagacgttgattattgaaccagagaaaaatgcatcccgtattgaatctctggaacaagaaaaggttgatgaagaagaagaaggaaagaaggatgagtctagctgctctagtgaagaagatgaggaagatgactcggaatcagaagctgaaacagataagacaaaacccctggcttctgtaactaatgccaacacttctagtacacaagcagctcctgtagctgttacaacacctactgtgtcatcaggtcaagcaacacctacatcacctattaaaaagtttccaaccacagctacaaaaatttctcccaaagaagaagagagaaaagatgagtctcctgcaacttggaggttaggacttagaaagacgggcagctatggtgcacttgctgaaatcacagcatctaaagagggtcagaaagaaaaagatactgcaggtgttacacgttcagcttcaagtcccagactttcctcctctttggataataaagaaaaggagaaagatagtaaaggaactaggcttgcatatgttgcacctacaataccaagacgactagccagtacatctgacattgaagagaaagaaaacagagattcttcaagtttgcgaacaagtagttcatatacaaggagaaaatgggaagatgatcttaaaaaaaatagctcagttaatgaaggatcaacgtatcataaaagttgctcctttggtagaagacaagatgatttgattagttctagtgttccaagcaccacatcaacaccaacagttacctctgcagctgggcttcagaaaagcctgctttccagcacaagcactactacaaagattacaacgggttcttcctcagcaggcacacaaagcagtacctcaaatcgtttgtgggctgaggatagtactgagaaagaaaaggacagtgttcctacggcagtgaccattcctgttgctccaactgttgtaaatgctgcagcttctaccacaaccctgactacaactactgctggcactgtctcctccacaacagaggtcagggagagacgcagatcatacctcactcctgttagggatgaagagtctgaatcccaaagaaaagcaagatctagacaagcaagacaatctagaagatcaacacagggagtgacattaactgatcttcaagaagctgagaaaacaataggaagaagtcgttctacccgaaccagagaacaagaaaatgaagaaaaagaaaaagaggaaaaagagaaacaagataaagagaaacaagaagaaaagaaggagtcagaaacatctagagaagatgaatataaacaaaagtactccagaacgtatgatgagacttaccagcgttataggccagtatcaacttcaagttcaaccactccatcctcttcactttctactatgagcagttcactgtatgcttcaagtcaactaaacaggccaaatagtcttgtaggcataacttctgcttactccagaggaataacaaaagaaaatgaaagagagggagaaaaaagagaagaggagaaagaaggagaagataaatcacaacctaaatcaatcagagaacgacgacgaccaagagagaaaagaagatctacaggagtttcattttggacacaagatagtgatgaaaatgaacaagaacaacaatcagacacagaagagggatccaataagaaagaaactcagacggattccatttctagatatgaaaccagttctacatcagctggtgatcgatatgattccttgctgggtcgctctggatcatacagttacttagaagaaagaaaaccttacagcagcaggctagaaaaggatgactcaactgactttaaaaagctttatgaacaaattctagctgaaaatgaaaagctgaaggcacagctacatgatacaaatatggaactaacagatcttaaattacagttggaaaaggccacccagagacaagaaagatttgctgatagatcactgttggaaatggaaaaaagggaacgaagagctctagaaagaagaatatctgaaatggaagaagagctcaaaatgttaccagacctaaaagcagacaaccagaggctaaaggatgaaaatggggccttgatcagagttataagcaaactttccaaataaaaaaaaaaaaagcagcaagtaatggaattgcacatattagtaacccagtggaccataattggcagtcactggaagtctgggaagaatccttggagactgtcattttcggatatcctgccaaatgccctcttatctagaatttttgtttcattttgtttaattttctggggtgtttttgttgttgttggtttgttttttgttttttttttttaatcaagaccattgtttcatgttaatgcagctgctgagaagatttttttttaatgactgagaaaacttgtttacagctccagcatataaggaaagtgttcaaggccagatatgcctcagatatttaaccagtaagccttagttgtacataaatacttttgtgtcaacaaaaactttcagctctcacagaagacagttactcaacattttttgatgtgccacagtttcgagtttttcgatatttaaattttttggcttttcatctaagtttgggtttgtattttttccttctaaactcttcatgtggcagagtcttctatgttttcacagctttttcattacagaaaagaacacttgctcttctgtgattattgtcatgtattaggctaatgctgtgttgtctcccacctggaactgaattgcttggtggaacatatgctttcactgtttgtgcaatatgcatttatttcttatatgaatgctttaaagtcatttgaggttagatcttttaattcctattttctgcttcattggtcactttttttttattgtagtataagatgttagattctgtaatcttcacattcattttagcaggtactgagtgatgctgtatatacaaataagtgtattgttttgatttttagaccaccacatggcatgcttgactatttcttatttcaaatgtctgctaatgcagagtaggctactccatgatagtgttaaaaaacaaaatttgctaacaatgtgatataaagactttaaaagttacacattatgtggagccctatctttacaaaagtttcctactgtaaagtgcttttattttcagttttcacttgatagtactcaaccataattaaagttgcataagataattgctttacatttcacatacctatatttatctgagtgctgtctaaaactgttgtgctagccaaagtaatgctatgaaatcatttgcagaattaacccgtgagttaatgttaaatgcactgttattgccatgtgaagaggcatcgactttgataccaccatcatgttcagaccattttatacatttcagtggcctttttttttttttaaggaaaaaaaagcgcaaaaccaagtacatagtgacgatggcttttatttggacaaatagcttttatattttcattaaaccatgcaaaaaatactacatctttctggcacataactgtctccttaaccactgaacagttcagccatttgaataaattgtacattgtaaagcttatagtagctgattgtattattgattgtattgtatactatattaaatgtgaatttgtaccccttcattttaaaaggtcattgtgttctactgcctattttagattactttggggttggggaagggtgttttggtaagcaggattttaagtcctctctctctcgattggttttatgaagatataaggttatgctcttactaccaagctcaggattcttgattttaaaggtacaaggatagttgtgggagttttatttttggttatatttgaactgtatgaatggtaggtctgaatattgagaatttccatggtcttatgtggaggtaaaatatacagataactgatcagtttgagtgactgcaacatgttctggttgcacaacagttaggcatgctatggtttatatttgtgaagtttggatgcctgtgaagaatgattaaatacatgtttctaatattttagtgttttgtatttaggttatttattctttgtatctaaaactgaacagctactgtgctatattgattttattggtagtattgagcagaccttgtttctgcatgaaactagttgcaaaacccactattttggaaataaaaatgtattttgacatatacaaataaaatgaataaaactattttaaatgtgtgaacttttaatgaagacattttaaattttgttctgagatatttaaattctgcatgggtattttttcactaattgctttacttggataccaatttgaataatttctgaaattgtaatattgtgataatttgcacagcattgtacatgcacatctgtaaatgcaatcttaattgccatatttatgcaatctgtgtaccaatttggacaaatgtttatatattttacataaagctgtctgtatgcagaatctga

SEQ ID NO: 148 - DNA, 2243 bp, Homo sapiens
gggacactggggctgggggggtttgttgggctggtgagttttcgaggtgactgtgctgtgctcggtgaggggacgcccagagagccctgacccggggtcactccgtcgccgttctcctcttgtctacgtgctggacccggtgctacctttttacccacacttaagtgacgcaaaatgcccttcaatggcgagaagcagtgtgtgggagaggaccagccaagcgattctgattcttcccggttttccgaaagcatggcttcgctcagtgactatgaatgctccaggcagagctttgcaagtgactcctccagcaaatccagctctcctgcttcaacaagccctccaagggttgtaacatttgatgaagtgatggctacagcaaggaacttatcaaacttgactcttgctcatgagattgctgtaaatgagaactttcaattgaaacaagaggctctcccagaaaagagtttggctggtcgagtgaagcacattgttcaccaggccttctgggacgtcttggattcagaactaaatgctgaccctcctgagtttgaacatgccatcaaactgtttgaagaaatcagagagattcttctctcttttctcactcccggtggcaaccggcttcgcaaccaaatctgtgaagttttggacacagacctcattaggcagcaggctgagcacagtgctgttgacatccaaggcctggccaactatgtcatcagtacgatgggaaagctgtgtgctcccgtgcgagataatgatatcagagagttaaaggctactggcaacatcgtggaggtgctgagacaaatattccatgtcctggacctcatgcaaatggacatggccaattttacaattatgagtctcagaccgcaccttcaacgccagttggtggaatatgagagaaccaagttccaggaaattttggaagaaactccaagtgctcttgatcagactacagaatggataaaagaatctgtaaatgaagaattattttctctttctgagagtgctttaactcctggggccgaaaatacctccaagccaagcctgagccctactttggtgctaaataatagttacttgaaactgttacagtgggattatcagaaaaaagaattaccagagacacttatgacagatggagcacgtcttcaggaactaacagaaaagctgaatcaattgaaaattattgcctgcctgtccctaattaccaacaacatggtgggtgctattacaggaggcctgcctgagcttgcaagcaggttaacaaggatttcagctgttctacttgaaggcatgaacaaagagacctttaacttgaaggaagtcctgaattctattggtattcagacttgtgttgaggttaacaagaccctgatggaaagaggtttacccactttaaatgctgagattcaagctaatcttataggtcaattttcaagcattgaagaggaggacaatcctatctggtccttgattgataaacgaattaagctttacatgagaaggctactttgtcttccaagccctcaaaaatgcatgcctcctatgccaggaggcctagctgtcattcagcaggagctagaagccctaggctctcaatatgcaaacattgtgaatctcaacaaacaagtgtatggaccattttatgcaaatatacttcgaaagctgctcttcaatgaggaagccatggggaaggtagatgcttcacctcctactaactaaagaagaactgacattggacgagagattggaaatccagtactttggtatccagtccacttccattgatggcattagagatccagcacattctcagtactgtggtgcagtattagcccaaatctgtgtaatgggtaatattagcattacagaagacacacacatcacatagaccctcagaagacgtaaacatcacatagaccctatttgtgcatcattttcaagtttaaaacagatatttgtaatgaacagaaaacaatttgtaattaattatattacctatataatacttgtaaatgttttcttaaccatttatatttggcttatgacatttaacccctaaggagttgtttttctcacttgttattatcaaacctaatggtttttaattttggtacaactccttaaagggttgaaggttgtgacaataactgagggaactgatgttctgaataaatgatgtgaagtaaacacaattgtatttgaaaaaaaaaaaaaaaaaaaaaaaaaaa

SEQ ID NO: 149 - DNA, 568 bp, Homo sapiens
taccaaatttctttatttgaaggaatggtacaaatcaacgaacttaagtggatgttttggtacaacttatagaaaaggtaaaggaaaccccaacatgcatgcactgccttgaagaactttgccaaatactttcttcaccaatctcatgaggagagggaacatgctgagaaactgatgaagctgcagaaccaacgaggtggccgaatcttccttcaggatatcaagaaaccagactgtgatgactgggagagcgggctgaatgcgatggagtgtgcattacatttggaaaaaagtgtgaatcagtcactactggaactgcacaaactggccactgacaaaaatgacccccatttgtgtgacttcattgagacacattacctgaataagcaggtgaaagccatcaaagaattgggtgagcacgtgaccaacttgtgcaagatgggagcgcccgaatctggctcggcggaatacctcttagacaagcacaccctgggggacagtgataatgaaagctaagcctcaggctaatttccacatagccgtgggagtgacttccctggtcaccaag

SEQ ID NO: 150 - DNA, 3878 bp, Homo sapiens
ccgcctcctggcctcctggctgaggggaagctgagtgggccacggcccatgtgtcgcactcgcctcggctcccacacagccgcctctgctccagcaaggatgtggctcttccacactctgctctgcatagccagcctggccctgctggccgctttcaatgtggatgtggcccggccctggctcacgcccaagggaggtgcccctttcgtgctcagctcccttctgcaccaagaccccagcaccaaccagacctggctcctggtcaccagccccagaaccaagaggacaccagggcccctccatcgatgttcccttgtccaggatgaaatcctttgccatcctgtagagcatgtccccatccccaaggggaggcaccggggagtgaccgttgtccggagccaccacggtgttttgatatgcattcaagtgctggtccggcggcctcacagcctcagctcagaactcacaggcacctgtagcctcctgggccctgacctccgtccccaggctcaggccaacttcttcgaccttgaaaatctcctggatccagatgcacgtgtggacactggagactgctacagcaacaaagaaggcggtggagaagacgatgtgaacacagccaggcagcgccgggctctggagaaggaggaggaggaagacaaggaggaggaggaagacgaggaggaggaggaagctggcaccgagattgccatcatcctggatggctcaggaagcattgatcccccagactttcagagagccaaagacttcatctccaacatgatgaggaacttctatgaaaagtgttttgagtgcaactttgccttggtgcagtatggaggagtgatccagactgagtttgaccttcgggacagccaggatgtgatggcctccctcgccagagtccagaacatcactcaagtggggagtgtcaccaagactgcctcagccatgcaacacgtcttagacagcatcttcacctcaagccacggctccaggagaaaggcatccaaggtcatggtggtgctcaccgatggtggcatattcgaggaccccctcaaccttacgacagtcatcaactcccccaaaatgcagggtgttgagcgctttgccattggggtgggagaagaatttaagagtgctaggactgcgagggaactgaacctgatcgcctcagacccggatgagacccatgctttcaaggtgaccaactacatggcgctggatgggctgctgagcaaactgcggtacaacatcatcagcatggaaggcacggttggagacgcccttcactaccagctggcacagattggcttcagtgctcagatcctggatgagcggcaggtgctgctcggcgccgtcggggcctttgactggtccggaggggcgttgctctacgacacacgcagccgccggggccgcttcctgaaccagacagcggcggcggcggcagacgcggaggctgcgcagtacagctacctgggttacgctgtggccgtgctgcacaagacctgcagcctctcctacatcgcgggggctccacggtacaaacatcatggggccgtgtttgagctccagaaggagggcagagaggccagcttcctgccagtgctggagggagagcagatggggtcctattttggctctgagctgtgccctgtggacattgacatggatggaagcacggacttcttgctggtggctgctccattttaccacgttcatggagaagaaggcagagtctacgtgtaccgtctcagcgagcaggatggttctttctccttggcacgcatactgagtgggcaccccgggttcaccaatgcccgctttggctttgccatggcggctatgggggatctcagtcaggataagctcacagatgtggccatcggggcccccctggaaggttttggggcagatgatggtgccagcttcggcagtgtgtatatctacaatggacactgggacggcctctccgccagcccctcgcagcggatcagagcctccacggtggccccaggactccagtacttcggcatgtccatggctggtggctttgatattagtggcgacggccttgccgacatcaccgtgggcactctgggccaggcggttgtgttccgctcccggcctgtggttcgcctgaaggtctccatggccttcacccccagcgcactgcccatcggcttcaacggcgtcgtgaatgtccgtttatgttttgaaatcagctctgtaaccacagcctctgagtcaggcctccgcgaggcacttctcaacttcacgctggatgtggatgtggggaagcagaggagacggctgcagtgttcagacgtaagaagctgtctgggctgcctgagggagtggagcagcggatcccagctttgtgaggacctcctgctcatgcccacagagggagagctctgtgaggaggactgcttctccaatgccagtgtcaaagtcagctaccagctccagacccctgagggacagacggaccatccccagcccatcctggaccgctacactgagccctttgccatcttccagctgccctatgagaaggcctgcaagaataagctgttttgtgtcgcagaattacagttggccaccaccgtctctcagcaggagttggtggtgggtctcacaaaggagctgaccctgaacattaacctaactaactccggggaagattcctacatgacaagcatggccttgaattaccccagaaacctgcagttgaagaggatgcaaaagcctccctctccaaacattcagtgtgatgaccctcagccggttgcttctgtcctgatcatgaactgcaggattggtcaccccgtcctcaagaggtcatctgctcatgtttcagtcgtttggcagctagaggagaatgcctttccaaacaggacagcagacatcactgtgactgtcaccaattccaatgaaagacggtctttggccaacgagacccacacccttcaattcaggcatggcttcgttgcagttctgtccaaaccatccataatgtacgtgaacacaggccaggggctttctcaccacaaagaattcctcttccatgtacatggggagaacctctttggagcagaataccagttgcaaatttgcgtcccaaccaaattacgaggtctccaggttgtagcagtgaagaagctgacgaggactcaggcctccacggtgtgcacctggagtcaggagcgcgcttgtgcgtacagttcggttcagcatgtggaagaatggcattcagtgagctgtgtcatcgcttcagataaagaaaatgtcaccgtggctgcagagatctcctgggatcactctgaggagttactaaaagatgtaactgaactgcagatccttggtgaaatatctttcaacaaatctctatatgagggactgaatgcagagaaccacagaactaagatcactgtcgtcttcctgaaagatgagaagtaccattctttgcctatcatcattaaaggcagcgttggtggacttctggtgttgatcgtgattctggtcatcctgttcaagtgtggcttttttaaaagaaaatatcaacaactgaacttggagagcatcaggaaggcccagctgaaatcagagaatctgctcgaagaagagaattaggacctgctatccactgggagaggctatcagccagtcctgggacttggagacccagcatcctttgcattactttttccttcaggatgatctagagcagcatggagctgttggtagaatattagtttttaaccatacattgtcccaaaagtgtctgtgcattgtgcaaaaagtaaacttaggaaacatttggtattaaataaatttacacttttctttgcagtaaaaaaaaaaaaaaaaaa

SEQ ID NO: 151 - DNA, 6763 bp, Homo sapiens
tgtgtgggcggcggcggcggcggctgcgcgcttggggcccggggcgcggggcgaggccgtggggacgtgcgagcggggccgcggtggggctcgggggcgcgtccacgtggccagagggcggccacccggagccagcggagggacaggcctgtccccaggcgcggctgccggccatgccctctgtctgcctcctcctgctgctcttccttgccgtggggggggccctgggcaacaggcccttccgtgccttcgtggtgacagacaccacgcttacccacctggctgtgcaccgggtgactggggaggtgttcgtgggcgcagtgaaccgagtctttaagctggcccccaacctgactgagctgcgggcccatgtcacggggcccgtcgaggacaacgctcgctgctacccgccccccagcatgcgcgtgtgtgcccaccgcctggcccccgtggacaacatcaacaagctgctgctcatagactatgcggcccgccgcctggtggcctgcggcagcatctggcagggcatctgccagttcctgcgtctggacgacctcttcaagctgggtgagccgcaccaccgcaaggagcactacctgtcgggggcccaggagcccgactccatggctggtgtcattgtggagcagggccaggggcccagcaagctgtttgtgggcactgctgtcgacggcaagtcggagtacttccccaccttgagctcccgcaagctcatcagtgatgaagacagcgcggacatgttcagtctcgtgtaccaggatgagtttgtgtcctcccagatcaagatcccctcagacacgctgtccttgtaccctgcctttgacatctactacatctacggcttcgtcagcgcctccttcgtgtacttcctgacgctgcagctggacacccagcagacgctgttggacacagcgggcgagaaatttttcacgtccaagatcgtgcgcatgtgcgcgggagactcagagttctactcatacgtggaattccccatcggctgctcctggcgcggcgtggagtaccgcttggtgcagagcgcccacctggccaagcctggcctgctgctggcccaggccctgggcgtgccggctgatgaggacgtcctcttcaccatcttctctcagggccagaagaaccgggccagcccaccccggcagaccatcctctgcctcttcaccctcagcaacatcaatgcccacatccggcgccgcatccagtcctgctatcgtggggagggcactctggctctgccctggctgctgaacaaggagctgccctgcatcaacacccccatgcagatcaacggcaacttctgtgggctggtgttgaaccagcctctgggaggcctgcatgtgatcgaggggctgcccctgctggccgacagcaccgacggcatggccagcgtggccgcctacacctaccgccagcactctgtggtcttcattggcacgcgcagcggcagcttgaagaaggtgcgggtcgatggcttccaggatgcccacctgtatgagacagtccccgtggtggatggcagccccatcctccgagacctgctcttcagcccggaccaccggcacatctatctcctgagtgagaagcaggtgagccagctcccggtggagacctgtgagcagtaccagagctgcgcagcctgcctgggctccggggacccgcactgtggttggtgtgtgctgcgacacaggtgctgccgcgaaggggcctgtctgggcgcctctgccccacacggctttgctgaggagctgagcaagtgtgtccaggtgcgggtccggcccaacaatgtgtcagtgacgtcacctggggtgcagctgaccgtcaccctgcacaacgtgccagacctcagtgcgggcgtgagctgcgccttcgaggcggcggcggagaacgaggcggtcctgctgccctccggtgaactgctctgcccctcaccctccctccaggagctccgagctcttaccagggggcatggggccacccgcactgtgcggctgcagcttctctccaaggagacaggcgtgaggtttgccggtgctgactttgtcttctacaactgcagcgtcctccagtcgtgcatgtcctgtgttggcagcccttacccctgccactggtgtaagtaccgccacacgtgtaccagccgcccccacgagtgctccttccaggagggcagggtccacagccctgagggctgccctgagatcctgcccagtggggacctcctgatccccgttggggtcatgcagcctcttaccttgcgggctaagaacctacctcagccgcagtcgggccagaagaactatgagtgcgtggtgcgggtgcaggggcggcagcagcgggtgcctgccgtgcgcttcaacagcagcagtgtgcagtgccagaacgcctcgtactcctatgaaggtgatgagcatggtgacaccgagctggacttctccgtggtctgggatggagacttccccatagacaagcctcccagcttccgagccctcctgtacaagtgctgggcgcagcggcccagctgtggcctctgcctcaaggctgatccccgcttcaactgtggctggtgcatctcagagcacaggtgccagctgcggacccactgcccggccccgaagaccaactggatgcacctgagccagaagggcacccggtgcagccacccccgcatcacgcagatccaccctctcgtggggcccaaggaaggaggcacccgggtcaccatcgtgggtgacaacctgggcctcttgtcccgagaggtgggcctgcgggtggctggcgtgcgttgcaactccattccggccgagtacatcagtgctgagaggatcgtgtgtgagatggaggagtcgctggtgcccagcccgccgccggggcccgtggagctgtgtgtgggtgactgttcagccgacttccgcacgcagtcggagcaggtctacagctttgtgaccccaacgtttgaccaagtgagtcccagccgtggcccggcgtccgggggcacacggcttaccatctcaggcagctctctggatgctggcagcagggtcacagtgactgtgagggacagcgagtgccagtttgtaaggagagatgccaaggcgatcgtgtgcatctcacctctctccaccctgggccccagccaggcccccatcacacttgccattgaccgggctaacatctccagccccgggctcatctacacctacactcaggaccccaccgtcacccgccttgagcccacctggagcatcatcaatggaagcactgccatcactgtgagtgggacccacctgctgacggtccaggagccccgggtccgtgccaagtaccgcggcattgagaccaccaatacatgccaagtgatcaacgacactgccatgctgtgtaaggcccccggcatctttcttgggcggccccagcctcgggcgcaaggcgagcaccctgatgagtttggcttcctgctggaccacgtgcaaacggcccgctccctcaaccgctcctcctttacctactaccctgatcccagctttgagccgctggggccctctggcgtgctggacgtcaaaccgggctcccacgtggtgctgaagggcaagaacctgattcccgcggcagccggcagctcccgcctcaactacactgtgctgataggaggccagccgtgttcgctcactgtctcggacacacaactcctgtgcgactcacccagccagactggccggcagcctgtcatggtgctggtgggtggcctggagttctggctgggcaccctgcacatctcggcagagcgggcgctgaccctaccggccatgatggggctggcggcggggggtgggctcctgctgctggccatcacagccgtgctggtggcgtacaagcgcaagactcaggacgcggaccgtaccctcaagcgtctgcagctgcagatggacaacctggagtcccgtgtggccctggagtgcaaggaagcttttgcagagctgcagacggacatcaatgagctgactaaccacatggacgaggtgcagatccccttcctggactaccggacttacgccgtgcgcgtgctcttcccgggcatcgaggcccacccggtgctcaaggagctggatacgccacccaacgtggagaaggccctgcgcctcttcgggcagctgctgcacagccgcgcgttcgtgcttaccttcatccacacgctggaggcccagagcagcttctccatgcgcgaccgcggcaccgtggcctcgctcaccatggtggccctgcagagccggctcgactatgccacggggctgctcaagcaactgctggccgacctcatcgagaagaacctcgagagcaagaaccaccccaagctgctgctacgcaggacagagtcagtggctgagaagatgcttaccaactggttcacgttcctgctgcataagtttctgaaggagtgtgctggggagcctctcttcctgctttactgtgccatcaagcagcagatggagaagggccccattgatgccatcacgggcgaggcacgatactccctgagcgaggacaagctcatccgtcagcagatcgactacaagacactgacccttcactgcgtgtgtccggagaacgagggcagcgcccaggtcccagtgaaggttctcaactgtgacagcatcacccaggccaaagataagctgctggacactgtgtacaagggcattccgtactcccagcgtcccaaagctgaggacatggacctggagtggcgccagggccgcatgactcgcatcatcctccaggatgaggatgtcaccaccaagatcgagtgtgactggaagaggctcaactcactggcccactaccaggtgacagacggttccttggtggcattggtgcccaaacaagtgtctgcctataacatggccaactccttcaccttcacccgctccctcagccgctacgagagcttgctccgcacggccagcagccctgatagcctccgctcacgggcacccatgattacgcctgaccaggagacaggcaccaaattgtggcacctggtgaaaaaccacgaccatgccgaccatcgcgagggggaccgtggcagcaagatggtctccgagatctacctgacacggctgctggccaccaagggcacactgcagaagttcgtggatgacctctttgagacagtgttcagcacagcccaccggggctcggccctgcccctggccatcaagtacatgttcgacttcctggatgagcaggcggaccagcgccagatcagcgaccccgatgtgcgccacacctggaagagcaactgcctgccgctgcgcttctgggtgaatgtgatcaagaacccgcagttcgtgttcgacatccacaagaacagcatcacggatgcctgcctgtcggtggtagcccagaccttcatggactcctgctctacatccgagcaccgcctggggaaggactcgccctccaacaaactgctctacgccaaggacatccccaactacaagagctgggtggagaggtattatcgagacattgcaaagatggcatccatcagcgaccaggacatggatgcctacctggtggagcagtcccgcctccacgccagcgacttcagcgtcctgagtgcgctcaacgagctgtatttctatgtcaccaagtaccgccaggagattctcacggctctggaccgagatgcctcttgtcggaagcataagttgcggcagaaactggaacagatcatcagcctcgtgtccagcgacagctaaggtggtggaatcggtgaggagggggcttctcagtcctgtgccgtcctcccatccaggggagtggctggctcaagcctgggtccccgggctgagccctggattgggtatcgtggggcaggtcaccctggccacgatgcccccggcacacccaggcccccttcattagtgccttgctttgggccctgcagggggaggggtgacagggcgagcccccaccccagcagcagcaatacccccaccctcctgccctgtgcccaggtgttgggacagtcccaccctccctgctatttatatccctctgcctatttattgaatcgaacttcgcctctgtctccatctgtaaatatgtgtccccccaccggatgtcgccaccctcactcacctgcctcttcttgagctgtcctgggccctgccacccgtctgggctcctttgtgtagcattatcagcctcggtctggcctctggcacctcacccttgccatggctgaccccacccattccaaggcggggtcacggtaccagcagcacttggggtgaggcctccaaagcttcctcagaattgtggctgtgccacgctggaccacagggtccccctcaagcatctcggggccctattctctctgagcacctggagggctggactcaggcttgtgccagggcctgacttgggcctgggggccctagaacactcctcctcctgagcctactgccaaacgtcctcagtgttgtctgcacctgctccgactccttcagccgccccattcagcgcccgctccgtccagtgcccgccctgtggggccaaggcggccgtgccttactactctgtgtcttctgcctcctctgaggaatctggccctgtctgacagtcccagaccccccgttctctcctctttagttgcatgagtttttctttgttcatggaatgttttttcctgattaaatgttggggaaatgccaaaaaaaaaaaaaaaaaa

SEQ ID NO: 152 - DNA, 3602 bp, Homo sapiens
agctctttcactacggggcactggtgggctactgcgcaggaacaaccaagcacgaagaatcgtttagaaaaaaaaaaaacacaccctcccctggagtgctcaggcccagctgcacgcgggctgacaaacatcgagtctagaactctcccacccggccccgggcccagtgcgcatgcgcagccgcgcgccttcggcccaccgtactacttctgcgcctgcgcgaccgtgattccccgctcgcgactccccaccccccagggctccctaaagagggccacgagctgcgaaagggcgggaaaggcagttggagaagaggtaagcggttactcactccatggctgcagcaaggagaggcggcggcggcctcggctgaagaaagaaggtgggagcggagagcgcaggcgtgaaacccaccttgtcccatccacatcaggacatcccagctggagttcaaccttcatcccttctgtggcagttaggagactgaatcaaggtccagagaaggtggaggaatcctgatactgagcgaaatcttcccaaggctgcagacaccgacggatttgctttgggagccagagtagctgccgccaccagagtccggagccatgagcgggtttaattttggaggcactggggcccctacaggcgggttcacgtttggcactgcaaagacggcaacaaccacacctgctacagggttttctttctccacctctggcactggagggtttaattttggggctcccttccaaccagccacaagtaccccttccaccggcctgttctcacttgccacccagactccggccacacagacgacaggcttcacttttggaacagcgactcttgcttcggggggaactggattttctttggggatcggtgcttcaaagctcaacttgagcaacacagctgccaccccagccatggcaaaccccagcggctttgggctgggcagcagcaacctcactaatgccatatcgagcaccgtcacctccagccagggcacagcacccaccggctttgtgtttggcccctccaccacctctgtggctccagctaccacatctggaggcttctcattcactggtggaagcacggcccaaccctccggtttcaacattggctcagcagggaattcagcccagcccacggcacctgccacgttgcccttcactccggccacgccagcagccaccacagcaggtgccacacagccagctgctcccacacccacagccaccatcaccagcactgggcccagcctctttgcgtcaatagcaactgctccaacctcatctgccaccactggactctccctctgtacccctgtgaccacagcgggcgcccccactgctgggacacagggcttcagcttaaaggcacctggagcagcttccggcacctccacaacaacatccaccgctgccaccgccaccgccaccaccaccagcagcagcagcaccaccggctttgccttgaatttaaaaccactggcgccagccgggatccccagcaatacagcagctgccgtgaccgctccacctggccctggcgcagctgcaggggcggctgccagctccgccatgacctacgcgcagctggagagcctgatcaacaaatggagcctggagctagaggaccaggagcggcacttcctccagcaggccacccaggtcaacgcctgggaccgcacgctgatcgagaatggagaaaagatcaccagcctgcaccgcgaggtggagaaggtgaagctggaccagaagaggctggaccaggagctcgacttcatcctgtcccagcagaaggagctggaagacctgctgagcccactggaggagttggtcaaggagcagagcgggaccatctacctgcagcacgcggatgaggagcgtgagaaaacctacaagctggctgagaacatcgatgcacagctcaagcgcatggcccaggatctcaaggacatcatcgagcacctgaacacgtccggggcccccgccgacaccagtgacccactgcagcagatctgcaagatcctcaatgcgcacatggactcactgcagtggatcgaccagaactcggccctgctgcagaggaaggtggaggaggtgaccaaggtgtgcgagggccggcgcaaggagcaggagcgcagcttccggatcacctttgactgagcgacagcagccctggggcccgcaggtccctagggagttcatgaggggaatgcgccctgttgtctgtagtttggggttgtggcaagatacttgtttgtttgtttctttctttcacatgactgcccttgacatgatcgctgtgtgctttgcgtttttccatttaggagggtattctgggccttctgcccaggcagcagcctcatgggtgtggcttctgtggctttcatttgagtatctttggccccttttcacctactgcgaccacccacctcatcctggctcagcctggtgatggagaagtgctgatggtcttggtcccagccagggtcgtgggggcagccactctctccaaagcatagtcataggtgtcatgaaaaaataccaaatgtaagagaacctccaagtcagggcgcagtggctcacccctgtaatctcagcactttgggtggccaaggcgggcagatgacttgaggtcaggagttcgagaccagcctggccaacatggtgaaaccccgtctctactaaaaatacaaaaattagtcaggtgtggtggacgcctgtgatctcaatctcagctactcgggaggctgaggcaggagaatcacttgaacccaggaggtgttgcagtgaaccaagatcacaccactgcactccagcctaggcaacagagactctgtctcaaaaaaaaaaaaaaaaaaaaagaaactcccaggagacagcagcctagttttcgagtgtgagcttgtgcttgtgaaagctaaccatgctaaccaccaaggcaaagcagcacagtgtgaatagaacagagcgggatcaagaatttcacagaagacaggtcagctgaggggcctgcacacacagggtgttgaggaaccacagatgggcgccgagaggcctgccttttgcctggcccaggctcacccccaccttgggcctcacctcctccaggaagccttcccagctacccgaagctcaggtggccttcttgcaggtccccgtagcaccctgagcctgtaccttgggtggcacttgttatgctatcctgtgctagccgtttgtgcctcgtctcgctgttagattgtgagttcccatgggcagagacccactgtcgttccccgtgtgtccccagcccggtccctgtcacatttgttaaatgaaagaacaatgaagcccagtgtaacgtcagtccacagaaatagccacagcttccagtggtggccgtagacttggctcggaacttagtggcaccagagtaactctagtcagttacagtaaaatccactgtgtgtggaaggcagaagctagcggttgtatcccaagcatcttttgtatttgtctttatactttgctgaattctctgaaatacctattactgtatgttgcttttctaaataaatgtattgtgaaaccaaaaaaaaaaaaaaaaaa

SEQ ID NO: 153 - DNA, 2797 bp, Homo sapiens
aggagccttaggaggtacggggagctcgcaaatactccttttggtttattcttaccaccttgcttctgtgttccttgggaatgctgctgtgcttatgcatctggtctctttttggagctacagtggacaggcatttgtgacagcactatgggactgagtaacattctctttgtgatggccttcctgctctctggtgctgctcctctgaagattcaagcttatttcaatgagactgcagacctgccatgccaatttgcaaactctcaaaaccaaagcctgagtgagctagtagtattttggcaggaccaggaaaacttggttctgaatgaggtatacttaggcaaagagaaatttgacagtgttcattccaagtatatgggccgcacaagttttgattcggacagttggaccctgagacttcacaatcttcagatcaaggacaagggcttgtatcaatgtatcatccatcacaaaaagcccacaggaatgattcgcatccaccagatgaattctgaactgtcagtgcttgctaacttcagtcaacctgaaatagtaccaatttctaatataacagaaaatgtgtacataaatttgacctgctcatctatacacggttacccagaacctaagaagatgagtgttttgctaagaaccaagaattcaactatcgagtatgatggtgttatgcagaaatctcaagataatgtcacagaactgtacgacgtttccatcagcttgtctgtttcattccctgatgttacgagcaatatgaccatcttctgtattctggaaactgacaagacgcggcttttatcttcacctttctctatagagcttgaggaccctcagcctcccccagaccacattccttggattacagctgtacttccaacagttattatatgtgtgatggttttctgtctaattctatggaaatggaagaagaagaagcggcctcgcaactcttataaatgtggaaccaacacaatggagagggaagagagtgaacagaccaagaaaagagaaaaaatccatatacctgaaagatctgatgaagcccagcgtgtttttaaaagttcgaagacatcttcatgcgacaaaagtgatacatgtttttaattaaagagtaaagcccatacaagtattcattttttctaccctttcctttgtaagttcctgggcaacctttttgatttcttccagaaggcaaaaagacattaccatgagtaataagggggctccaggactccctctaagtggaatagcctccctgtaactccagctctgctccgtatgccaagaggagactttaattctcttactgcttcttttcacttcagagcacacttatgggccaagcccagcttaatggctcatgacctggaaataaaatttaggaccaatacctcctccagatcagattcttctcttaatttcatagattgtgttttttttttaaatagacctctcaatttctggaaaactgccttttatctgcccagaattctaagctggtgccccactgaattttgtgtgtacctgtgactaaacaactacctcctcagtctgggtgggacttatgtatttatgaccttatagtgttaatatcttgaaacatagagatctatgtactgtaatagtgtgattactatgctctagagaaaagtctacccctgctaaggagttctcatccctctgtcagggtcagtaaggaaaacggtggcctagggtacaggcaacaatgagcagaccaacctaaatttggggaaattaggagaggcagagatagaacctggagccacttctatctgggctgttgctaatattgaggaggcttgccccacccaacaagccatagtggagagaactgaataaacaggaaaatgccagagcttgtgaaccctgtttctcttgaagaactgactagtgagatggcctggggaagctgtgaaagaaccaaaagagatcacaatactcaaaagagagagagagagaaaaaagagagatcttgatccacagaaatacatgaaatgtctggtctgtccaccccatcaacaagtcttgaaacaagcaacagatggatagtctgtccaaatggacataagacagacagcagtttccctggtggtcagggaggggttttggtgatacccaagttattgggatgtcatcttcctggaagcagagctggggagggagagccatcaccttgataatgggatgaatggaaggaggcttaggactttccactcctggctgagagaggaagagctgcaacggaattaggaagaccaagacacagatcacccggggcttacttagcctacagatgtcctacgggaacgtgggctggcccagcatagggctagcaaatttgagttggatgattgtttttgctcaaggcaaccagaggaaacttgcatacagagacagatatactgggagaaatgactttgaaaacctggctctaaggtgggatcactaagggatggggcagtctctgcccaaacataaagagaactctggggagcctgagccacaaaaatgttcctttattttatgtaaaccctcaagggttatagactgccatgctagacaagcttgtccatgtaatattcccatgtttttaccctgcccctgccttgattagactcctagcacctggctagtttctaacatgttttgtgcagcacagtttttaataaatgcttgttacattcaaaaaaaaaaaaaaaaaaaaaaaaaaaaaaaaaaaaaaaaaaaaaaaaaaaaaaaaaaaaaaaaaaaaaaaaaaaaa

SEQ ID NO: 154 - DNA, 1568 bp, Homo sapiens
cagcggcgcgtcctgcctgcagagagccaggccggagaagccgagcggcgcagaggacgccagggcgcgcgccgcagccacccaccctccggaccgcggcagctgctgacccgccatcgccatggcccgcgggaaagccaaggaggagggcagctggaagaaattcatctggaactcagagaagaaggagtttctgggcaggaccggtggcagttggtttaagatccttctattctacgtaatattttatggctgcctggctggcatcttcatcggaaccatccaagtgatgctgctcaccatcagtgaatttaagcccacatatcaggaccgagtggccccgccaggattaacacagattcctcagatccagaagactgaaatttcctttcgtcctaatgatcccaagagctatgaggcatatgtactgaacatagttaggttcctggaaaagtacaaagattcagcccagagggatgacatgatttttgaagattgtggcgatgtgcccagtgaaccgaaagaacgaggagactttaatcatgaacgaggagagcgaaaggtctgcagattcaagcttgaatggctgggaaattgctctggattaaatgatgaaacttatggctacaaagagggcaaaccgtgcattattataaagctcaaccgagttctaggcttcaaacctaagcctcccaagaatgagtccttggagacttacccagtgatgaagtataacccaaatgtccttcccgttcagtgcactggcaagcgagatgaagataaggataaagttggaaatgtggagtattttggactgggcaactcccctggttttcctctgcagtattatccgtactatggcaaactcctgcagcccaaatacctgcagcccctgctggccgtacagttcaccaatcttaccatggacactgaaattcgcatagagtgtaaggcgtacggtgagaacattgggtacagtgagaaagaccgttttcagggacgttttgatgtaaaaattaaattttaagtgacactacagaaaaacacaaaaaggtgatgggttgtgttatgcttgtattgaatgctgtcttgacatctcttgccttgtcctccggtatgttctaaagctgtgtctgagatctggatctgcccatcactttggctagtgacagggctaattaatttgctttatacattttcttttactttccttttttcctttctggaggcatcacatgctggtgctgtgtctttatgaatgttttaaccattttcatggtggaagaattttatatttatgcagttgtacaattttatttttttctgcaagaaaaagtgtaatgtatgaaataaaccaaagtcacttgtttgaaaataaatctttattttgaactttataaaaagcaatgcagtaccccatagactggtgttaaatgttgtctacagtgcaaaatccatgttctaacatatgtaataattgccaggagtacagtgctcttgttgatcttgtattcagtcaggttaaaacaacggacaataaaagaatgaacacattcaaaaaaaaaaaa

SEQ ID NO: 155 - DNA, 1707 bp, Homo sapiens
cttgaatttggacagtgaaaaggcccttaaaaaggatcgcagtatgtggtagggaagtgatgctgtctgaaggtgacatcctgttctcctctcttctgtcctctccatccttattttggccacctggtttgatcttgctcttctacctagttttttatgggttcctggctgcactcttctcattcacgatgtgggttatgcttcagactctcaacgatgaggttccaaaataccgtgaccagattcctagcccaggactcatggtttttccaaaaccagtgaccgcattggaatatacattcagtaggtctgatccaacttcgtatgcagggtacattgaagaccttaagaagtttctaaaaccatatactttagaagaacagaagaacctcacagtctgtcctgatggagcactttttgaacagaagggtccagtttatgttgcatgtcagtttcctatttcattacttcaagcatgcagtggtatgaatgatcctgattttggctattctcaaggaaacccttgtattcttgtgaaaatgaacagaataattggattaaagcctgaaggagtgccaaggatagattgtgtttcaaagaatgaagatataccaaatgtagcagtttatcctcataatggaatgatagacttaaaatatttcccatattatgggaaaaaactgcatgttgggtatctacagccattggttgctgttcaggtcagctttgctcctaacaacactgggaaagaagtaacagttgagtgcaagattgatggatcagccaacctaaaaagtcaggatgatcgtgacaagtttttgggacgagttatgttcaaaatcacagcacgtgcatagtatgagtaggatatctccacagagtaaatgttgtgttgtctgtcttcattttgtaacagctggaccttccattctagaattatgagaccaccttggagaaaggtgtgtggtacatgacattgggttacatcataacgtgcttccagatcatagtgttcagtgtcctctgaagtaactgcctgttgcctctgctgccctttgaaccagtgtacagtcgccagatagggaccggtgaacacctgattccaaacatgtaggatgggggtcttgtcctctttttatgtggtttaattgccaagtgtctaaagcttaatatgccgtgctatgtaaatattttatggatataacaactgtcatattttgatgtcaacagagttttagggataaaatggtacccggccaacatcaagtgactttatagctgcaagaaatgtggtatgtggagaagttctgtatgtgaggaaggaaaaaaagaaaataaaagtgtgtttgaaaaatattatcttgggttctttgtaaaatttattttttacatgctgaattagcctcgatctttttgattaagagcacaaacttttttttgtaaaacatgtaaaaaaaaaactgggattaatttttagtgttggaactgcctcttattttaggctgtagataaaatagcatttttaggttagccagtgtgactatgcacctaattttttatgagattaaattcataagacttaatttgtacaatagtttgtgaaatatcttgttactgcttttatttagcagactgtggactgtaataaagtatataaattgtgaaatataaaaacttggaacttattcaaagcttcaaagcaaacaa

SEQ ID NO: 156 - DNA, 456 bp, Homo sapiens
gccccctcccctgactatcaaagcagcggccggctgttggggtccaccacgccttccacctgccccactgcttcttcgcttctctcttggaaagtccagtctctcctcggcttgcaatggaccccaactgctcctgcgccgctggtgtctcctgcacctgcgctggttcctgcaagtgcaaagagtgcaaatgcacctcctgcaagaagagctgctgctcctgctgccccgtgggctgtagcaagtgtgcccagggctgtgtttgcaaaggggcgtcagagaagtgcagctgctgcgactgatgccaggacaacctttctcccagatgtaaacagagagacatgtacaaacctggattttttttttataccaccttgacccatttgctacattccttttcctgtgaaatatgtgagtgataattaaacactttagacctgaaaaaaaaaaaaaaaa

SEQ ID NO: 157 - DNA, 2860 bp, Homo sapiens
ggggcgctggtgtgatcgagctcacgtagcgagggctgcagtcgcctcctccctggcgctgccatcgcggcctagaggttataaaagggctaacgggctccctctgctgcccagtcgcgccgccagcgggctgagggtaggaagtagccgctccgagtggaggcgactgggggctgaagagcgcgccgccctctcgtcccactttccaggtgtgtgatcctgtaaaattaaatcttccaagatgatctggtatatattaattataggaattctgcttccccagtctttggctcatccaggcttttttacttcaattggtcagatgactgatttgatccatactgagaaagatctggtgacttctctgaaagattatattaaggcagaagaggacaagttagaacaaataaaaaaatgggcagagaagttagatcggctaactagtacagcgacaaaagatccagaaggatttgttgggcatccagtaaatgcattcaaattaatgaaacgtctgaatactgagtggagtgagttggagaatctggtccttaaggatatgtcagatggctttatctctaacctaaccattcagagacagtactttcctaatgatgaagatcaggttggggcagccaaagctctgttacgtctccaggatacctacaatttggatacagataccatctcaaagggtaatcttccaggagtgaaacacaaatcttttctaacggctgaggactgctttgagttgggcaaagtggcctatacagaagcagattattaccatacggaactgtggatggaacaagccctaaggcaactggatgaaggcgagatttctaccatagataaagtctctgttctagattatttgagctatgcggtatatcagcagggagacctggataaggcacttttgctcacaaagaagcttcttgaactagatcctgaacatcagagagctaatggtaacttaaaatattttgagtatataatggctaaagaaaaagatgtcaataagtctgcttcagatgaccaatctgatcagaaaactacaccaaagaaaaaaggggttgctgtggattacctgccagagagacagaagtacgaaatgctgtgccgtggggagggtatcaaaatgacccctcggagacagaaaaaactcttttgccgctaccatgatggaaaccgtaatcctaaatttattctggctccagctaaacaggaggatgaatgggacaagcctcgtattattcgcttccatgatattatttctgatgcagaaattgaaatcgtcaaagacctagcaaaaccaaggctgagccgagctacagtacatgaccctgagactggaaaattgaccacagcacagtacagagtatctaagagtgcctggctctctggctatgaaaatcctgtggtgtctcgaattaatatgagaatacaagatctaacaggactagatgtttccacagcagaggaattacaggtagcaaattatggagttggaggacagtatgaaccccattttgactttgcacggaaagatgagccagatgctttcaaagagctggggacaggaaatagaattgctacatggctgttttatatgagtgatgtgtctgcaggaggagccactgtttttcctgaagttggagctagtgtttggcccaaaaaaggaactgctgttttctggtataatctgtttgccagtggagaaggagattatagtacacggcatgcagcctgtccagtgctagttggcaacaaatgggtatccaataaatggctccatgaacgtggacaagaatttcgaagaccttgtacgttgtcagaattggaatgacaaacaggcttccctttttctcctattgttgtactcttatgtgtctgatatacacatttcctagtcttaactttcaggagtttacaattgactaacactccatgattgattcagtcatgaacctcatcccatgtttcatctgtggacaattgcttactttgtgggttcttttaaaagtaacacgaaatcatcatattgcataaaaccttaaagttctgttggtatcacagaagacaaggcagagtttaaagtgaggaattttatatttaaagaactttttggttggataaaaacataatttgagcatccagttttagtatttcactacatctcagttggtgggtgttaagctagaatgggctgtgtgataggaaacaaatgccttacagatgtgcctaggtgttctgtttacctagtgtcttactctgttttctggatctgaagactagtaataaactaggacactaactgggttccatgtgattgccctttcatatgatcttctaagttgatttttttcctcccaagtcttttttaaagaaagtatactgtattttaccaaccccctctcttttcttttagctcctctgtggtgaattaaacgtacttgagttaaaatatttcgattttttttttttttttaatggaaagtcctgcataacaacactgggccttcttaactaaaatgctcaccacttagcctgtttttttatcccttttttaaaatgacagatgattttgttcaggaattttgctgtttttcttagtgctaataccttgcctcttattcctgctacagcagggtggtaatattggcattctgattaaatactgtgccttaggagactggaagtttaaaaatgtacaagtcctttcagtgatgagggaattgattttttttaaaagtctttttcttagaaagccaaaatgtttgtttttttaagattctgaaatgtgttgtgacaacaatgacctatttatgatcttaaatcttttttaaaaaaaaaaaaaaaa

SEQ ID NO: 158 - DNA, 5125 bp, Homo sapiens
agacagacgctgggacccacgacgacagaaggcgccgatggccgcgcctgctgagccctgcgcggggcagggggtctggaaccagacagagcctgaacctgccgccaccagcctgctgagcctgtgcttcctgagaacagcaggggtctgggtaccccccatgtacctctgggtccttggtcccatctacctcctcttcatccaccaccatggccggggctacctccggatgtccccactcttcaaagccaagatggtgcttggattcgccctcatagtcctgtgtacctccagcgtggctgtcgctctttggaaaatccaacagggaacgcctgaggccccagaattcctcattcatcctactgtgtggctcaccacgatgagcttcgcagtgttcctgattcacaccgagaggaaaaagggagtccagtcatctggagtgctgtttggttactggcttctctgctttgtcttgccagctaccaacgctgcccagcaggcctccggagcgggcttccagagcgaccctgtccgccacctgtccacctacctatgcctgtctctggtggtggcacagtttgtgctgtcctgcctggcggatcaaccccccttcttccctgaagacccccagcagtctaacccctgtccagagactggggcagccttcccctccaaagccacgttctggtgggtttctggcctggtctggaggggatacaggaggccactgagaccaaaagacctctggtcgcttgggagagaaaactcctcagaagaacttgtttcccggcttgaaaaggagtggatgaggaaccgcagtgcagcccggaggcacaacaaggcaatagcatttaaaaggaaaggcggcagtggcatgaaggctccagagaccgagcccttcctacggcaagaagggagccagtggcgcccactgctgaaggccatctggcaggtgttccattctaccttcctcctggggaccctcagcctcatcatcagtgatgtcttcaggttcactgtccccaagctgctcagccttttcctggagtttattggtgatcccaagcctccagcctggaagggctacctcctcgccgtgctgatgttcctctcagcctgcctgcaaacgctgtttgagcagcagaacatgtacaggctcaaggtgctgcagatgaggttgcggtcggccatcactggcctggtgtacagaaaggtcctggctctgtccagcggctccagaaaggccagtgcggtgggtgatgtggtcaatctggtgtccgtggacgtgcagcggctgaccgagagcgtcctctacctcaacgggctgtggctgcctctcgtctggatcgtggtctgcttcgtctatctctggcagctcctggggccctccgccctcactgccatcgctgtcttcctgagcctcctccctctgaatttcttcatctccaagaaaaggaaccaccatcaggaggagcaaatgaggcagaaggactcacgggcacggctcaccagctctatcctcaggaactcgaagaccatcaagttccatggctgggagggagcctttctggacagagtcctgggcatccgaggccaggagctgggcgccttgcggacctccggcctcctcttctctgtgtcgctggtgtccttccaagtgtctacatttctggtcgcactggtggtgtttgctgtccacactctggtggccgagaatgctatgaatgcagagaaagcctttgtgactctcacagttctcaacatcctcaacaaggcccaggctttcctgcccttctccatccactccctcgtccaggcccgggtgtcctttgaccgtctggtcaccttcctctgcctggaagaagttgaccctggtgtcgtagactcaagttcctctggaagcgctgccgggaaggattgcatcaccatacacagtgccaccttcgcctggtcccaggaaagccctccctgcctccacagaataaacctcacggtgccccagggctgtctgctggctgttgtcggtccagtgggggcagggaagtcctccctgctgtccgccctccttggggagctgtcaaaggtggaggggttcgtgagcatcgagggtgctgtggcctacgtgccccaggaggcctgggtgcagaacacctctgtggtagagaatgtgtgcttcgggcaggagctggacccaccctggctggagagagtactagaagcctgtgccctgcagccagatgtggacagcttccctgagggaatccacacttcaattggggagcagggcatgaatctctccggaggccagaagcagcggctgagcctggcccgggctgtatacagaaaggcagctgtgtacctgctggatgaccccctggcggccctggatgcccacgttggccagcatgtcttcaaccaggtcattgggcctggtgggctactccagggaacaacacggattctcgtgacgcacgcactccacatcctgccccaggctgattggatcatagtgctggcaaatggggccatcgcagagatgggttcctaccaggagcttctgcagaggaagggggccctcgtgtgtcttctggatcaagccagacagccaggagatagaggagaaggagaaacagaacctgggaccagcaccaaggaccccagaggcacctctgcaggcaggaggcccgagcttagacgcgagaggtccatcaagtcagtccctgagaaggaccgtaccacttcagaagcccagacagaggttcctctggatgaccctgacagggcaggatggccagcaggaaaggacagcatccaatacggcagggtgaaggccacagtgcacctggcctacctgcgtgccgtgggcacccccctctgcctctacgcactcttcctcttcctctgccagcaagtggcctccttctgccggggctactggctgagcctgtgggcggacgaccctgcagtaggtgggcagcagacgcaggcagccctgcgtggcgggatcttcgggctcctcggctgtctccaagccattgggctgtttgcctccatggctgcggtgctcctaggtggggcccgggcatccaggttgctcttccagaggctcctgtgggatgtggtgcgatctcccatcagcttctttgagcggacacccattggtcacctgctaaaccgcttctccaaggagacagacacggttgacgtggacattccagacaaactccggtccctgctgatgtacgcctttggactcctggaggtcagcctggtggtggcagtggctaccccactggccactgtggccatcctgccactgtttctcctctacgctgggtttcagagcctgtatgtggttagctcatgccagctgagacgcttggagtcagccagctactcgtctgtctgctcccacatggctgagacgttccagggcagcacagtggtccgggcattccgaacccaggccccctttgtggctcagaacaatgctcgcgtagatgaaagccagaggatcagtttcccgcgactggtggctgacaggtggcttgcggccaatgtggagctcctggggaatggcctggtgtttgcagctgccacgtgtgctgtgctgagcaaagcccacctcagtgctggcctcgtgggcttctctgtctctgctgccctccaggtgacccagacactgcagtgggttgttcgcaactggacagacctagagaacagcatcgtgtcagtggagcggatgcaggactatgcctggacgcccaaggaggctccctggaggctgcccacatgtgcagctcagcccccctggcctcagggcgggcagatcgagttccgggactttgggctaagataccgacctgagctcccgctggctgtgcagggcgtgtccttcaagatccacgcaggagagaaggtgggcatcgttggcaggaccggggcagggaagtcctccctggccagtgggctgctgcggctccaggaggcagctgagggtgggatctggatcgacggggtccccattgcccacgtggggctgcacacactgcgctccaggatcagcatcatcccccaggaccccatcctgttccctggctctctgcggatgaacctcgacctgctgcaggagcactcggacgaggctatctgggcagccctggagacggtgcagctcaaagccttggtggccagcctgcccggccagctgcagtacaagtgtgctgaccgaggcgaggacctgagcgtgggccagaaacagctcctgtgtctggcacgtgcccttctccggaagacccagatcctcatcctggacgaggctactgctgccgtggaccctggcacggagctgcagatgcaggccatgctcgggagctggtttgcacagtgcactgtgctgctcattgcccaccgcctgcgctccgtgatggactgtgcccgggttctggtcatggacaaggggcaggtggcagagagcggcagcccggcccagctgctggcccagaagggcctgttttacagactggcccaggagtcaggcctggtctgagccaggaccctcaaccgtaccccagttggaccagcccgcacagcctgcagtgctggagatggaagtgacccgtggtcatcgatagctccacacgatattgagtctagacctgtgtttgctctctgggaggaaaatggcagagaaagtggccaattatcacagagcatcagagccggaaggacctagcaatacacaggtctgcccgggcagggcccatctcgccctgtccaccctgcagccaatgtcaacagcgactctcagccccgctgtactctggactcacctgggggcctcaagcacatgcccaggctcccggctagacccttaaatcagaatctctgaggctgggaactgccatgctgtgtgtactttttacaaattaacacttttattttgggataatcccagactcacatgcagttaaagaaacaataatatagagagattcgtgtacttggtaccccatttcacccaatggtaacatcttgcaaaactctaggataaagcatcacagccagggtgttgacattgacacaacaatcttgctcgatttcccgttttacctgtaaaaaaaaa

SEQ ID NO: 159 - DNA, 3428 bp, Homo sapiens
tggagagtaatgttacagagcggagagagtgaggaggctgcgtctggctcccgctctcacagccattgcagtacattgagctccatagagacagcgccggggcaagtgagagccggacgggcactgggcgactctgtgcctcgctgaggaaaaataactaaacatgggcaaaggagatcctaagaagccgagaggcaaaatgtcatcatatgcattttttgtgcaaacttgtcgggaggagcataagaagaagcacccagatgcttcagtcaacttctcagagttttctaagaagtgctcagagaggtggaagaccatgtctgctaaagagaaaggaaaatttgaagatatggcaaaagcggacaaggcccgttatgaaagagaaatgaaaacctatatccctcccaaaggggagacaaaaaagaagttcaaggatcccaatgcacccaagaggcctccttcggccttcttcctcttctgctctgagtatcgcccaaaaatcaaaggagaacatcctggcctgtccattggtgatgttgcgaagaaactgggagagatgtggaataacactgctgcagatgacaagcagccttatgaaaagaaggctgcgaagctgaaggaaaaatacgaaaaggatattgctgcatatcgagctaaaggaaagcctgatgcagcaaaaaagggagttgtcaaggctgaaaaaagcaagaaaaagaaggaagaggaggaagatgaggaagatgaagaggatgaggaggaggaggaagatgaagaagatgaagatgaagaagaagatgatgatgatgaataagttggttctagcgcagttttttttttcttgtctataaagcatttaacccccctgtacacaactcactccttttaaagaaaaaaattgaaatgtaaggctgtgtaagatttgtttttaaactgtacagtgtctttttttgtatagttaacacactaccgaatgtgtctttagatagccctgtcctggtggtattttcaatagccactaaccttgcctggtacagtatgggggttgtaaattggcatggaaatttaaagcaggttcttgttggtgcacagcacaaattagttatatatggggatggtagttttttcatcttcagttgtctctgatgcagcttatacgaaataattgttgttctgttaactgaataccactctgtaattgcaaaaaaaaaaaaaaagttgcagctgttttgttgacattctgaatgcttctaagtaaatacaattttttttattagtattgttgtccttttcataggtctgaaatttttcttcttgaggggaagctagtcttttgcttttgcccattttgaatcacatgaattattacagtgtttatcctttcatatagttagctaataaaaagcttttgtctacacaccctgcatatcataatgggggtaaagttaagttgagatagttttcatccataactgaacatccaaaatcttgatcagttaagaaatttcacatagcccacttacatttacaaactgaagagtaatcaatctactcaaagcatgggattattagaatcaaacattttgaaagtctgtccttgaaggactaatagaaaagtatgttctaacctttacatgaggactctattctttaactcccattaccatgtaatggcagttatattttgcagttcccacattaaagaagacctgagaatgtatccccaaaagcgtgagcttaaaatacaagactgccatattaaattttttgttgacattagtctcagtgaagactatgaaaatgctggctatagatgtcttttcccatttatctaaatatggactgctcaggaaacgagactttccattacaagtatttttaattaattgggccagcttttcaaacaaagatgccacattcaaaatagggtatattttcctatattacggtttgcccctttataaatccaagtagataggaagaaagaagacaaactttgcatctcagtatgaattattcaatttatttgaatgatttttctttacaaaacaaactcattcattagtcatgtttatctgcttaggagtttagggaacaatttggcaattttgtggttttcgagattatcgttttcttaaagtgccagtattttaaaatagcgttcttgtaattttacacgcttttgtgatggagtgctgttttgttatataatttagacttggattctttccatttgcatttgtttatgtaatttcaggaggaatactgaacatctgagtcctggatgatactaataaactaataattgcagaggttttaaatactagttaaatggctttcacttaagaacttaagattttgttacatatttttaaatcttgtttctaataatacctcttagcagtaccttttaaataagtataagggatggcaaagtttttccctttaaaaatactcactttatgcttataaataggttaatgggctgataaaaggttttgtcaaacattgcaagtattcggtgctatatataaaggaggaaaaactagttttactttcagaatgatttaaacaagatttttaaaaacaagatacatgcaagcgaacagcagggttagtgataggctgcaattgtgtcgaacatcagattttttgttaagaggagcaaatgactcaatctgatttagatggaagtttctactgtatagaaatcaccattaatcaccaacattaataattctgatccatttaaaatgaattctggctcaaggagaatttgtaactttagtaggtacgtcatgacaactaccatttttttaagatgttgagaatgggaacagtttttttagggtttattcttgaccacagatcttaagaaaatggacaaaacccctcttcaatctgaagattagtatggtttggtgttctaacagtatcccctagaagttggatgtctaaaactcaagtaaatggaagtgggaggcaatttagataagtgtaaagccttgtaactgaagatgattttttttagaaagtgtatagaaactattttaatgccaagatagttacagtgctgtggggtttaaagactttgttgacatcaagaaaagactaaatctataattaattgggccaacttttaaaatgaagatgctttttaaaactaatgaactaagatgtataaatcttagtttttttgtattttaaagataggcatatggcatattgattaacgagtcaaatttcctaactttgctgtgcaaaggttgagagctattgctgattagttaccacagttctgatgatcgtcccatcacagtgttgttaatgtttgctgtatttattaattttcttaaagtgaaatctgaaaaatgaaatttgtgtgtcctgtgtacccgaggggtaatgattaaatgataaagataagaaaa

SEQ ID NO: 160 - DNA, 3241 bp, Homo sapiens
gtgcagggcggggctggcctgcggaagggggcgggttcggaggagtgaactgtgcggttagtgcgcctttcagcctcacctgcagctgcgcctccttgcacctgcgcctgtgctttttctcccagcactgcggacgcgactcgagggtgacgctcgctccgctcgtcccgctcgtcatggcctacccgggatacggaggagggtttggaaattttagcattcaggtgccaggaatgcagatgggacagccagtgccagaaacaggcccagctatactcctcgatggatactctgggccagcatattcagacacttattcctcagctggtgactccgtgtatacttacttcagtgctgttgctggacaggatggtgaagtggatgctgaagaacttcagagatgtttgacacagtctggaattaatggaacttactctcccttcagtttggaaacctgcagaattatgattgccatgttggatagagatcacacaggaaaaatgggatttaatgcattcaaagagctatgggcagctcttaatgcctggaaggaaaacttcatgactgttgatcaagatggaagtggcacagtagaacatcatgagttgcgtcaagccattggtcttatgggttataggttgagtcctcaaacattaactactattgttaaacgttatagcaagaatggcagaattttctttgatgattatgttgcttgctgtgtgaagcttcgagcattgacagatttctttaggaaaagagaccacttgcaacaagggtctgcgaatttcatatatgacgattttttgcagggcactatggcaatttgaatgcttagaattttaaacctgaagagacactgtgaattcttttgtttggaagaagtgaactggactactttaaaacttttaagggttttctatgttcttcctacctgttaaacctcttccctttctgtgtgtttttattttagcagatagttcaaagcaataaaagatttcttttttaatttgaggtattactgcttttggaaaagttattttataaatatgtgcatattgtcataaaatattgtatgattaattgatttaaataatgcttagccttaattttagataatgtaaatttagaggaatgtactttacaagatagattgtataagaagccaaataatgaaagcctagaaaaaactaatttatacttatctgaaggttacaaattagacttttaaattttctttgtagttggtggtgtttgagggttggctagaaatgaaagcctggattttgtgccatgtttgtaatatagtttgttccttgatcaaataatcagagaaaagaaacttaaagatctttgtctgtgaagaagaaaattatctccctagttcaatctgtagtgaaataagactacagaaggcattgttttttccttttttattttttgtattatatatttttcttaaatatgttttattgtcttctctaagcaaaaagttcttaataaacatagtatttctctctgcgtcctatttcattagtgaagacatagttcacctaaaatggcatcctgctctgaatctagactttttagaaatggcatatgtttttgatgatatgtcaacattcaaaattgtcctaattaaattgttgtttaaatgtaatgtcaactctttataaacttaaaaataaacaagtaattaaccactctaattgttcagaaattttacatttgacttatttgacaacattaacattagtggtggctttgccattaaaaacccagtaagtattttgagtgcatctatgtgatgtggtgttttgagcatagtaggcaccacagcaacttttctgcgtggtactaaaactgccgaaaatgcgacgtagaatcaccagatctttagtgtttaatatccctggtataagatgttataattaatgtaatttctttcttggcaaacacctcatgtctgtcttagtgaagatttaataaaccacttatttttcttatgctttaaatgtgtattttctaacctaacagtgagtgacataattttatgactgctgaccaaattaatttatagattttataaaatcccatgtttcttaatggatggaggatagatggcaatatcttgaacaaaatcttttataaacttacagaattttaaatcagccttcacttaaaaaaatcctggaaaggaagtaacgcatagtcacttgacactgataattttatataatttgctgtcaaattcacttggtcagttttataaaaatgtgtgaataggtaatacacataattttgttctctggcttttttatgaacatatatttgataatgtgagaggacattaactgagctgggaaattaaagaaacagaattctaattagaagtgttgtaggaaaaagcaaatgtgaaaacactaagtgtcgttcacatcgaatggtgataatgtcgctcagcaacctgtaatcttaacatccaggttatacagatggtcgttactgaactattctgcggtcgattatgattatctctcttacttggaggctcacagttgaggtaaaacttttaaaatgacaaatggtattattcatgtaagcttctgccaggtgacactctatattagaactctttaacacaattttcatttaaaaatgttcttatgacttttggtcatagaaggtctatgaaggagcttccatggccaaacatatttagaaactctcactttctaaagcttgacaaggtatattagcatctgaaaccccaaggttaataaaatcagtcatgtttaattttatttgacccagttttttccaaactttttgaccacagaacccctttctctagcaaaacctaacattctatgccgatccaacttaattgccaggcaactcttctgcactttacattaaacagacaaacttatgttaacaaaaacattaggcctagagaatattttaccagaatttttatactgaaatacagttcactttttcgatgctttaaaaataactgatatttttatgatgaacatgactgtaatatgaatatagtatagtagtttgcactggttaacttacaccccagttcttttacgatgatgtaaattattgaataatgtacactcttaatgtataagtgcttttatttatacagtaaacatgtttccatgtcattttgagaatttttttaataaacattcaaatagcttgctgtaaaaaaaaaaaaaaaaaa

SEQ ID NO: 161 - DNA, 2649 bp, Homo sapiens
atctctcggcttccgttgagcaccaagcaagatggcagcttccgagacggttaggctacggcttcaatttgattacccgccgccagctaccccgcactgtacggccttctggcttctggtcgacttgaacagatgccgagtcgtcacagatctcattagtctcatccgccagcgcttcggcttcagttctggggccttcctaggcctctacctggagggggggctcttgccccccgccgagagcgcgcgccttgtgagagacaacgactgcctcagagttaaattagaagagagaggagttgctgagaattctgtagtcatcagtaatggtgacattaatttatctcttagaaaagcaaagaagcgggcatttcagttagaggagggtgaagaaactgaaccagattgcaaatattcaaagaagcattggaagagtcgagagaacaataacaataatgagaaggtcttggatctggaaccaaaagctgtcacagatcagactgtcagcaaaaaaaacaagagaaaaaataaagcaacctgtggcacagtgggtgatgataacgaagaggccaaaagaaaatcaccaaagaaaaaggagaaatgtgaatataaaaaaaaggctaagaatcccaagtctccgaaagtacaggcagtgaaagactgggccaatcagagatgtagttctccaaaaggttctgctagaaacagccttgttaaagccaaaaggaaaggtagtgtaagcgtttgctcaaaagagagtcccagttcctcctcggagtctgaatcttgtgatgaatctatcagtgatggtcccagcaaagtcactttggaggccagaaattcctcagagaaattaccaactgagttatcaaaggaagaaccctctaccaaaaatacaactgcagacaaactggctataaaacttggctttagccttacccccagcaagggcaagacctctggaacaacatcttccagttcagactctagtgcagagtcagacgaccaatgcttgatgtcatcgagcaccccggagtgtgctgcgggtttcttaaagacagtaggcctttttgcaggaagaggtcgtccaggcccagggctgtcatcacagactgcaggtgctgctggatggaggcgttctggctcaaatggtggtggacaggctcctggtgcttctcccagtgtgtctctccctgctagtttaggaagaggatggggtagagaagagaaccttttttcttggaagggagctaagggacggggcatgcgggggagaggtcgaggacgagggcatcctgtttcctgtgttgtaaatagaagcactgacaaccagaggcaacagcaattaaatgacgtggtaaaaaattcatctactattatccagaatccagtagagacacccaagaaggactatagtctgttaccactgttagcagctgcccctcaagttggagaaaagattgcatttaagcttttggagctaacatccagttactctcctgatgtctctgactacaaggaaggaagaatattaagccacaatccagagacccagcaagtagatatagaaattctttcatccttacctgccttgagagaacctgggaaatttgatttagtttatcacaatgaaaatggagccgaggtagtggagtacgctgtgacacaggagagcaagatcactgtattttggaaagagttgattgacccaagactgattattgaatctccaagtaacacatcaagtacagaacctgcctgagtatgacctctccaccttatagtttatgaatgtcttgtttgtgaaagtgactataacccaaacttttttttttttttaaagaggatttggaagttgtatggatttttttgttatcttcactttactgcataggaaacaatctacctcatcatttaaaatgacatgggtgtcggttttgtagatctttggtttttttgtcaggtttaatttcagttaacaaaatgtaaaacatgacattccctgcagatattgttgtataccagtatggtttcttctctttctttaaatgtttttggccatcaagtagcagtcgtcagtaggagtttataataccaagaatgtgctgcgtatcttgtctcaataagttttaagtaacatttaaaaatattaaagcatgttatttgacctaattttttagcatttgagttgttccattaaatggagcatcttgtaaatttcaagtattttatacttgcaattgttaagagttaacaggtagttggatttgtcgcagacaatgagttaaggaatcctttcacgtttttcccaactttaaaattaaggattctcaggtccctgtgtagagcagtgaaaataagatgtgcgtatgtgtgtgtatgcctggagaattggtgtttcacttcagtgagaggattggctgtgagcttcagaccaggaaatgtgtcatcttgccaggcacctggctgagtgtgctggagtgaggatcttgaacagaaacttccttttctgttattattcactacgaagctaaaatggccaaatatataccgtgaaaattggtttcatttaacaaaagatcagatccctccttcagctgtacacatttttaaataaaatcatattgaactaaaaaaaaaaaaaaaaaa

SEQ ID NO: 162 - DNA, 3271 bp, Homo sapiens
cggaggtgagtgcagggctccgggcgctgtgtgccgtgccctgtcccccaggctctgggtccggttgagacgcactcccaccctgggtgctgcagggtctcccgtggcctacgctgccaggaggcccaggctgggagagggagcagggcggcggcccggggtgctcttccgcgctcctcgactccagctttggtctttgtggctcaatagcttgcgcccattggaaggggaaacgcacgttgctgtcccagccacgaggccctgagcatttagcacttggtcgacgggggaagatgtgtcggtgcagctaaaagatggaatatttgcgggcgtgaagcggcccgaggtgataccacaagtcttttgacatgctgaggtctggcaggaacattaacctatgtgcatcccgagtatggaccgtgtgctcccaggctcctgacatagggtcatgaattagggccgagtgggagcgcagagcccctcccagtcacccggcagcagaagcagcccggcttttggaggacattgtctcctggagcagtgtcagtcccaaaagctccagcccttctctgagacggggaccaggggatggcagccatgcacctgacagcctggccccagggacttcacggatcccctgaagctcatccatggacttccatggactacagggcctgagctatggaattggccctagggcagcaggaacctattgtttcagaagtcggtgacctttgaggacgtggctgtgtacttcacccaggcggaatgggatggcctgtcccctgcacagaggaccctgtacagggatgtgatgctggagaattatgggaatgtggcctccctgggatttccacttctcaaacctgctgtgatctcacaactggagggaggaagtgagctggggggctcatctccactggctgcaggaacaggcctccagggcctccagactgatattcagactgacaatgatttgacaaaggaaatgtatgaaggaaaagagaatgtatcatttgaacttcaaagagacttttcccaggaaacagacttttcagaagcctctcttctagagaaacaacaggaagtccactcagcaggaaatataaagaaggagaagagcaacaccattgatggaacagtgaaagatgagacaagccccgtggaggagtgtttttttagtcaaagttcaaactcatatcagtgtcataccatcactggagagcagccctctgggtgtacaggattggggaaatccatcagctttgatacaaaactcgtgaagcatgaaataattaattctgaggaaagacctttcaaatgtgaagaattagtagagccctttaggtgtgactctcaacttattcaacatcaagagaacaacactgaggaaaagccttatcagtgttcggagtgtggcaaagctttcagcattaatgagaaattaatttggcatcagagacttcacagtggggagaaacccttcaaatgtgtggagtgtgggaaaagcttcagctacagttcccattatatcacacatcagacaatccacagtggggagaagccctatcagtgtaagatgtgtgggaaggccttcagtgttaatggaagcctaagtaggcatcagagaatccatacgggagagaagccctatcagtgcaaggaatgtggaaatggcttcagctgtagttctgcatatattacacatcagagagtccacactggagagaaaccttacgagtgtaatgactgtgggaaagcgttcaatgttaatgcaaaattaattcaacatcagagaatccatactggagagaaaccttatgaatgtaatgaatgtggaaaaggcttcaggtgcagctcccagcttaggcagcatcagagcatccacacaggagaaaagccctatcagtgtaaagagtgtggaaaaggcttcaataataatacaaaactcattcagcatcagagaatccacacaggtgagaaaccctatgaatgcactgaatgtggaaaagccttcagtgtcaaagggaagttaatccaacaccagagaattcacacaggcgagaaaccctatgagtgtaatgaatgcgggaaagccttcagatgtaactcccaatttcggcagcatctgagaattcacactggggagaagccctatgagtgtaatgagtgtggaaaggccttcagcgttaatgggaaactaatgcggcatcagagaattcacactggggagaaaccttttgaatgtaatgagtgtgggagatgctttacttctaaaagaaacctacttgatcatcaccgaatccatactggagaaaagccctatcaatgtaaggaatgtgggaaagccttcagtatcaatgccaaactaactaggcatcagaggatacatactggggagaaacctttcaaatgtatggaatgtgagaaagcattcagctgtagttctaactatattgtgcaccagagaatccatacaggagagaaaccctttcagtgtaaggagtgtggaaaagccttccatgttaatgcccatttaattcggcatcagagaagccacactggggagaaacccttcagatgtgtggaatgtggcaaaggcttcagctttagttctgactacattatacatcagacagtccacacttggaagaaaccctatatgtgtagtgtgtgtgggaaagcattcaggtttagcttccagctcagtcagcatcagagtgtccatagtgaaggaaaatcctaataatgagaaagatacagaaaactcttaaggttaatgccaaaatggatcaagtatcatcagattcatccattgaaaaacctccaagagggcatgaatatggcagagtcttcatatggaaacagtttttattctattcagtttaaatcaggaaaggatgaccagttaaagagaaacatccaaaaatagctttgttttgtaccaacaggaattagaaaatataatgaaaagatttcgttcccagcagcatcaagaaaagtagattttctagaaataaacagttatggaggacttgtatggagaaatttaagtcttcactgagggccactttacaaaggaaatttgaataaatggagagagagagaagccttgttgttggataggaaaacccgtactaaagatactctacctacattaatttatttgtttaatttttgacaacaagcatgtattacttttgaaaagatgaaaaataaagatttatttaaaaaaggaaaaaaaaaaaaaaaaaaaaaaaaaaaaaaaaac

SEQ ID NO: 163 - DNA, 858 bp, Homo sapiens
gacaggaagagaaggaaaaaagagaaggcgctgtcccgctcttgctacggtggcctggaggagtggcgaaaccggaacagagaatttatcacttctgggactcacagtcgtgatgtctttcaagagggaaggagacgattggagtcaactcaatgtgctcaaaaaaagaagagtcggggacctcctagccagttacattccagaggatgaggcgctgatgcttcgggatggacgctttgcttgtgccatctgcccccatcgaccggtactggacaccctggccatgctgactgcccaccgtgcaggcaagaaacatctgtccagcttgcagcttttctatggcaagaagcagccgggaaaggaaagaaagcagaatccaaaacatcagaatgaattgagaagggaagaaaccaaagctgaggctcctctgctaactcagacacgacttatcacccagagtgctctgcacagagctccccactataacagttgctgccgccggaagtacagaccagaagcccctggtccctctgtctccctttcccctatgccaccctcagaggtcaaactccaaagtgggaagatcagtagggaacctgaacctgcggctggcccacaggccgaggagtcagcaactgtctcagcccctgcacccatgagccccacaagaagacgagccctggaccattatctcacccttcgaagctctggatggatcccagatggacgaggtcgatgggtaaaagatgaaaatgttgagtttgactctgatgaggaggaaccacctgatctccccttggactgatacccttttcccattcattcacaaataaattacaatgggtgctgagaacttaa

SEQ ID NO: 164 - DNA, 2829 bp, Homo sapiens
gattcgcagcagggtgtgtccagatggtcagtctctggtggctagcctgtcctgacaggggagagttaagctcccgttctccaccgtgccggctggccaggtgggctgagggtgaccgagagaccagaacctgcttgctggagcttagtgctcagagctggggagggaggttccgccgctcctctgctgtcagcgccggcagcccctcccggcttcacttcctcccgcagcccctgctactgagaagctccgggatcccagcagccgccacgccctggcctcagcctgcggggctccagtcaggccaacaccgacgcgcagctgggaggaagacaggacccttgacatctccatctgcacagaggtcctggctggaccgagcagcctcctcctcctaggatgacctcaccctccagctctccagttttcaggttggagacattagatggaggccaagaagatggctctgaggcggacagaggaaagctggattttgggagcgggctgcctcccatggagtcacagttccagggcgaggaccggaaattcgcccctcagataagagtcaacctcaactaccgaaagggaacaggtgccagtcagccggatccaaaccgatttgaccgagatcggctcttcaatgcggtctcccggggtgtccccgaggatctggctggacttccagagtacctgagcaagaccagcaagtacctcaccgactcggaatacacagagggctccacaggtaagacgtgcctgatgaaggctgtgctgaaccttaaggacggagtcaatgcctgcattctgccactgctgcagatcgacagggactctggcaatcctcagcccctggtaaatgcccagtgcacagatgactattaccgaggccacagcgctctgcacatcgccattgagaagaggagtctgcagtgtgtgaagctcctggtggagaatggggccaatgtgcatgcccgggcctgcggccgcttcttccagaagggccaagggacttgcttttatttcggtgagctacccctctctttggccgcttgcaccaagcagtgggatgtggtaagctacctcctggagaacccacaccagcccgccagcctgcaggccactgactcccagggcaacacagtcctgcatgccctagtgatgatctcggacaactcagctgagaacattgcactggtgaccagcatgtatgatgggctcctccaagctggggcccgcctctgccctaccgtgcagcttgaggacatccgcaacctgcaggatctcacgcctctgaagctggccgccaaggagggcaagatcgagattttcaggcacatcctgcagcgggagttttcaggactgagccacctttcccgaaagttcaccgagtggtgctatgggcctgtccgggtgtcgctgtatgacctggcttctgtggacagctgtgaggagaactcagtgctggagatcattgcctttcattgcaagagcccgcaccgacaccgaatggtcgttttggagcccctgaacaaactgctgcaggcgaaatgggatctgctcatccccaagttcttcttaaacttcctgtgtaatctgatctacatgttcatcttcaccgctgttgcctaccatcagcctaccctgaagaagcaggccgcccctcacctgaaagcggaggttggaaactccatgctgctgacgggccacatccttatcctgctaggggggatctacctcctcgtgggccagctgtggtacttctggcggcgccacgtgttcatctggatctcgttcatagacagctactttgaaatcctcttcctgttccaggccctgctcacagtggtgtcccaggtgctgtgtttcctggccatcgagtggtacctgcccctgcttgtgtctgcgctggtgctgggctggctgaacctgctttactatacacgtggcttccagcacacaggcatctacagtgtcatgatccagaaggtcatcctgcgggacctgctgcgcttccttctgatctacttagtcttccttttcggcttcgctgtagccctggtgagcctgagccaggaggcttggcgccccgaagctcctacaggccccaatgccacagagtcagtgcagcccatggagggacaggaggacgagggcaacggggcccagtacaggggtatcctggaagcctccttggagctcttcaaattcaccatcggcatgggcgagctggccttccaggagcagctgcacttccgcggcatggtgctgctgctgctgctggcctacgtgctgctcacctacatcctgctgctcaacatgctcatcgccctcatgagcgagaccgtcaacagtgtcgccactgacagctggagcatctggaagctgcagaaagccatctctgtcctggagatggagaatggctattggtggtgcaggaagaagcagcgggcaggtgtgatgctgaccgttggcactaagccagatggcagccccgatgagcgctggtgcttcagggtggaggaggtgaactgggcttcatgggagcagacgctgcctacgctgtgtgaggacccgtcaggggcaggtgtccctcgaactctcgagaaccctgtcctggcttcccctcccaaggaggatgaggatggtgcctctgaggaaaactatgtgcccgtccagctcctccagtccaactgatggcccagatgcagcaggaggccagaggacagagcagaggatctttccaaccacatctgctggctctggggtcccagtgaattctggtggcaaatatatattttcactaactaaaaaaaaaaaaaaaaaaaaaaa

SEQ ID NO: 165 - DNA, 6104 bp, Homo sapiens
acagccaaatggtgcgacaggaggagctgcagccgcggccgcagcgcccgcacggagaggcttgaggcggctcctggcgtcgcccagagggagcgactagacgaacagtccggtgagggcggcgagaggaagcccgctacgagtgccctagctccccgccgctctcgatgaaccggacggaataagccgcgcctccagcaggggctgcgcctccatgaatccctagttgtttttttttttttctttctctcccctctcctcacccccaccccgagccccgtcccgccttctcccttcgccagaggcggccgcgtccaggtgcggagtccataccggagcgcaatggcgtccaaccccgaacggggggagattctgctcacggaactgcagggggattcccgaagtcttccgttttctgagaatgtgagtgctgttcaaaaattagacttttcagatacaatggtgcagcagaaattggatgatatcaaggatcgaattaagagagaaataaggaaagaactgaaaatcaaagaaggagctgaaaatctgaggaaagtcacaacagataaaaaaagtttggcttatgtagacaacattttgaaaaaatcaaataaaaaattagaagaactacatcacaagctgcaggaattaaatgcacatattgttgtatcagatccagaagatattacagattgcccaaggactccagatactccaaataatgaccctcgttgttctactagcaacaatagattgaaggccttacaaaaacaattggatatagaacttaaagtaaaacaaggtgcagagaatatgatacagatgtattcaaatggatcttcaaaggatcggaaactccatggtacagctcagcaactgctccaggacagcaagacaaaaatagaagtcatacgaatgcagattcttcaggcagtccagactaatgaattggcttttgataatgcaaaacctgtgataagtcctcttgaacttcggatggaagaattaaggcatcattttaggatagagtttgcagtagcagaaggtgcaaagaatgtaatgaaattacttggctcaggaaaagtaacagacagaaaagcactttcagaagctcaagcaagatttaatgaatcaagtcagaagttggaccttttaaagtattcattagagcaaagattaaacgaagtccccaagaatcatcccaaaagcaggattattattgaagaactttcacttgttgctgcatcaccaacactaagtccacgtcaaagtatgatatctacgcaaaatcaatatagtacactatccaaaccagcagcactaacaggtactttggaagttcgtcttatgggctgccaagatatcctagagaatgtccctggacggtcaaaagcaacatcagttgcactgcctggttggagtccaagtgaaaccagatcatctttcatgagcagaacgagtaaaagtaaaagcggaagtagtcgaaatcttctaaaaaccgatgacttgtccaatgatgtctgtgctgttttgaagctcgataatactgtggttggccaaactagctggaaacccatttccaatcagtcatgggaccagaagtttacactggaactggacaggtcacgtgaactggaaatttcagtttattggcgtgattggcggtctctgtgtgctgtaaaatttctgaggttagaagattttttagacaaccaacggcatggcatgtgtctctatttggaaccacagggtactttatttgcagaggttaccttttttaatccagttattgaaagaagaccaaaacttcaaagacaaaagaaaattttttcaaagcaacaaggcaaaacatttctcagagctcctcaaatgaatattaatattgccacttggggaaggctagtaagaagagctattcctacagtaaatcattctggcaccttcagccctcaagctcctgtgcctactacagtgccagtggttgatgtacgcatccctcaactagcacctccagctagtgattctacagtaaccaaattggactttgatcttgagcctgaacctcctccagccccaccacgagcttcttctcttggagaaatagatgaatcttctgaattaagagttttggatataccaggacaggattcagagactgtttttgatattcagaatgacagaaatagtatacttccaaaatctcaatctgaatacaagcctgatactcctcagtcaggcctagaatatagtggtattcaagaacttgaggacagaagatctcagcaaaggtttcagtttaatctacaagatttcaggtgttgtgctgtcttgggaagaggacattttggaaaggtgcttttagctgaatataaaaacacaaatgagatgtttgctataaaagccttaaagaaaggagatattgtggctcgagatgaagtagacagcctgatgtgtgaaaaaagaatttttgaaactgtgaatagtgtaaggcatccctttttggtgaacctttttgcatgtttccaaaccaaagagcatgtttgctttgtaatggaatatgctgccggtggggacctaatgatgcacattcatactgatgtcttttctgaaccaagagctgtattttatgctgcttgtgtagttcttgggttgcagtatttacatgaacacaaaattgtttatagagatttgaaattggataacttattgctagatacagagggctttgtgaaaattgctgattttggtctttgcaaagaaggaatgggatatggagatagaacaagcacattttgtggcactcctgaatttcttgccccagaagtattaacagaaacttcttatacaagggctgtagattggtggggccttggcgtgcttatatatgaaatgcttgttggtgagtctccctttcctggtgatgatgaagaggaagtttttgacagtattgtaaatgatgaagtaaggtatccaaggttcttatctacagaagccatttctataatgagaaggctgttaagaagaaatcctgaacggcgccttggggctagcgagaaagatgcagaggatgtaaaaaagcacccatttttccggctaattgattggagcgctctgatggacaaaaaagtaaagccaccatttatacctaccataagaggacgagaagatgttagtaattttgatgatgaatttacctcagaagcacctattctgactccacctcgagaaccaaggatactttcggaagaggagcaggaaatgttcagagattttgactacattgctgattggtgttaagttgctagacactgcgaaaccaagctgactcacaagaagacctcttaaaaatagcaacccttcatttgctctctgtgccaccaatagcttctgagttttttgttgttgttgtttttattgaaacacgtgaagatttgtttaaaagtaccattctaatacttcttcaaaagtggctcctcattgtacttcagcgtaaatatgagcactggaaacagtttcatggagtttaagttgagtgaacatcggccatgaaaatccatcacgaatacttttggatcaatagtctatttttaaaaagaaagaaaaaaaccacttttttatagtccctagctttgccatatgcccgccttaagtggaaggaaagttaatcacttaactatgttttataaaaagaaaaaagggcttggaatgctattactgttcacacaaagtatgattctgtttgaataaggcaaatgctcctttttttaaaaaaaaagacattactgtaatatcaaaaaccgtggcagtttgtatacaactcggggcttgattttttttaaaaaaacagaatgaattgatgtcttattttataaatgttctatatttattaggagaaaactttatattgccttttttatcaatcatgtaacaggcttatagctttccaacagagctgcttgccaaacaattttttttgtttattaaacagtgctgaaacaaacaggatcagcatttacttaagatgttaagaatgaggacttttaatcagccgaaccaagatattgttacctgtatgcattcccaaagtctagatgctcagtatgttcagtcatatctttcagaatcagtgaaccgattaccctttttttggtattcactctacatctgccaacctagttcaccttggttttgtgtctgctgtagaagggaaccataacttggttaaaccgtagggattatcattgtatacatgctgtgaacatgtatatgtgcaagttttaatgtattctatgttgtaggcttattatttaattttaccacttcatcacttttgtacagtggccaagcagacacctcaaactccagcatttacattaagtgcatttgtacattttaggccactggatccagattttatattggcagttattgagggcaaaagcaatatattgtaacagaatgtataaatatttttgataaaacagtctatattttattaaaaaatgaattataacactaaagctgtacctcaaaagtctcaaaaataatttgatgaaatattttatacaactcttcaaaggatccgtctgtggctttttatactcttttagggttgtctttttacaaaccatgactttccacttgcctgtagttttttgtttgttttggtttggtttgattttatatttttttctcctaatctatgactttattgttttttcttagtttagtaatagcatctttgatcctgtgcttagcatgttagggtcattatacctcaggaatagcaagctgttaagtaaccatactgaattaactatttaattacagtgagctcatctcttaaaaattgttcaggtgtaaatcttatgagaaacatgaaaaagcacactgatttatggagagttgagctaaaaacatttataaatatttgctgggatgttttagcatcttttcattgtactctgagaacaattaaaattgtccagagatcatttatattaccttccaaattgtttattacccaagatcctttgggagaaaatcttatagaatgggggaacaatatgtggtttaaagttattttaaaatgccagttaatttcctcggcaaaggacaatagaggaacttagcttaattgtctggctttaatttaaactgtgttaatacaacattaaaataaaacactaaatacttttgaggtacagtctgctcacttttttggttctcaaatagcaaagaaagtaatgtctaaaataggctcttagcattaaaaactgacagcatttcgtaactacacagtgtacagaatttttttttaattgaagtcaatcactaaaaaaattagaaggcagggtctatttacacaattaagctgaagaaagcactaattttttgtagtttaaaatatatatatattttagtcagatttaaaattttaagctttatagagtgtaaatatattttgctattactgtatgtgtatgtgactgctcaagcactttgtaaagaaattaggatattttagaatggtacactatgcattcaaatgaaatgtgcctttcactatgtcattctaagaaaacaagtgttttttgcagtcataaattatcacaaatgcacaaattaaagtctatatagattgaaatttgtaactttggttttaagtattctttccttttagaaacttcctaatgattaaaatatactttaacttttctgtgttcaaaatctcaaagactaattaactttaataaacattcttgcaagtactttttgtcctagtgaaggcttaaaaccatgaacattcagagcaaactgtccacttcattgggaataatgggaaaagtttgtattctgctcctgtaaggtcagtagcatcttttatttgaagcatatttatggactgcttactgtgtatagatactgagaataggaagtttttttttttaaagcaacaaaatgttgatgaatgaagaacagcctgttttaattaagatgcaagcaccagtattgtatgtacttttctcttgtttgaggttagcttattttaatttaggacctggcttctcaaaaaggcaaatgaataaaacagaatactagta

SEQ ID NO: 166 - DNA, 2169 bp, Homo sapiens
ggtggttcttgcccgtgttgtgtgtgtgtgtgagtgagagagcgagtgagtgagtgagtgagtgtgtgtgtgggggggactcggcttgttgttgtcggtgacttccccctccccttcaccccttcccctccccgccgccgctgcagtggccgctccctgggccgtaggaaatgagcgataacgatgacatcgaggtggagagcgacgaagagcaaccgaggtttcaatctgcggctgacaaacgggctcatcataatgcactggaacgaaaacgtagggaccacatcaaagacagctttcacagtttgcgggactcagtcccatcactccaaggagagaaggcatcccgggcccaaatcctagacaaagccacagaatatatccagtatatgcgaaggaaaaaccacacacaccagcaagatattgacgacctcaagcggcagaatgctcttctggagcagcaaggggaaagcgagagctgatcaagttctttgttcctggggaattcacttctcttcctccctcatggaagatgcaagtaaaaggaaatgcaagtaaccacctggtccgtgcactggagaaggcgaggtcaagtgcccaactgcagaccaactacccctcctcagacaacagcctctacaccaacgccaagggcagcaccatctctgccttcgatgggggctcggactccagctcggagtctgagcctgaagagccccaaagcaggaagaagctccggatggaggccagctaagccactcggggcaggccagcaataaaaactgtctgtctccatcgtctcatcctcctttcagttcgttggtagagccctcagaaccatttaagagactctttatttttctctttctcccttttttttttaaatttttatttttacgtagaagctcttggacaacagctctcgttctccttccccatttccactgtatattttttaatgtattcccttcagggattccctgtccccaacaggaatttttaaaccaaaacaccccaacttggcagctttttctgtggaggacagacggccggccggacctctgagcacatagtgtcctgcccaccctaccagctcctccagccctgccgggcacatgcccgggggacgcctgccctgcccaggtggcctcctggcccgccctcacctctgatagactttgtgaatctgaactgctctactttgagaagatgaccggtttggagtaatcagaatgaaccctcctcctttttaagggttttttttttttcctttttctaaaaagctatgtatcgctcctattgaaagaccagatccttagagaagtttgtggtataaaaaggaagtggggacagattcgcagcacagagtcgctggcatgtttcactcctgcttctctcagccagctgtttaagcctgcggcgccagcctcacggagggccgtgtgacactctcgtggtatgtatgggagatggcagcagtgaagcagcagccaccagggagtggccatttggggttgggacagggagggtgttttgggtggcatagaggttttgtattgagggccagtgatgatgttttgatatttatttcctgctacttaaatttgaatctgagtgaattgtacctatttctgatgatgtcggtcttgcaaagcgacagattcataaagtaatgatgaaatctttctttcttcccgtgtgtatttctaagaaatagagccaactgattttgtatgtaaataccaagagcaatttacctggtactaaacccgcaccccagtgcggacccttcccagccctcatcccacttcctttcctactgtcctggaacctgtctccattgtgtgatccagccctggttctggctgtggtcagcagatgccagtgaagggttttgtgtgtttaggcctcatttctttgtctttttcctactccgttcctggcatttgctgatttctagtgtatactctgtagtctcagttcgtgtttgattccattccatggaaataaaaagtatgttgtacatactgccgaagaattgtcttgcaagttaaggcttccccctttactataagactataaataaaaacttattttatccttaaaaaaaaaaaaaaaaaaaaaaaaaaaaaaaaaaaaaaaaaaaaaaaaaaaaaaaaaaaaaaaaaa

SEQ ID NO: 167 - DNA, 437 bp, Homo sapiens
aggctggcgcgcatgctcaggcggggatgtgtgcgaagcctgccgctgctgcagcgagtctggcgcagagtggagcggccgccggagatgcctgacgcatctgtctgaggagcggtcagtgacgcgatggagcgggcaagggatcgcttacacctgagacgaactacagaacagcacgtaccagaggtggaagtccaagtcaaacgcagaaggactgcctcactgagcaaccaagagtgtcagttgtacccgaggcgttctcagcagcagcaagtacctgtggtggatttccaggctgaactgaggcaggcattcttagctgagacaccaagaggtggttaaagccatattggagtagcgaggaatctgattccaagcaaaaaccagacaatgtaataaaaatattattcataatttttcaaaaaaaaaaaaaaaaa

SEQ ID NO: 168 - DNA, 4557 bp, Homo sapiens
gaagccgcccgtttcctgccgagcggcgcgacggcacctgagcgactgcggcggcggcggcggcggcggcggcgcctcggagcgggcggcccgggctgtagtgccggcgccgccgcgtcttcccggtctcctttcccggccgcacagggttttataggatcacattgacaaaagtaccatggagttttatgagtcagcatattttattgttcttattccttcaatagttattacagtaattttcctcttcttctggcttttcatgaaagaaacattatatgatgaagttcttgcaaaacagaaaagagaacaaaagcttattcctaccaaaacagataaaaagaaagcagaaaagaaaaagaataaaaagaaagaaatccagaatggaaacctccatgaatccgactctgagagtgtacctcgagactttaaattatcagatgctttggcagtagaagatgatcaagttgcacctgttccattgaatgtcgttgaaacttcaagtagtgttagggaaagaaaaaagaaggaaaagaaacaaaagcctgtgcttgaagagcaggtcatcaaagaaagtgacgcatcaaagattcctggcaaaaaagtagaacctgtcccagttactaaacagcccacccctccctctgaagcagctgcctcgaagaagaaaccagggcagaagaagtctaaaaatggaagcgatgaccaggataaaaaggtggaaactctcatggtaccatcaaaaaggcaagaagcattgcccctccaccaagagactaaacaagaaagtggatcagggaagaagaaagcttcatcaaagaaacaaaagacagaaaatgtcttcgtagatgaaccccttattcatgcaactacttatattcctttgatggataatgctgactcaagtcctgtggtagataagagagaggttattgatttgcttaaacctgaccaagtagaagggatccagaaatctgggactaaaaaactgaagaccgaaactgacaaagaaaatgctgaagtgaagtttaaagattttcttctgtccttgaagactatgatgttttctgaagatgaggctctttgtgttgtagacttgctaaaggagaagtctggtgtaatacaagatgctttaaagaagtcaagtaagggagaattgactacgcttatacatcagcttcaagaaaaggacaagttactcgctgctgtgaaggaagatgctgctgctacaaaggatcggtgtaagcagttaacccaggaaatgatgacagagaaagaaagaagcaatgtggttataacaaggatgaaagatcgaattggaacattagaaaaggaacataatgtatttcaaaacaaaatacatgtcagttatcaagagactcaacagatgcagatgaagtttcagcaagttcgtgagcagatggaggcagagatagctcacttgaagcaggaaaatggtatactgagagatgcagtcagcaacactacaaatcaactggaaagcaagcagtctgcagaactaaataaactacgccaggattatgctaggttggtgaatgagctgactgagaaaacaggaaagctacagcaagaggaagtccaaaagaagaatgctgagcaagcagctactcagttgaaggttcaactacaagaagctgagagaaggtgggaagaagttcagagctacatcaggaagagaacagcggaacatgaggcagcacagcaagatttacagagtaaatttgtggccaaagaaaatgaagtacagagtctgcatagtaagcttacagataccttggtatcaaaacaacagttggagcaaagactaatgcagttaatggaatcagagcagaaaagggtgaacaaagaagagtctctacaaatgcaggttcaggatattttggagcagaatgaggctttgaaagctcaaattcagcagttccattcccagatagcagcccagacctccgcttcagttctagcagaagaattacataaagtgattgcagaaaaggataagcagataaaacagactgaagattctttagcaagtgaacgtgatcgtttaacaagtaaagaagaggaacttaaggatatacagaatatgaatttcttattaaaagctgaagtgcagaaattacaggccctggcaaatgagcaggctgctgctgcacatgaattggagaagatgcaacaaagtgtttatgttaaagatgataaaataagattgctggaagagcaactacaacatgaaatttcaaacaaaatggaagaatttaagattctaaatgaccaaaacaaagcattaaaatcagaagttcagaagctacagactcttgtttctgaacagcctaataaggatgttgtggaacaaatggaaaaatgcattcaagaaaaagatgagaagttaaagactgtggaagaattacttgaaactggacttattcaggtggcaactaaagaagaggagctgaatgcaataagaacagaaaattcatctctgacaaaagaagttcaagacttaaaagctaagcaaaatgatcaggtttcttttgcctctctagttgaagaacttaagaaagtgatccatgagaaagatggaaagatcaagtctgtagaagagcttctggaggcagaacttctcaaagttgctaacaaggagaaaactgttcaggatttgaaacaggaaataaaggctctaaaagaagaaataggaaatgtccagcttgaaaaggctcaacagttatctatcacttccaaagttcaggagcttcagaacttattaaaaggaaaagaggaacagatgaataccatgaaggctgttttggaagagaaagagaaagacctagccaatacagggaagtggttacaggatcttcaagaagaaaatgaatctttaaaagcacatgttcaggaagtagcacaacataacttgaaagaggcctcttctgcatcacagtttgaagaacttgagattgtgttgaaagaaaaggaaaatgaattgaagaggttagaagccatgctaaaagagagggagagtgatctttctagcaaaacacagctgttacaggatgtacaagatgaaaacaaattgtttaagtcccaaattgagcagcttaaacaacaaaactaccaacaggcatcttcttttccccctcatgaagaattattaaaagtaatttcagaaagagagaaagaaataagtggtctctggaatgagttagattctttgaaggatgcagttgaacaccagaggaagaaaaacaatgaaaggcagcaacaggtggaagctgttgagttggaggctaaagaagttctcaaaaaattatttccaaaggtgtctgtcccttctaatttgagttatggtgaatggttgcatggatttgaaaaaaaggcaaaagaatgtatggctggaacttcagggtcagaggaggttaaggttctagagcacaagttgaaagaagctgatgaaatgcacacattgttacagctagagtgtgaaaaatacaaatccgtccttgcagaaacagaaggaattttacagaagctacagagaagtgttgagcaagaagaaaataaatggaaagttaaggtcgatgaatcacacaagactattaaacagatgcagtcatcatttacatcttcagaacaagagctagagcgattaagaagcgaaaataaggatattgaaaatctgagaagagaacgagaacatttggaaatggaactagaaaaggcagagatggaacgatctacctatgttacagaagtcagagagttgaaggcacagttaaatgaaacactcacaaaacttagaactgaacaaaatgaaagacagaaggtagctggtgatttgcataaggctcaacagtcactggagcttatccagtcaaaaatagtaaaagctgctggagacactactgttattgaaaatagtgatgtttccccagaaacggagtcttctgagaaggagacaatgtctgtaagtctaaatcagactgtaacacagttacagcagttgcttcaggcggtaaaccaacagctcacaaaggagaaagagcactaccaggtgttagagtgaagtaattgggaaactgttcatttgaggataaaaaaggcattgtattatattttgccaaattaaagccttatttatgttttcaccctttctactttgtcagaaacactgaacagagttttgtcttttctaatccttgttagactactgatttaaagaaggaaaaaaaaaagccaactctgtagacaccttcagagtttagttttataataaaaactgtttgaataattagacctttacattcctgaagataaacatgtaatcttttatcttattttgctcaataaaattgttcagaagatcaaagtggtaaagacaatgtaaaatttaacattttaatactgatgttgtacactgttttacttaacattttgggaagtaactgcctctgacttcaactcaagaaaacacttttttgttgctaatgtaatcggtttttgtaatggcgtcagcaaataaaaggatgcttattattcaaa

SEQ ID NO: 169 - DNA, 912 bp, Homo sapiens; identical to SEQ ID NO: 126

SEQ ID NO: 170 - DNA, 1514 bp, Homo sapiens
agttctcactgagacctgtcaccccgactcaacgtgagacgcaccgcccggactcaccatgcgtgaatgcatctcagtccacgtggggcaggcaggtgtccagatgggcaatgcctgctgggagctctattgcttggaacatgggattcagcctgatgggcagatgcccagtgacaagaccattggtggaggggacgactccttcaccaccttcttctgtgaaactggtgctggaaaacacgtaccccgggcagtttttgtggatctggagcctacggtcattgatgagatccgaaatggcccataccgacagctcttccacccagagcagctcatcactgggaaagaggatgctgccaacaactatgcccgtggtcactataccattggcaaggagatcattgacccagtgctggatcggatccgcaagctgtctgaccagtgcacaggacttcagggcttcctggtgttccacagctttggtgggggcactggctctggcttcacctcactcctgatggagcggctctctgttgactatggcaagaaatccaagctggaattctccatctacccagccccccaggtgtctacagccgtggtcgagccctacaactctatcctgaccacccacaccaccctggagcactcagactgtgccttcatggtggacaacgaagcaatctatgacatctgccgccgcaacctagacatcgagcgcccaacctacaccaacctcaatcgcctcattagccaaattgtctcctccatcacagcttctctgcgctttgacggggccctcaatgtggacctgacagagttccagaccaacctggtgccctaccctcgcatccacttccccctggccacctatgcaccagtcatctctgcagaaaaggcataccacgagcagctgtcggtggcagagatcaccaatgcctgctttgagcctgccaaccagatggtaaagtgtgatccccggcacggcaagtacatggcctgctgcctgctgtaccgtggagatgtggtgcccaaggatgtcaacgctgccattgccgccatcaagaccaagcgcagcattcagtttgtggactggtgccccacaggcttcaaggttggtatcaactaccagcctcccactgtggtgcctgggggtgacctggccaaggtgcagcgtgccgtgtgcatgctgagcaacacgaccgccatcgccgaggcctgggcccgcctggaccacaagttcgacctgatgtatgccaagagggcgtttgtgcactggtatgtgggtgagggcatggaggagggtgagttctccgaggcccgtgaggatatggctgccctggagaaggattatgaggaggtgggcatcgactcctatgaggacgaggatgagggagaagaataaagcagctgcctggagcctattcactatgtttattgcaaaatcctttcgaaataaacagtttccttgcacggttaaaaaaaaaaaaaaaaaaaaaaaaaaaaaaaaaaaa

SEQ ID NO: 171 - DNA, 2450 bp, Homo sapiens
aataggttagtttcagacaagcctgcttgccggagctcagcagacaccaggccttccgggcaggcctggcccaccgtgggcctcagagctgctgctggggcattcagaaccggctctccattggcattgggaccagagaccccgcaagtggcctgtttgcctggacatccacctgtacgtccccaggtttcgggaggcccaggggcgatgccagaccccgcggcgcacctgcccttcttctacggcagcatctcgcgtgccgaggccgaggagcacctgaagctggcgggcatggcggacgggctcttcctgctgcgccagtgcctgcgctcgctgggcggctatgtgctgtcgctcgtgcacgatgtgcgcttccaccactttcccatcgagcgccagctcaacggcacctacgccattgccggcggcaaagcgcactgtggaccggcagagctctgcgagttctactcgcgcgaccccgacgggctgccctgcaacctgcgcaagccgtgcaaccggccgtcgggcctcgagccgcagccgggggtcttcgactgcctgcgagacgccatggtgcgtgactacgtgcgccagacgtggaagctggagggcgaggccctggagcaggccatcatcagccaggccccgcaggtggagaagctcattgctacgacggcccacgagcggatgccctggtaccacagcagcctgacgcgtgaggaggccgagcgcaaactttactctggggcgcagaccgacggcaagttcctgctgaggccgcggaaggagcagggcacatacgccctgtccctcatctatgggaagacggtgtaccactacctcatcagccaagacaaggcgggcaagtactgcattcccgagggcaccaagtttgacacgctctggcagctggtggagtatctgaagctgaaggcggacgggctcatctactgcctgaaggaggcctgccccaacagcagtgccagcaacgcctcaggggctgctgctcccacactcccagcccacccatccacgttgactcatcctcagagacgaatcgacaccctcaactcagatggatacacccctgagccagcacgcataacgtccccagacaaaccgcggccgatgcccatggacacgagcgtgtatgagagcccctacagcgacccagaggagctcaaggacaagaagctcttcctgaagcgcgataacctcctcatagctgacattgaacttggctgcggcaactttggctcagtgcgccagggcgtgtaccgcatgcgcaagaagcagatcgacgtggccatcaaggtgctgaagcagggcacggagaaggcagacacggaagagatgatgcgcgaggcgcagatcatgcaccagctggacaacccctacatcgtgcggctcattggcgtctgccaggccgaggccctcatgctggtcatggagatggctgggggcgggccgctgcacaagttcctggtcggcaagagggaggagatccctgtgagcaatgtggccgagctgctgcaccaggtgtccatggggatgaagtacctggaggagaagaactttgtgcaccgtgacctggcggcccgcaacgtcctgctggttaaccggcactacgccaagatcagcgactttggcctctccaaagcactgggtgccgacgacagctactacactgcccgctcagcagggaagtggccgctcaagtggtacgcacccgaatgcatcaacttccgcaagttctccagccgcagcgatgtctggagctatggggtcaccatgtgggaggccttgtcctacggccagaagccctacaagaagatgaaagggccggaggtcatggccttcatcgagcagggcaagcggatggagtgcccaccagagtgtccacccgaactgtacgcactcatgagtgactgctggatctacaagtgggaggatcgccccgacttcctgaccgtggagcagcgcatgcgagcctgttactacagcctggccagcaaggtggaagggcccccaggcagcacacagaaggctgaggctgcctgtgcctgagctcccgctgcccaggggagccctccacgccggctcttccccaccctcagccccaccccaggtcctgcagtctggctgagccctgcttggttgtctccacacacagctgggctgtggtagggggtgtctcaggccacaccggccttgcattgcctgcctggccccctgtcctctctggctggggagcagggaggtccgggagggtgcggctgtgcagcctgtcctgggctggtggctcccggagggccctgagctgagggcattgcttacacggatgccttcccctgggccctgacattggagcctgggcatcctcaggtggtcaggcgtagatcaccagaataaacccagcttccctcttgaaaaaaaaaaaaaaaaaaaaa

SEQ ID NO: 172 - DNA, 1403 bp, Homo sapiens
agttacctctcccctttcacgtagttttcatttgtggtgagattctctcccaggccacaagacatttcctgctcggaaccttgtttactaatttccactgcttttaaggccctgcactgaaaatgcaagctcaggcgccggtggtcgttgtgacccaacctggagtcggtcccggtccggccccccagaactccaactggcagacaggcatgtgtgactgtttcagcgactgcggagtctgtctctgtggcacattttgtttcccgtgccttgggtgtcaagttgcagctgatatgaatgaatgctgtctgtgtggaacaagcgtcgcaatgaggactctctacaggacccgatatggcatccctggatctatttgtgatgactatatggcaactctttgctgtcctcattgtactctttgccaaatcaagagagatatcaacagaaggagagccatgcgtactttctaaaaactgatggtgaaaagctcttaccgaagcaacaaaattcagcagacacctcttcagcttgagttcttcaccatcttttgcaactgaaatatgatggatatgcttaagtacaactgatggcatgaaaaaaatcaaatttttgatttattataaatgaatgttgtccctgaacttagctaaatggtgcaacttagtttctccttgctttcatattatcgaattcgaatttcctggcttataaactttttaaattacatttgaaatataaaccaaatgaaatattttactgataagattcttcatgcttctttgctctccttaaaatgtctttttcactagttagttccaagggtcagtctcataattttgttcttatactttgatttcctttttctttttttttttttttaatagagttgggggatctttctttctttttttttttttttttttgagatagagtctcgctctgttgcccaggctggagtgcagtggcgtgatctcagctcactgcaacctccacctcctggatacaagcgattctgctgcctcagtctcccgagtagctgggattacaggttcccgccaccatgcccagctaatttttgtatttttagtagagacggggtttcaccatcttggtcaggctggtctcgaactcctgacctcgtgatccacctgcctcggcatcacaaaatgctgggattacaggcatgagccaccgcgtccagcctagagttgggggtctttctatgttgcccaggctggtcttgaactccgggcctctagcaagcctctcatctcagcctcccaaggtgctggaattacaggtgtgagccactgcaccatactttggtttcttagcaggagattttggttcacagtaacccagctctctttcatctaagaactttagatgagaaaaaaaaaaaa

SEQ ID NO: 173 - DNA, 1072 bp, Homo sapiens
ctcccagggagggcagcgcaagacagcaagtcatctccatttcctggcccactttcaaaatggcagccggaaggaaatttgtgattagaagccgcgctgttcttatttaagagcgttagcgcaacttccggtattgttgcaagatggccgcgcccagtgatggattcaagcctcgtgaacgaagcggtggggagcaggcacaggactgggatgctctgccacccaagcggccccgactaggggcaggaaacaagatcggaggccgtaggcttattgtggtgctggaaggggccagtctggagacagtcaaggtagggaagacatatgagctactcaactgtgacaagcacaagtctatattgttgaagaatggacgggaccctggggaagcgcggccagatatcacccaccagagtttgctgatgctgatggatagtcccctgaaccgagctggcttgctacaggtttatatccatacacagaagaatgttctgattgaagtgaatccccagacccgaattcccagaacctttgaccgcttttgtggcctcatggttcaacttttacacaagctcagtgttcgagcagctgatggcccccagaagcttttgaaggtaattaagaatccagtatcagatcactttccagttggatgtatgaaagttggcacttctttttccatcccggttgtcagtgatgtgcgtgagctggtgcccagcagtgatcctattgtttttgtggtaggggcctttgcccatggcaaggtcagtgtggagtatacagagaagatggtgtccatcagtaactaccccctttctgctgccctcacctgtgcaaaacttaccacagcctttgaggaagtatggggggtcatttgacagtagtagaacctgttctgaaaccagaaactgttgatgtcacatcctttgaccctggtctgagctgactgctggaagatgatctttctgcactgagactgtggagtttggggaagccaaggctgtacatttgctatttgtttatcctatgaatactgttcttgcaaacctggttgttttggggttcctaaagt

SEQ ID NO: 174 - DNA, 3018 bp, Homo sapiens
gcccggagagccgcatctattggcagctttgttattgatcagaaactgctcgccgccgacttggcttccagtctggctgcgggcaacccttgagttttcgcctctgtcctgtcccccgaactgacaggtgctcccagcaacttgctggggacttctcgccgctcccccgcgtccccaccccctcattcctccctcgccttcacccccacccccaccacttcgccacagctcaggatttgtttaaaccttgggaaactggttcaggtccaggttttgctttgatccttttcaaaaactggagacacagaagagggctctaggaaaaagttttggatgggattatgtggaaactaccctgcgattctctgctgccagagcaggctcggcgcttccaccccagtgcagccttcccctggcggtggtgaaagagactcgggagtcgctgcttccaaagtgcccgccgtgagtgagctctcaccccagtcagccaaatgagcctcttcgggcttctcctgctgacatctgccctggccggccagagacaggggactcaggcggaatccaacctgagtagtaaattccagttttccagcaacaaggaacagaacggagtacaagatcctcagcatgagagaattattactgtgtctactaatggaagtattcacagcccaaggtttcctcatacttatccaagaaatacggtcttggtatggagattagtagcagtagaggaaaatgtatggatacaacttacgtttgatgaaagatttgggcttgaagacccagaagatgacatatgcaagtatgattttgtagaagttgaggaacccagtgatggaactatattagggcgctggtgtggttctggtactgtaccaggaaaacagatttctaaaggaaatcaaattaggataagatttgtatctgatgaatattttccttctgaaccagggttctgcatccactacaacattgtcatgccacaattcacagaagctgtgagtccttcagtgctacccccttcagctttgccactggacctgcttaataatgctataactgcctttagtaccttggaagaccttattcgatatcttgaaccagagagatggcagttggacttagaagatctatataggccaacttggcaacttcttggcaaggcttttgtttttggaagaaaatccagagtggtggatctgaaccttctaacagaggaggtaagattatacagctgcacacctcgtaacttctcagtgtccataagggaagaactaaagagaaccgataccattttctggccaggttgtctcctggttaaacgctgtggtgggaactgtgcctgttgtctccacaattgcaatgaatgtcaatgtgtcccaagcaaagttactaaaaaataccacgaggtccttcagttgagaccaaagaccggtgtcaggggattgcacaaatcactcaccgacgtggccctggagcaccatgaggagtgtgactgtgtgtgcagagggagcacaggaggatagccgcatcaccaccagcagctcttgcccagagctgtgcagtgcagtggctgattctattagagaacgtatgcgttatctccatccttaatctcagttgtttgcttcaaggacctttcatcttcaggatttacagtgcattctgaaagaggagacatcaaacagaattaggagttgtgcaacagctcttttgagaggaggcctaaaggacaggagaaaaggtcttcaatcgtggaaagaaaattaaatgttgtattaaatagatcaccagctagtttcagagttaccatgtacgtattccactagctgggttctgtatttcagttctttcgatacggcttagggtaatgtcagtacaggaaaaaaactgtgcaagtgagcacctgattccgttgccttgcttaactctaaagctccatgtcctgggcctaaaatcgtataaaatctggatttttttttttttttttgctcatattcacatatgtaaaccagaacattctatgtactacaaacctggtttttaaaaaggaactatgttgctatgaattaaacttgtgtcgtgctgataggacagactggatttttcatatttcttattaaaatttctgccatttagaagaagagaactacattcatggtttggaagagataaacctgaaaagaagagtggccttatcttcactttatcgataagtcagtttatttgtttcattgtgtacatttttatattctccttttgacattataactgttggcttttctaatcttgttaaatatatctatttttaccaaaggtatttaatattcttttttatgacaacttagatcaactatttttagcttggtaaatttttctaaacacaattgttatagccagaggaacaaagatgatataaaatattgttgctctgacaaaaatacatgtatttcattctcgtatggtgctagagttagattaatctgcattttaaaaaactgaattggaatagaattggtaagttgcaaagactttttgaaaataattaaattatcatatcttccattcctgttattggagatgaaaataaaaagcaacttatgaaagtagacattcagatccagccattactaacctattccttttttggggaaatctgagcctagctcagaaaaacataaagcaccttgaaaaagacttggcagcttcctgataaagcgtgctgtgctgtgcagtaggaacacatcctatttattgtgatgttgtggttttattatcttaaactctgttccatacacttgtataaatacatggatatttttatgtacagaagtatgtctcttaaccagttcacttattgtactctggcaatttaaaagaaaatcagtaaaatattttgcttgtaaaatgcttaatatcgtgcctaggttatgtggtgactatttgaatcaaaaatgtattgaatcatcaaataaaagaatgtggctattttggggagaaaattaaaaaaaaaaa

SEQ ID NO: 175 - DNA, 6960 bp, Homo sapiens
acttccgccccctccccctgccattggaactagctgagccgaactagttgcggccaccgagcagccggctctcggcacctcctcctccgcctccctgtctcctgttccattcgcctttcctcttctttcctggcccacgccgctccgaggcctcgcgaccgccgagcctgcagcctgccccgcggccaacatgagcttcttgtttggtagtcgctcttctaaaacttttaaaccaaagaagaacattccagagggttctcaccagtatgagctcttaaaacacgcagaagccacacttggcagtggcaaccttcggatggctgtcatgcttcctgaaggggaagatctcaatgaatgggttgcagttaacactgtggatttcttcaatcagatcaacatgctttatggaactatcacagacttctgtacagaagagagttgtccagtgatgtcagctggcccaaaatatgagtatcattgggcagatggaacgaacataaagaaacctattaagtgctctgcaccaaagtatattgattacttgatgacttgggttcaggaccagttggatgatgagacgttatttccatcaaaaattggtgtcccgttcccaaagaatttcatgtctgtggcaaaaactatactcaaacgcctctttagggtttatgctcacatttatcatcagcattttgaccctgtgatccagcttcaggaggaagcacatctaaatacatctttcaagcactttattttttttgtccaggaattcaaccttattgatagaagagaacttgcaccactccaagaactgattgaaaaactcacctcaaaagacagataaaaggatgcagagctgtgcaaattgttcctcaaatgaagcagtgtggagtgtattggggattttgttatattttgtttttatctggattgtttttgtcctaggtttgggggcgggggcttgtttgggttcctttttctttattctgattatgtgaaaccatattctattgctaggggaagccaagaaccattctctatacacttgataagggtaaatttatcttagtgtttttaaacttggttttggttacttgaggagttttttaataatattgtgtgctgcaagaaagtgcttgttgattgaactgccgatggattggtttctgtgtggtataaattgtggcccatttatgaagtccccaaaagagttatgtttttaagtgccttggcaggctcacttctgaggtgcaaaacatagatatagaactgaacagggcttgaaacaatattaggattactacccagggcacttactggtgcatgttgtaacatatctatgataaaagccatagtttacctaaaatggtgatttccagcctttactgctttgaagaaacagaatttgtaaaggtatgcatgtagaacataaaaaatatttcttaattattttttatattgatggtaatatattacgttcaacaatgcttaaagctctacaagcaggtcttttcccacctcttgatatctgtgatactgaaacttgaggatgttgaaatgtattacattttggcttctttctacatgttaactgcactgtagatgtaaaaattcaggttatatataggattgccatcttcagaggtgatgctgaactgtgaggtttcctagtaattgccaaatgagccgtaagtctgcagaattcccttctactttgaagagaaggggataggaatgtatatttggctgggggcatggagatgttcgtatgtatgaggagttagggatggggagtcaagttctagaaagttttgtctgaaaacctttgaatagaatggcatgaagattttaatcaattacttataaacaaagtcttagagacttccttttaggaatcaacttccatgagaagttaaaaataaattattaattttaggtacagacattaaacatggaatttaaggactgttgggggaaattgatcacttcttagcatttccattcagtgaatggagctgatgtttgcctgtcattttaagatgataccataccttctttggttattataggtccagtttgaagcattctgacttctggtttttccaccctgaaaggaaatgtttttctttgcagcagtattagataatgaaaaatgctaattcagtagttattaacttctaaattttattcgccatgactttctagtgaattattaccataaataacaatttcagaaacttagtttttagaataaatattaatttttccacttcagttttattctagaaaataccctttttagaaatccagttttagttttgtcattttcgataaatctttcttcagttagaaatatatatccttccttcagttgaaacatatacctttttcacatctaggaagaaatgcttgctctgaaatagtatagattaaaaacactcagtagaaaagaatctaaaattaaatgaatttgttttgccattaaagtagagcagtgatacaatttaatgccattacaattatgttgactagaaactgcctttttctccacttcatttctagcaattatttaccaagtaccaacagtagaagtaacaggaaagcctggcagagttaaatatcttggacatttattggtaaagcttatttataaactgcagtcagagctagttaatttccttaaatctttttgtattcagatagataatatgaatcattatgggttgattcagaaataaaatttgtgaggtgattttgaatcttgtccatataggaaaatgaagcacagaattactcagtcttccatattgtatttgacttcatatcaatctagtaaaaaaggagttgcaatagccaagtatagagagaatagtgaaaaattaatcttgccctttcaagccttatacagtagtacactgtacttgtttttagtagtaagacctactttcccactatatgtagatagtttgttttcactgtgccagaatctcaggtgcctgcttagagtatttctttaatcacagtcactgggaagtaaggagatgtatatatgtgtatatatggtaacaaagcatagcagttctctaggggagaggcctggcattgcacatggtgttacatggctacaagtaaggaaaaaatcagaaagtgaaagaactgatgtaataaaaggttgatttggttggttcccatgaaagttagtaagatgcccttttaaatataaggatcagtgctttgttctgcagcagagtttgctgataaatgtctgttggattctttttggatttctttaattaatttgtaagtaaccaagataattattttcccccttgctctctatattaatacgtagctataaagcaacagttggttttcttatcctttgataaaagcatcccataaaatataaagtagtaagttaacatagtattattgtcacacacaatgctttttttggttaaatgttgatacgaagcaatgttttggaattactttaattgatggagtagtggtggtagagagaaattaataacaaaaagagtgaaaatattttaattagcagtagatggtgctactggctttcatttgctgacttgattattccctttctcttaaaaaccatggcattagactgcactaaattaacaagcatgttagttgctggtagaggttttggaggttaatttaccttaaattggaagacttttaattgcagtctctttctaccttccctctgttagtcatttgtaaattctaaatggtcaccataaaatgtattaggtaggagaagatacgttttatgtataatatatctcagactgagttactgcctgtcttatcaggatggataaaacactacagtctcttatcaggaaatagagatgatgtggatatttatatattacatatataaccaccagactccattttatatattagcattttccttgcttatgggaaaatagcaaaacaacatttcatttatacttttgtttacccctctctgagacaggttttgataaccactgaaatggtagaatatgtgagatacaaatattgagttgtagaactttctttttaaggtgaataagtcatgccttaacatccaaataagagttcatcttcagagtggttcttttgggagcactgtttattccagctatactgcaaaagtataatgtttttggaactgttctagagcataccatgaaaagcagtttgttattatgcaggaaaatcagtttcatcattttagttacactaaacacttttggcagcttaatatgacctttttaaattttttttattttttttatttttatttctttaagatggagtcttgctctgttgcccgggctggagtacaatggcatgatctcagctcactgcaacctccacctcctgggttcaagcatttctcctgcctcagcctcccaagtagctgggattacaggcagcaccacacctggctaattttcatatttttagtagagatggggtttcaacatattggccaggctggtctcaaactcctgacctcaagtgatccgccctccccagcctcccaaagtgctgggattacaggtgtgagccaccacagccagccagtatgacctatcttaatcatcagctcaactgtaatttaaatttggctgttctctggagctaaaccattagggaagttcaaaggaatgtgccatgatttccgaatttgcacaagagaatgttttaagcattggtagcataattgaataaaagaatagtttcctgatgtcactattttgaagtggaaattatcacttggatgtggaggttttactttttaaaaacattcagcttaattaccttaccttaattaccttagttagatatactaatggaaaaaaaccaagtcctttctctagaacttgttttctatttttgttccttttcatgaaaacttctcaatttaattttaactactgtaggatagtattgattgaatggatactatggaaaagtggatccaatatttaagatagaagtagtttaaggagacaacagcctttactgccatttttttttaaatgttttcactcagatgaacaatttgactttaataaaagactggagatttttgtacaaagaaataggaataagtttcatatactaattatgctgagttttaagcctacatatcacaaaatatttagaattgtataaccttttcatatatttataacttttaatgtctttttaaaagatgtgggaccaaaaatatatttataatttggaaatgtgactgcataccaataagaaaacttaccttattttgaaatttatctgggatattaaagaatctaccaattcttaaaaacacagatttatactttaagcttattttaaaattaaagaatatataccaattcttagaaacactttaaggactactcttaaataacttaaatatcagagttttgttgtaatattaaaatttaccgtggaaatcactgttgttcagctatcaccttaattgtgtatgatatgataaatgtttagcagtaaagctatcttaagatttaatggaaaagtttaatttgaagatgtaacaaaaattctgaccacagttgattctgaatttttaaggctttcctaataggctgatcacagagaataatccattttgaaggtataaaactgcactgtatgtctgtcacttgtagctgaactgattcacattttgacaaaagagagaaaatacaaaaatgagttttgcaaatgtaataactttttctgcatatagaactaaataattgaaaaatatgggctatagttctcaaaggtagatagtaaaatcactggctttttccagctgtatgtttttccactgtgcgtgtacacacacactggaaaataattaggctgattttgcaggtcttcattgttagagattctgaagtatttactgtcaattcataggtttcagtttatttaggaaattagtgtttgacagctttttttaaattatttcactgaagctgagattattagtgatacaaagttaaaatttcaatatttaatttctctatatattattaatattaaattgttttttacttataaattcatgttctcatctgatttaatattaaatttgtataggtgggcgtttcttaccattttgcacaagtttttgtttttctgaaatacttaattgtgcaggttgtaaaaaagattagtgcattttcattttaaggatgctttgctccttaaattgttcgacagaaatgactttttagggaaagtagtttttttggagctactaacttgtatttattattgtacatgcataaccagggtggtgagggcactaatcttgtaggaaacacttacttgatgttttatttgaacttttcctataggtttaacttttactgcatagaattaacactaggaacagtgtcatgaaatctgggttgaaggagaatacagtatatatgagaacacttaaagttcaaatagaaatcatttctgaagacaaaagcagaggaatattgtcagtgccaagtaatggaagaataagggcggcatttacactgtgcaagtattgagaagagtgcataaagacagggaactactctcatggagacagtttctctcttataatcaagtaactagaaggggaaaaatcatctaagttatgaaatccaacataggcgctatattacaaactgtgccggattatgcaaattgtagttgttactgatcaaagtttaattgcttcatttttgtttaaaaagggatactgatgtcagaaaatctgtaatatgttttattcaaaagatgtaaataatgtatacagacttgtatgtgatgggatgggaaatatttaaattctaggtgtttttttttttttaaagaagaaactcaatgtttataagaaaaaaatgaataaatagttacgtttggccatgaatcctgaaa

SEQ ID NO: 176 - DNA, 1651 bp, Homo sapiens
acgactgcgtgggtgagtcgtctataaaaactcatctctgcgcgtctcttcgccacattcgcttcctgctttcggtgtgtctgttgtgtcttgttgcgggcaccgcagtcgccgtgaagatggcgtctaccagccgtttggatgctcttccaagagtcacatgtccaaaccatccagatgcgattttagtggaggactacagagccggtgatatgatctgtcctgaatgtggcttggttgtaggtgaccgggttattgatgtgggatctgaatggcgaactttcagcaatgacaaagcaacaaaagatccatctcgagttggagattctcagaatcctcttctgagtgatggagatttgtctaccatgattggcaagggcacaggagctgcaagttttgacgaatttggcaattctaagtaccagaatcggagaacaatgagcagttctgatcgggcaatgatgaatgcattcaaagaaatcactaccatggcagacagaatcaatctacctcgaaatatagttgatcgaacaaataatttattcaagcaagtatatgaacagaagagcctgaagggaagagctaatgatgctatagcttctgcttgtctctatattgcctgtagacaagaaggggttcctaggacatttaaagaaatatgtgccgtatcacgaatttctaagaaagaaattggtcggtgttttaaacttattttgaaagcgctagaaaccagtgtggatttgattacaactggggacttcatgtccaggttctgttccaacctttgtcttcctaaacaagtacagatggcagctacacatatagcccgtaaagctgtggaattggacttggttcctgggaggagccccatctctgtggcagcggcagctatttacatggcctcacaggcatcagctgaaaagaggacccaaaaagaaattggagatattgctggtgttgctgatgttacaatcagacagtcctatagactgatctatcctcgagccccagatctgtttcctacagacttcaaatttgacaccccagtggacaaactaccacagctataaattgaggcagctaacgtcaaattcttgaatacaaaactttgcctgttgtacatagcctatacaaaatgctgggttgagcctttcatgaggaaaaacaaaagacatggtacgcattccagggctgaatactattgcttggcattctgtatgtatatactagtgaaacatatttaatgatttaaatttcttatcaaatttcttttgtagcaatctaggaaactgtattttggaagatatttgaaattatgtaattcttgaataaaacatttttcaaaactcaagtttttgttatatgttacatgtaacttatgatacataattacaaataatgcaaatcattgcagctaataaagctgatagactttatttccattacttatatatacatagttttttattttaataaatttatggaaagagcaaaagcttttgagaaccattgttaacatcaacatcatagtttccagtttgaaaggatgtgtatgtgagatttattatgtatattattaaacaagaagtgatgagcttgggccttgaaaggcaccagcttgagagacattaaaatgttctaagtaaaaaaa

SEQ ID NO: 177 - DNA, 3807 bp, Homo sapiens
taaagtcatcaaaacaacgttatatcctgtgtgaaatgctgcagtcaggatgccttgtggtttgagtgccttgatcatgtgccctaaggggatggtggcggtggtggtggccgtggatgacggagactctcaggccttggcaggtgcgtctttcagttcccctcacacttcgggttcctcggggaggaggggctggaaccctagcccatcgtcaggacaaagatgctcaggctgctcttggctctcaacttattcccttcaattcaagtaacaggaaacaagattttggtgaagcagtcgcccatgcttgtagcgtacgacaatgcggtcaaccttagctgcaagtattcctacaatctcttctcaagggagttccgggcatcccttcacaaaggactggatagtgctgtggaagtctgtgttgtatatgggaattactcccagcagcttcaggtttactcaaaaacggggttcaactgtgatgggaaattgggcaatgaatcagtgacattctacctccagaatttgtatgttaaccaaacagatatttacttctgcaaaattgaagttatgtatcctcctccttacctagacaatgagaagagcaatggaaccattatccatgtgaaagggaaacacctttgtccaagtcccctatttcccggaccttctaagcccttttgggtgctggtggtggttggtggagtcctggcttgctatagcttgctagtaacagtggcctttattattttctgggtgaggagtaagaggagcaggctcctgcacagtgactacatgaacatgactccccgccgccccgggcccacccgcaagcattaccagccctatgccccaccacgcgacttcgcagcctatcgctcctgacacggacgcctatccagaagccagccggctggcagcccccatctgctcaatatcactgctctggataggaaatgaccgccatctccagccggccacctcaggcccctgttgggccaccaatgccaatttttctcgagtgactagaccaaatatcaagatcattttgagactctgaaatgaagtaaaagagatttcctgtgacaggccaagtcttacagtgccatggcccacattccaacttaccatgtacttagtgacttgactgagaagttagggtagaaaacaaaaagggagtggattctgggagcctcttccctttctcactcacctgcacatctcagtcaagcaaagtgtggtatccacagacattttagttgcagaagaaaggctaggaaatcattccttttggttaaatgggtgtttaatcttttggttagtgggttaaacggggtaagttagagtagggggagggataggaagacatatttaaaaaccattaaaacactgtctcccactcatgaaatgagccacgtagttcctatttaatgctgttttcctttagtttagaaatacatagacattgtcttttatgaattctgatcatatttagtcattttgaccaaatgagggatttggtcaaatgagggattccctcaaagcaatatcaggtaaaccaagttgctttcctcactccctgtcatgagacttcagtgttaatgttcacaatatactttcgaaagaataaaatagttctcctacatgaagaaagaatatgtcaggaaataaggtcactttatgtcaaaattatttgagtactatgggacctggcgcagtggctcatgcttgtaatcccagcactttgggaggccgaggtgggcagatcacttgagatcaggaccagcctggtcaagatggtgaaactccgtctgtactaaaaatacaaaatttagcttggcctggtggcaggcacctgtaatcccagctgcccaagaggctgaggcatgagaatcgcttgaacctggcaggcggaggttgcagtgagccgagatagtgccacagctctccagcctgggcgacagagtgagactccatctcaaacaacaacaacaacaacaacaacaacaacaaaccacaaaattatttgagtactgtgaaggattatttgtctaacagttcattccaatcagaccaggtaggagctttcctgtttcatatgtttcagggttgcacagttggtctctttaatgtcggtgtggagatccaaagtgggttgtggaaagagcgtccataggagaagtgagaatactgtgaaaaagggatgttagcattcattagagtatgaggatgagtcccaagaaggttctttggaaggaggacgaatagaatggagtaatgaaattcttgccatgtgctgaggagatagccagcattaggtgacaatcttccagaagtggtcaggcagaaggtgccctggtgagagctcctttacagggactttatgtggtttagggctcagagctccaaaactctgggctcagctgctcctgtaccttggaggtccattcacatgggaaagtattttggaatgtgtcttttgaagagagcatcagagttcttaagggactgggtaaggcctgaccctgaaatgaccatggatatttttctacctacagtttgagtcaactagaatatgcctggggaccttgaagaatggcccttcagtggccctcaccatttgttcatgcttcagttaattcaggtgttgaaggagcttaggttttagaggcacgtagacttggttcaagtctcgttagtagttgaatagcctcaggcaagtcactgcccacctaagatgatggttcttcaactataaaatggagataatggttacaaatgtctcttcctatagtataatctccataagggcatggcccaagtctgtctttgactctgcctatccctgacatttagtagcatgcccgacatacaatgttagctattggtattattgccatatagataaattatgtataaaaattaaactgggcaatagcctaagaaggggggaatattgtaacacaaatttaaacccactacgcagggatgaggtgctataatatgaggaccttttaacttccatcattttcctgtttcttgaaatagtttatcttgtaatgaaatataaggcacctcccacttttatgtatagaaagaggtcttttaatttttttttaatgtgagaaggaagggaggagtaggaatcttgagattccagatcgaaaatactgtactttggttgatttttaagtgggcttccattccatggatttaatcagtcccaagaagatcaaactcagcagtacttgggtgctgaagaactgttggatttaccctggcacgtgtgccacttgccagcttcttgggcacacagagttcttcaatccaagttatcagattgtatttgaaaatgacagagctggagagttttttgaaatggcagtggcaaataaataaatacttttttttaaatggaaagacttgatctatggtaataaatgattttgttttctgactggaaaaataggcctactaaagatgaatcacacttgagatgtttcttactcactctgcacagaaacaaagaagaaatgttatacagggaagtccgttttcactattagtatgaaccaagaaatggttcaaaaacagtggtaggagcaatgctttcatagtttcagatatggtagttatgaagaaaacaatgtcatttgctgctattattgtaagagtcttataattaatggtactcctataatttttgattgtgagctcacctatttgggttaagcatgccaatttaaagagaccaagtgtatgtacattatgttctacatattcagtgataaaattactaaactacta

SEQ ID NO: 178 - DNA, 5584 bp, Homo sapiens
acggatccgcgttcagaaaggcgtgcacttcctacgcctgatcccccgcatcgcaacctcgcagcttccccggcgtgcagcgctcatttaccaattcccttcctgggagttgcggcttccctcgctcggccccactcccgtttaccctttccccagctcccgccttagccaggggcttccccgcctgccgctagggctcgggccgaagcgccgctcagcgccagcctgccgctccccgggctccactttcactttcggtcctgggggagctaggccggcggcagtggtggtggcggcggcgcaagggtgagggcggccccagaaccccaggtaggtagagcaagaagatggtgtttctgcccctcaaatggtcccttgcaaccatgtcatttctactttcctcactgttggctctcttaactgtgtccactccttcatggtgtcagagcactgaagcatctccaaaacgtagtgatgggacaccatttccttggaataaaatacgacttcctgagtacgtcatcccagttcattatgatctcttgatccatgcaaaccttaccacgctgaccttctggggaaccacgaaagtagaaatcacagccagtcagcccaccagcaccatcatcctgcatagtcaccacctgcagatatctagggccaccctcaggaagggagctggagagaggctatcggaagaacccctgcaggtcctggaacacccccgtcaggagcaaattgcactgctggctcccgagcccctccttgtcgggctcccgtacacagttgtcattcactatgctggcaatctttcggagactttccacggattttacaaaagcacctacagaaccaaggaaggggaactgaggatactagcatcaacacaatttgaacccactgcagctagaatggcctttccctgctttgatgaacctgccttcaaagcaagtttctcaatcaaaattagaagagagccaaggcacctagccatctccaatatgccattggtgaaatctgtgactgttgctgaaggactcatagaagaccattttgatgtcactgtgaagatgagcacctatctggtggccttcatcatttcagattttgagtctgtcagcaagataaccaagagtggagtcaaggtttctgtttatgctgtgccagacaagataaatcaagcagattatgcactggatgctgcggtgactcttctagaattttatgaggattatttcagcataccgtatcccctacccaaacaagatcttgctgctattcccgactttcagtctggtgctatggaaaactggggactgacaacatatagagaatctgctctgttgtttgatgcagaaaagtcttctgcatcaagtaagcttggcatcacaatgactgtggcccatgaactggctcaccagtggtttgggaacctggtcactatggaatggtggaatgatctttggctaaatgaaggatttgccaaatttatggagtttgtgtctgtcagtgtgacccatcctgaactgaaagttggagattatttctttggcaaatgttttgacgcaatggaggtagatgctttaaattcctcacaccctgtgtctacacctgtggaaaatcctgctcagatccgggagatgtttgatgatgtttcttatgataagggagcttgtattctgaatatgctaagggagtatcttagtgctgacgcatttaaaagtggtattgtacagtatctccagaagcatagctataaaaatacaaaaaacgaggacctgtgggatagtatggcaagtatttgccctacagatggtgtaaaagggatggatggcttttgctctagaagtcaacattcatcttcatcctcacattggcatcaggaaggggtggatgtgaaaaccatgatgaacacttggacactgcagaagggttttcccctaataaccatcacagtgagggggaggaatgtacacatgaagcaagagcactacatgaagggctctgacggcgccccggacactgggtacctgtggcatgttccattgacattcatcaccagcaaatccgacatggtccatcgatttttgctaaaaacaaaaacagatgtgctcatcctcccagaagaggtggaatggatcaaatttaatgtgggcatgaatggctattacattgtgcattacgaggatgatggatgggactctttgactggccttttaaaaggaacacacacagcagtcagcagtaatgatcgggcgagtctcattaacaatgcatttcagctcgtcagcattgggaagctgtccattgaaaaggccttggatttatccctgtacttgaaacatgaaactgaaattatgcccgtgtttcaaggtttgaatgagctgattcctatgtataagttaatggagaaaagagatatgaatgaagtggaaactcaattcaaggccttcctcatcaggctgctaagggacctcattgataagcagacatggacagacgagggctcagtctcagagcgaatgctgcggagtcaactactactcctcgcctgtgtgcacaactatcagccgtgcgtacagagggcagaaggctatttcagaaagtggaaggaatccaatggaaacttgagcctgcctgtcgacgtgaccttggcagtgtttgctgtgggggcccagagcacagaaggctgggattttctttatagtaaatatcagttttctttgtccagtactgagaaaagccaaattgaatttgccctctgcagaacccaaaataaggaaaagcttcaatggctactagatgaaagctttaagggagataaaataaaaactcaggagtttccacaaattcttacactcattggcaggaacccagtaggatacccactggcctggcaatttctgaggaaaaactggaacaaacttgtacaaaagtttgaacttggctcatcttccatagcccacatggtaatgggtacaacaaatcaattctccacaagaacacggcttgaagaggtaaaaggattcttcagctctttgaaagaaaatggttctcagctccgttgtgtccaacagacaattgaaaccattgaagaaaacatcggttggatggataagaattttgataaaatcagagtgtggctgcaaagtgaaaagcttgaacatgatcctgaagctgacgcaacaggatgaaaatccatcagaatctcagactacagcactaaatatgctttgatgctacatcaaacggaatggaagcatagctgacttcgctaaagttacttcatctccatctagcaaatgaggcactgttctcaaccaaaggagatggggatctggtttagggcaatccctttataatttgatgtgctgtggtctccttggtaatgtataatttggtattgcacaggtgattagtcaaggaagtctggaaaagctttggtcccacagccttgcctcacagcatgtaaataattaaaacaatattgatgctgaggttcttctactgctagtatgaaagtgacaaatttttactggtgtgaattgggaagaaaacaatgctattccatgacgtttgtaaaatgtttgtaaaagctcaaacatgacgattccataaaataaacttgaggttaaataatgggtagtaaattatagaatgtataagaaaaaatataaaggagaaaatcaattatcaggaaagctaaagaacttttcaaatctagtaatttgaatatagacacaatgcactttattgcactttcaattcttataaagcaacaataatattaaggtccttgactatgtgtacaatgttttcacatatatagtttcatttaatcatttcaaagttaatctctgccatctcgctaaatcatcagtctcggctcttctgaaatagaaggtgcctgatcttcctaataattctgcctattttcatttgctttaaacaggcgccctattttctttctagttgtggctgcgcaaaaacatttatctcccaaataagatgtgctgcttaccgaggtatcacggggtggggctccagcttgggtcgttgaagctggggtttgggaaaccacttcagagatggcagcagcaagtttagcatcttcaaatttcttttattgaaaaaaattttattagtaacatgttgtatataaaattatgagcacaatgccatcacttaactataactcttaaagatagcttaatgactgtttattctcttgaccaaatagactcataataacatataattttaaaagaaatttaaattctttcttctctattgtattattttatacaatttgctatttctatttccttctcatattgattattctaaatactatgcaataatataacttagagttccacggtttgtttacacatttcctgttgtacatttaggttattcaaagttttcagctcttttaaaattgctctgaataagttctagtgagtgagttatggtgctggctatattttgctaaactgccctctcaaatgttgctaggaattcatactgcgaaaagcaatgaataagcatgcctgttttcccatggccttgcttgccagaatttgacttttattatgataatcagtgtaaaatgatatactactattgcttgtatattgtggtatacggtgtcaggtttcagggttttttttcaacgttaaatattctagaaactttctgaaataatttctgtttaaaaatattgaatatttgcttcatttcaaatactcccttttgacaaaaaaacttaggtataactgttgatgaaaaaccagaaaaaagtccagaactctttggtgactccaactatggatagcttattttgaaaaaggagaattgcaaattttaccaaaagatggagaaaagcacattaaaaagataccaacattcagaaattcatttcagcatgttattattggaaattatttaaactaatttagataactataagatacttattgtccatttataccctgtaaagccgttttagaatgtaatattttaggtaatccaaaatgtactaaattaaattcatttttagttatgagaaatctttgcttatatgacaaatgaaaagaataacaagttgtcaaatgaaaagaatgacattgaaacatttgtattgtctcttcttaaactatcttattgacttattatttaagccttttaatactaagtatgaaacaacctatggtctggaaatttgtatcgcaaagctatatgtgcatatgttatttaattcatctaatgctacacaaaagcataaaataatgatttttcactctctttaaaaatactaaatcatttatgtccatttctcaattttttcattgatctatgctttgagtttgctttctcaacattattgtattttccacttattattactgtataacatatgctagtgtttagttggattaatcttacctaaaagtactgaaaaatgctttttagtactttttcatattttatacatttattttccgaatgtatcattgaataattttattgagttataaaagtatcttattgctatttaataaaaaattaacacataaaatga

SEQ ID NO: 179 - DNA, 3580 bp, Homo sapiens
ctccctccttccttccctcccttcctccctctctccctccctcccagctcctgcaccaggaaacggcccggatcccggcagcggcctgacccggctccacgctggccaggaggatgaaaggccccagctgggggctccttgccaccagtgctgtgtcttaagagctgccatcccggctggccgcccggatggcgaccccagcctcggccccagacacacgggctctggtggcagactttgtaggttataagctgaggcagaagggttatgtctgtggagctggccccggggagggcccagcagctgacccgctgcaccaagccatgcgggcagctggagatgagttcgagacccgcttccggcgcaccttctctgatctggcggctcagctgcatgtgaccccaggctcagcccaacaacgcttcacccaggtctccgatgaactttttcaagggggccccaactggggccgccttgtagccttctttgtctttggggctgcactgtgtgctgagagtgtcaacaaggagatggaaccactggtgggacaagtgcaggagtggatggtggcctacctggagacgcggctggctgactggatccacagcagtgggggctgggcggagttcacagctctatacggggacggggccctggaggaggcgcggcgtctgcgggaggggaactgggcatcagtgaggacagtgctgacgggggccgtggcactgggggccctggtaactgtaggggccttttttgctagcaagtgaaagtccagggccaggtggggctaggtgtggctgggggccaggagagcaggaacagaacagagaaatgcccttggaagaagtggagttggtggatgggtgggcatggaacaggatgggcagagaaagggtagtgtgtgagggagctgagtaggccaggtaggcgattggaagagtgagcaggacacagaggggaggggaatgttttggcaagtttaggggcacaggagatgtagtcgttccagggctgggggaggtgggagggatcacgcctataggtgtgggcacatgaaacgacctggaacttgcttcacagccctgaggaaggtggacttacataagcagctgtattccattagatgagtgggatttagggaacgcagaaggcacatccctttggaatggaagcttaggggttctcaggtgatagggagaggtggctgttaacagtgggctgcttggacacgcgtgtgcatgtgcacgcatgctggtgtgcatgctgggctgcctggcaaatctggtggtggtgggattcctcaaggagaaaacattccctcttgcaatggcaagaactaggggcagttctctgtccctcctcccaacccctcctttcccctgcccttgtcctgatgcctcaaggcttagagagaaacattgtatccagaccgagggctctgctgcttctttccagaaagtgattggcaaggctttggagagaagagcagttctgcagctggccttgttccttcatcatcccccttccttgtgcattatgcacttgctgctgcctcctgggctctgatagaagggcagggctgttgagcctggatgggtggaggcttaggtagccggacctgcctgccaccctcctctcccactcaggcacaatggtgcctaaagtgtttccaatctctgggacctctgtacccaaactgaaactctaaattggggccctaactaattttccttttgaggttgtgggcataagtgctgatctagaatacagtctgggtcccacactgtgtctcagtgagactgttgatgccttgagatgaccatttcagatctgaatcccatgggtgtgagggtgatgggtactccaggactggcctatgctgtgttgtgggctttggttcggctttatcaggggccaggcatatgggttctagagtacctaccatgacctagaagcatttatgatttatttgaagccacactgtttgcatgggtgttacttgtctgtacctcagagtctgaggatgttaactttggaactcgcagtcctctagaacagcttcagattatggctttttcttttgaggaagaaattattcactccagatgcatgccctgagccagacctcactgctgcactttccaaggtgctaagattgctgctctccaatgctaactttctgacacagtgctctagaaccctgcctgtggtcctgagcactgatcaccttagctagaccatggttgactcttcttggagattttcacttggtcctagaatgtggcaacgtagttgtgctcgccagaacgtgggaccaaattggcctcaggtgttgagtccagacttctgcttttgagagagggctgcactttttcatggtatttctaggggaggtggtaggctgcatgtgccacttggtcttgttgtgagtatgctgacaccagaaactcagagccagcttgtggcaagcagttggggtggggggtctctgacttgctcaggacaaactaggccagtggttttcaaactgcttggcagagccctgaagtttcctaggggttgcctcaggagtccttggggagatgaagggggtggggagctgagcaggctgggcaatttgccctcaaacagaacagctccccttgtagctgtcttacatattggggttcagggtaagattttatttgcattaaggggtttgctgctgaaaaaaagttggaaaaccactgactagaccatcggctccaaattggagtctgtgcttccttccccaggtatggagcacactcttcaccctaccctctaccacaggacacatatccctgttagcattccccgggacctttagccaagaggagctgcagggaccatggccaggttaccaaaatgccctgctctgaagccttgacacctgggtggaaagagaggctgttttctgaaagggtaaagggcttggtctggattcccagaagcatagcttagatgggaccacagtgggcaattttgacctgtcctgcccttcttagcttgaagggaaaccccagagactcttctgtcagggaaaactagggactctcttctagagccatatagttccttgggattagctcttggccaagaaggctgagtatggttcccaatttttaaatccatttcattttttaaaaaataagggaaataaatgtaattgccatttttcaaagattaagtaggaggagaggggtttcttgctctccagagcccaaagggacaaatagggactttgtttaggccaaggaaggagcggaagtagggcaactcggtcctgcgattattaatcccactccccacttattctagggcacacaaacactattttacttttttaaaatcataaaacggcagaacagatttggttagtttagaagaaaagaaagctctataaatataaatctatattcctgtatttttatttaataatttataaataccaagttcatttgacttttatttttgtgtaatatgtaatgatcgtattaaaaacaataaataaagcccagaagtttaatgagaaggactgaaaaaaaaaaaaaaaaaa

SEQ ID NO: 180 - DNA, 430 bp, Homo sapiens
atgcctgaacctgctaagtccgctcctgctccaaaaaagggctccaaaaaggcggtgaccaaggcgcagaagaaggatggtaagaagcgcaagcgtagccgcaaggagagctattccgtgtacgtgtacaaggtgctaaagcaggtccaccccgacaccggcatctcatccaaggccatgggcatcatgaactccttcgtcaacgatatcttcgagcgcatcgctggcgaggcttcccgcctggcgcattacaacaagcgctccaccatcacctccagggagatccagacggccgtacgcctgctgctgcccggggagctggctaagcacgccgtgtcagagggcaccaaggccgtcaccaagtacaccagctctaagtaattctaacgtcttcatacccaatcccaaaggctcttttaagagccaccca

SEQ ID NO: 181 - DNA, 4775 bp, Homo sapiens
atgtctcggcgcaagcaggccaagccccagcacctcaagtcggacgaggagctgctgccgcctgacggggctcccgagcacgccgccccgggggaaggtgcggaggacgcagacagcgggcccgagagccgcagcgggggcgaggagaccagcgtgtgcgagaaatgctgcgccgagttcttcaagtgggcggacttcctggagcaccagcggagctgcaccaagctcccgcccgtgctgatcgtgcacgaggacgcgcccgcgccgccccccgaggacttccccgagccttcgcccgccagctcccccagcgagcgcgccgaaagcgaggcggccgaggaggcgggtgcggagggcgcggagggcgaggccaggccggtggagaaggaggccgagcccatggacgcggaacccgcgggggacacgcgcgcgccccggcccccgcctgcggcccctgcacccccaacgcccgcctacggcgcgcccagcaccaacgtgaccctggaggcgctgctgagcaccaaggtggcggtggcgcagttctcgcagggcgcgcgcgcggcaggcggctcgggagcaggtggaggcgtggcagctgcagccgtgcccctgatcctggaacagctcatggccctgcagcagcagcagatccaccagctgcagctcatcgagcagatccgcagccaggtggccctcatgcagcgcccgccgccgcggccctcactcagccccgcggccgccccgagcgcaccgggcccggcccccagccagctgcccgggctggccgcgctcccgctgtcggccggggcccctgccgccgccatcgcgggctcgggccccgccgccccggccgccttcgagggcgcgcagccgctgtcccggcccgagtctggcgccagcacccccggcggccctgcggagcccagcgcgcccgccgcccccagcgccgcccctgcccccgctgcccccgccccggcgccagcgccgcagagcgcagcctcgtcgcagccgcagagcgcatccacgccgcctgccctggccccggggtccctgctgggtgcggcgcccggcctgccaagtccgcttctacctcagacttccgccagcggcgtcatcttccccaacccgctggtcagcatcgcggccacggccaacgctctggacccgctgtccgcgctcatgaagcaccgcaagggcaagccgcccaatgtgtcggtgttcgagcccaaagccagcgccgaggacccgttcttcaagcacaaatgccgcttctgcgccaaggtcttcggcagcgacagcgcgctccagatccacctgcgctcgcacacaggcgagcggcccttcaagtgcaacatctgcgggaaccgcttctccaccaaaggcaacctgaaggtgcacttccagaggcacaaggagaagtacccccacatccagatgaacccttacccggtccccgagtacctggacaacgtgcccacctgctcgggcatcccctacggcatgtcgctgccccccgagaagcccgtgaccacctggctggacagcaagcccgtgctgcccaccgtgcccacgtccgtggggctgcaactgccgcccactgtccctggcgcgcacggctacgccgactctcccagcgccaccccagccagccgctccccgcagaggccctcgcccgcctccagcgagtgcgcctccttgtccccaggcctcaaccacgtggagtccggcgtgtcggccaccgccgagtccccacagtcgctcctcggcgggccgcccctcactaaagccgagcccgtcagcctgccctgcaccaacgccagggccggggacgctcccgtgggcgcgcaggctagcgctgcacccacatcggtggacggcgcacccacgagcctcggcagccccgggctgcccgccgtctccgagcagttcaaggcccagtttccgttcggggggctgctagactcgatgcaaacgtcggaaacctcgaagctgcagcagctggtggagaacatcgacaagaagatgacggacccgaaccagtgcgtcatctgccaccgggtgctgagctgccagagcgcgctgaagatgcactaccggacgcacacgggggagcggccgttcaagtgcaagatctgcggccgcgccttcaccaccaagggcaacctcaagacgcacttcggcgtgcaccgtgcaaagccgcccctgcgcgtgcagcactcctgccccatctgccagaagaagttcaccaacgccgtggtcctgcagcagcacatccgcatgcacatgggcggccagatccccaacacgccgctgccggagggcttccaggatgccatggactccgagctggcctacgacgacaagaacgcggagaccctgagcagctacgatgacgacatggacgagaactccatggaggacgacgctgagctgaaggacgcggccaccgacccggccaagccactcctgtcctacgcggggtcctgcccgccctccccgccctcggtcatctccagcattgccgccctggagaaccagatgaagatgatcgactcggtcatgagctgccagcagctgaccggcctcaagtccgtggagaacgggtccggggagagtgaccgcctgagcaacgactcctcgtcggccgtgggcgacctggagagccgcagcgcgggcagccccgccctgtccgagtcctcgtcctcgcaggccctgtcgccggcccccagcaatggtgagagcttccgctccaagtccccgggcctgggcgccccggaggagccccaggaaatcccgctcaagaccgagaggccggacagcccagccgccgccccgggcagcggaggcgcccctggccgcgcgggcatcaaggaggaggcgcccttcagcctgctgttcctgagcagggagcggggtaagtgtcccagcactgtgtgtggtgtctgtggcaagccttttgcttgcaagagcgcgttggaaatccactaccgcagccatactaaggagcggccattcgtctgcgcgctctgcaggcgagggtgctccactatgggtaatttaaaacagcacttactgacacacagattgaaagagctgccttctcagttatttgaccccaactttgctctaggtcccagccaaagcactcctagcctgatctccagcgccgcacccaccatgatcaaaatggaagtgaacggtcacggcaaggccatggcgctgggcgagggtcccccgctgcccgcgggcgtccaggtccccgccgggcctcagacagtgatgggcccgggcctggcgcccatgctggcccccccaccgcgccggacgcccaagcagcacaactgccagtcgtgcgggaagaccttctcctcggccagcgccctgcagatccatgagcgcacgcacaccggcgagaagccgttcggctgcaccatctgcggccgggccttcaccactaagggcaacctcaaggtgcacatggggacacacatgtggaataacgcccccgcgagacgcggccgccgcctgtctgtggagaaccccatggctctcctagggggtgatgccctgaagttctctgaaatgttccagaaggacctggcagctcgggcaatgaacgtcgaccccagtttttggaaccagtatgctgcagccatcactaacgggctcgccatgaagaacaacgagatctccgtcatccagaacggcggcatcccccagctccccgtgagtcttgggggcagcgccctcccccctctgggcagcatggccagtgggatggacaaagcacgcactggcagtagcccacccatcgtcagcttggacaaagcgagctcagaaacagcagccagccgcccattcacgcggtttatcgaggataacaaggagattggtatcaactagccagtgactcgctcatctgccctgcccaggcccacgttttgaagttggagcatcaggcctccgacctttcttgcctcggttctcattacactttcacccatagcagaaaacactttgtgcggctgccgagaggtggtcttgtaagcgctgcatggcgctcccttcaacagcaagcctgactgttctcgagaactctgcaatcttttaaataagcttccttcaaaaaaaaaagtgcttggaaaaccgccttaggaacagaaagagctcagaccatgtccacttcctttctcctgaaacctaataatctctccgagggagaaaggggttctctgcggtattccagtgaaactcatttgatggtttcttttgaattagttagacacttgaacggtgttttttagaactcttcatgttaaagacgtggtttagtactcccaatgctgtgtatcatgacactatcttcgtctgtagtatttatgatgttaagataatgcgggtaacagacaatataatagccccgaccttaaacgaagcttttgtactgcagaatacatctggctgtgtgatttttttttttaagcaagatttgttttactataaataagtggattatttcaatgcaggcaaaattgtgaagttctgttgggaaagatagcatgcttttcgtgtgcaagtacctgtcagtaataagccttttttttttttttttttaatttaaatgtttgtagctgctatgtggacagttgttttctagtgtggtctgtagcccaataactggggaacgagttacagacaaacatcaccgtaaatgactcacaacattataaacagttgtgagaaaatatttcacattatcaaagctgtacaataaa

SEQ ID NO: 182 - DNA, 2527 bp, Homo sapiens
atcgccccctttcccctcccatctcccggccgtggtgcggcgcagctctctccccctccgcagtctcagtggcgagctctgggtgctgtggcccggccttggcggggcggcctccggctcaggctggctgagaggctcccagctgcagcgtccccgcccgcctcctcgggagctctgatctcagctgacagtgccctcggggaccaaacaagcctggcaggacaaaattagaagatcaaaatggaaaatatgctgctttggttgatatttttcacccctgggtggaccctcattgatggatctgaaatggaatgggattttatgtggcacttgagaaaggtaccccggattgtcagtgaaaggactttccatctcaccagccccgcatttgaggcagatgctaagatgatggtaaatacagtgtgtggcatcgaatgccagaaagaactcccaactcccagcctttctgaattggaggattatctttcctatgagactgtctttgagaatggcacccgaaccttaaccagggtgaaagttcaagatttggttcttgagccgactcaaaatatcaccacaaagggagtatctgttaggagaaagagacaggtgtatggcaccgacagcaggttcagcatcttggacaaaaggttcttaaccaatttccctttcagcacagctgtgaagctttccacgggctgtagtggcattctcatttcccctcagcatgttctaactgctgcccactgtgttcatgatggaaaggactatgtcaaagggagtaaaaagctaagggtagggttgttgaagatgaggaataaaagtggaggcaagaaacgtcgaggttctaagaggagcaggagagaagctagtggtggtgaccaaagagagggtaccagagagcatctgcgggagagagcgaagggtgggagaagaagaaaaaaatctggccggggtcagaggattgccgaagggaggccttcctttcagtggacccgggtcaagaatacccacattccgaagggctgggcacgaggaggcatgggggacgctaccttggactatgactatgctcttctggagctgaagcgtgctcacaaaaagaaatacatggaacttggaatcagcccaacgatcaagaaaatgcctggtggaatgatccacttctcaggatttgataacgatagggctgatcagttggtctatcggttttgcagtgtgtccgacgaatccaatgatctcctttaccaatactgcgatgctgagtcgggctccaccggttcgggggtctatctgcgtctgaaagatccagacaaaaagaattggaagcgcaaaatcattgcggtctactcagggcaccagtgggtggatgtccacggggttcagaaggactacaacgttgctgttcgcatcactcccctaaaatacgcccagatttgcctctggattcacgggaacgatgccaattgtgcttacggctaacagagacctgaaacagggcggtgtatcatctaaatcacagagaaaaccagctctgcttaccgtagtgagatcacttcataggttatgcctggacttgaactctgtcaatagcatttcaacatttttcaaaatcaggagattttcgtccatttaaaaaatgtataggtgcagatattgaaactaggtgggcacttcaatgccaagtatatactcttctttacatggtgatgagtttcatttgtagaaaaattttgttgccttcttaaaaattagacacactttaaaccttcaaacaggtattataaataacatgtgactccttaatggacttattctcagggtcctactctaagaagaatctaataggatgctggttgtgtattaaatgtgaaattgcatagataaaggtagatggtaaagcaattagtatcagaatagagacagaaagttacaacacagtttgtactactctgagatggatccattcagctcatgccctcaatgtttatattgtgttatctgttgggtctgggacatttagtttagtttttttgaagaattacaaatcagaagaaaaagcaagcattataaacaaaactaataactgttttactgctttaagaaataacaattacaatgtgtattatttaaaaatgggagaaatagtttgttctatgaaataaacctagtttagaaatagggaagctgagacattttaagatctcaagtttttatttaactaatactcaaaatatggacttttcatgtatgcatagggaagacacttcacaaattatgaatgatcatgtgttgaaagccacattattttatgctatacattctatgtatgaggtgctacatttttaggacaaagaattctgtaatctttttcaagaaagagtctttttctccttgacaaaatccagcttttgtatgaggactatagggtgaattctctgattagtaattttagatatgtcctttcctaaaaatgaataaaatttatgaatatgacttaaaaaaaaaaaaaaaaaaaaaaaaaaaa

SEQ ID NO: 183 - DNA, 10091 bp, Homo sapiens
aggttcttggaaggctgtgaggctcggcagtcactgaacttgggagctgaagaatactggacggggcttcggagaggaaggatggtccaggcgcaccccaggggttgcgatgggctcttcttggtgtctgtatggttgctgcaatgctggggtgaaaacaacacggctagaagctcattctgaaatggggagcactgaaattttggaaaaggagaccccagaaaatctcagtaatggtaccagcagcaatgtggaagcagccaaaaggttggccaaacgcctttatcagctggacagattcaaaagatcagatgttgcaaaacaccttggcaagaacaacgaatttagcaaactagttgcagaagaatatctgaagttttttgattttacaggaatgacgctggatcagtcactcaggtatttctttaaagcattctctcttgtgggagaaactcaagaacgagagagagttttaatacacttctccaatagatatttttattgtaacccagataccattgcttcacaagatggagtccattgccttacctgtgcaataatgcttcttaataccgatctacatggccacaatattggaaagaagatgacctgtcaggagttcattgcaaatctgcaaggggtaaatgagggtgttgatttctccaaggatctgctgaaagctctgtacaactcaatcaagaatgagaagcttgaatgggcagtagatgatgaagagaaaaaaaagtctccctcagaaagtactgaggagaaagctaacggaacacatccaaagaccatcagtcgtattggaagtactactaacccatttttggacattcctcatgatccaaatgctgctgtgtacaaaagtggattcttggctcggaaaattcatgcagatatggatggaaagaagactccaagaggaaaacgaggatggaaaaccttttatgctgtactgaagggaacagttctttacttgcaaaaggatgaatacaagccagaaaaggccttgtctgaagaggacttgaaaaacgctgtgagtgtgcaccacgcattggcatccaaggccacggactatgagaagaaaccaaacgtgtttaaacttaaaactgccgactggagggtcttgctttttcaaactcagagcccagaggaaatgcaagggtggataaacaaaatcaattgtgtggcagctgtattttctgcaccaccatttccagcagcaatcggctctcagaagaagtttagccgcccacttctgcctgccactacaacaaaactgtctcaggaggagcaactgaagtcacatgaaagtaagctgaagcagatcaccaccgagctggccgagcaccgctcatatccccccgacaagaaggtcaaagccaaggacgtcgatgagtacaaactgaaagaccactatctggagtttgagaaaacccgctatgaaatgtatgtcagcattctcaaggaaggaggcaaagagctactgagtaacgatgaaagcgaggctgcaggactgaagaagtcgcactcgagtccttcgctgaacccggatacttctccaatcactgccaaagtcaagcgtaacgtgtcagagaggaaggatcaccgacctgaaacaccaagcattaagcaaaaagttacttagagtccatctgcggccaggaagtgctggtcatggagcaaaatagggtttttcaagatctttctggtaatccgtgaatatatttaaaaaaaaaaagtctgtgacaaaacggtgcattagtaattttttctattgtatatttttgttagtttctgtacagattgtctttgctcttgatttcttttgctttgatgatttttgcaacttgatagctaatgcaccttttctgtgaggaggaggggatcgtgatttcagaatgaattatgtatcccttctcttttggttttctcttgtttgcagtctgctcagttgttttatgtattctcatatcaactgttaaacttttttttaaggttaaagaatttaatccattgtgaaacacttaactggacaaactgtagttttagtaaattctagctggagttaatatacgcctttatatgtgaaatcttgcccagtcacagaggtagaattgagcactcacagatgctccagtaagaatcacagtgctgggaatctagttgctccaatatgaggcagcttcatgtgcagcttagcacttgttgttgagatcggaccctgctggaagcagggaaaagaagcgtgaagatcgtaggattgagaacttagggaagcacattagcttgcttgaagtgctgattccatttcagccaagcaagggaaagaggaagtggagtcattttgcctttgaaggctgaggaaagattgatacccagttaattttgtttgctaaaggatgggggcaataatcggcccttgaggagctgcagcagtaggcatgtgctcagtctgcaggaattgttacctcactcccacagggtctagactagaaatccatcatctctatcgttgatatccttccatccaggaatagatttttcttactctacatatgtgtgtgtgcgtgcgtgtgtgtgcgtgtgtgggcatggggttgtgtcctggttgtgatattgaggtcttccttcctaacaaattaatactaaaatgaaacagcttttcttgtgtccttaagacaaaataaggaaggaaaacgtagctgcagttgtccacgatggatattggttctttaaaatatatctgaaagtagtagtcagaatgaattatggttggaaaactgaggaatcttctggttgcaggtgcaaagtgactttgtttattcttgtctcagtctccttgatagccacttcactctgctactactcaactttctcctaaaaatacttcatctattttcagtcctttctttctgtctactcaaaatggttctattaactttgcagtcatgagcttgttccagttacagtccctttgaagttcagggtgataaacagaatattcttctgtagaggaagagaaaggagtgaaagtttagcccactgagacctagagctttgtgatttcctaaccttgaaactctgtaatccctaaagttaaaatctccgcaagtggcacaacttcagaactaatagtatcactttgatttttctttttcctcccttagaaagtttctctagttctatagtttatttgttgaaggtactatgaccaaagaatcagctgctctacaggaatagcatggttccagtgaattagagaaaacctgctgtaaagccatggtagtgtctaagtggtatgttattatgatgtactagcatttatttacagaattatttattaacgtttacttccttcccctctgtaaatgtccatgactattgcccagagaaggcttacccctctctagggttgcagttgctttctttgtaataagtattttgccacacctgtaaaaaaaaaaacctcacttttaactctctgccttgtttgggtaaaggcagtaactaagtttatgtttcagaactgcaaaacaaacaggatagttaccaatatggcccatgtatcagattgatttttgtagcctctcactgaatccaacatatccacaagcaagttatctgtctttctacctgataatctaaattatcaggatatttgttttctgcctaaatgtttatactaagccgaggggagagaggtacctagaccatgtcatctacaagcttcagtaactaaagaaaaaggaacttccctgagtggcttgaatgtgtttgcccacagtctatatctatgtatatagaatgtctgtatgtattttacttatttaatatacattgaatggtaccttgctacagtatttctgacatttagagtagtgttgaaatactcggctagcatcagcaccactatagcactgtccgtgtcatatgagtcactaatattaactccagggacttctggataggctaatagatcattggatacgaagggctcttttgaagcttcagtataccatgtttgcatagtttatctttaaaaacaactttaaaggttcttttgtgagccaggatctcagactgccgtagcatgatgctgtccatctttagcgcatgggctgagaacacctcttccctgaggcttctgaaggttgctgtctgtcatgagtgcatgaaggaggccaagagtttatgctatgggaggaaacagtcactgatttgcctagattctgagagtctggcccatagccaaccacattttcctttgggataatttatttcctgtggcatctagccagaagaaattgaggatgtttcctttcacagctgctccaagcctgttgcccaattcacggtacaagggagcaccccttccctttcctctgaaggtacgccacccacctccgtcgcccacctcagcgcccaggagccttgggacttccttccatatgataaatcattcttcttcacgtcaatacacttcatattaatttctagtacagaaaatcttgacagctatcagaatgccttggtcatagtgttgttgcaaaattgaccatacaggtggcccatgtataaaatctgaattttaggggtttgtccccacctcgcatgctggcttttacagggaggtgtctgggattcctcattagcaatcaaaacttaattactgggatgcagagtccttactttatcgccagcccgtaggcatttctgaagtgcacttttttgaaacatcattttgctaactctcagcagtgtctaattaaactgagcaatacttttgtgaattttaattaatctcagcaaaaccatgatgggagagagtcctctgatggaaatgtagtccctggattatgtgtaacctttttattcctcttagatgcagaggatagaaagcattttttggtgcagtggtcttgtggcaaacacaagaccctctatgcgtctccaactgttatcctaatctagaaaatgaggactggcccctgggcaaaagtgacatgaggaatttactctggaagaggaaaatctgggtggctttccaaggctaagataggtttgtatttcaccctgtggccaagctacagaacttctgagattgtggaagaatttttgcaaccagcagggaaagaggcctcttactgcctaaacacaaagttacactgagcttttctactgtcctttgcctattgctccctctatcatgtaaagatctgggaaggatgagaggcagggcctgcttgtcatgagctgcactcttttctttttaactaatcattgacaattggaagaaaattgacgttaaagaagtttctccattgtcttactaacaaaaccttttgggtttcattaattgtccttgaaattgagttcctttggcatttttccttgcagtcatcagttaagcatgttgcatcctgaattcacagaagtttagctttgcaggtttgaatctctgtaatttaactcccgtggacttggtcgagttttcagcaggttgggagccacctctcttcatttcagcagtgagtcatcccttgacttttcaaatgacagaattttttccaattgtaaaattagcactgtaaaacaaagaaccaaagtggcatcctaagagttgttaaacctgaagtctagtttatgaggaattgtccaagttggagtttaaatagtatctgcttttgtctcaaagcatctaagttattctgacagaaaatggtaagtcagctttgcaggcagatgcgcctctgggcctcctaccttgctccacagctttctggccatcttgtctcccaggccatgccactgctctgccacatgtcagcaaatttctttccaccagtcttatagcatcttacatgatcaaatcatcacagaataaccccgtgatagattattgatagcaatagagaggggctttgtcactgatttttctctcagattccttttccatctctcatccataaaggaaggactgaaatccaaaggcattctccttttgtacctacagtatccagaacccacgtgggcagccttctgcttatgacaataattggcccattgcatgcagagagaatgtcttcatagagagaatgtcattaaatacttgaatctgcatgacagtttgacttgaatgcaacagcaggaaaattttgcaagttacataattgtatatacagtaggttttcttaagtctcttcggttcatcctttgtaatttgtgtgtgtatctgtagtattgcaggcttttggagactattcttacaggcagtatgtcagtcatcaaagaaaatgctgtcacctgccattgttgtatttgtgggtatttatagttgtatgtatgtaaatgcatcagtgtgtagattgcatatcagtgtatggtacatgtacatcaaaattatttttgtccttaatcagtgtgatatgaaaagcaagtacaacctcataggactgattatataatgaagttgttgagagtatatatagtggtattgttttattaaacttaaactcaaataatattttgattaaaatttttaataagactttatgctagaaaattctttgagctttgaatcaccagggcaaaaatgactttcaactaaccttgtgaatcttttgcagtgtactgtgtgcaataccaagggcatagctccctgtaatttgggaaatacagaaagaaaagaaaaaaaaaaaaaaaggcagcctgtgcagtcttagtaactttagtattaagagcacttaaagtcaaactgacaattttgggcttattacaaaatgtgatgctttaaagcacacgttctttattgttgttgtaattagtccataaaaaatatagctttcggaagaattaagtacccaccatatcatttatgtatttgtgtatgttttacgggagatcaaaccactctcgtggtgccgcatccgtactcgcttgacttggaagaaatatcacaagcactaaagtatatcagggcatcccaggattgggtactgtatcctaggtttgcagttgcagaaattagcatctagtgtcacaggtaaaagaatttcaggaccaggtttaaactttattttaaatatttttatacttaggtctctttttcctgcctctccccaaagaagagccactggccttagttgtttgagcttactgcttatattatagagtgtaaataggtaactagagactaaaattttattaaccagcatgtttggtatatttaaagcagtgactgagtgtgtttgagtgagtggctgagtgcagtgtcttttgtttaaacacactgcctcgtgtctttgtagctgattcagagagtttgaattgtggggtgggagactaacttcagctccaggctgcagtaatgtgttggtagttacacttgaggcatttttttgttgttgttaattaactctatagtctcaaactatttttgcaaatatatcatttttcctaattggttcttgacgtgcagtggactggctctgtgaatgattggcagggtcttagttttgcgagagtatttccttctaagaattattgtgatctgcagaaacagccatttgattcaaaaatcatgtagaaaaggagtaggagaagcaaaacgtttcatttttgggccttaaccatttgaaatgtttggactttaaacataaagccatggagtttataaagccaagtaaccatttgatatggataataatatctactctagagagagtatatatatgcacattgatttttaatgctgttaagatacttttgtaaaactgtaggaacaagagtaattagaccaaattgaagcttaggggacagtaaagtggttgctttccatttagggtaaccatgcatgtggttagtcctctcctcctgagattcagaaccagttgactgtccccttaggtgtataaggagaaaagttgacatgtctgggacctctgacatgtgtacacatgcttgcacacatgcacacacagtgaatgttttaagttatacaaacataagaccttaagatgcaaagagccagaatattctaaagaggtgatgaacagagggggtggaaactgcatcacagatgttttccaagggccagggtggaatctgagctctagtgtctgactttgagatgcattatatttttaacacataaatgaggggatccatatcacattctttcttgtggaccaccaaattgaaggctttcttgtaattcacaagcagcagctctccagcatctctccgtagcctgggtgaagtcccagaagctggtgtgcatcattttccaaggtggcagagctgcttgctctgcagatcattcctttgagagaggagtacaagtgaagaaacaaggaggcacttcctgtaggagcactgatgtgccttgtccacactcccctctgagctttactggtaagagagctccgactgaacatgctgagcagttgagcacttttccatcagcaacaacagcgaggatggaaatggaaaggaaccgaactaaaatgcatttccctttgcagggcagagagctaagctcttaggaatagtgttatagaaataagcaccctaacttcaattcctgaaaatgttggttaatggagagaattttggagtttcacttaatattttcccatcggtcgccataaataagtcttcaggcgctcctagaagagtcccagcccaaggctcgattaaggaccacactgcaggtctgaggctcactgctctgagtcctgaacaccagagccctgcagagagtggtgataacacatcatctctgcaaagaggaacctctcccccggccgccacttcactcaggcttctactgagcagcaaggacagcctgggtttcaaatgccacttcccctgctttagggatccaggtgtcctgatagcgtgaccctgctgaggcaaggtatcaactccgagagtgactgagtcactgagcgtggcacatgaacaaacgtcatgacaaagattctctgagtgaagttaacaccacgtattttacctttgcaaaaaacaaactggcaccctgagttctaactacggacggacgatatctttgcctccacacccagattcctggaaatggctaacgtttcctttctaggggaagggtcgaggaatactcaagtgctagcttagcagctttgttcagtccagatcagagctgttaggtaaaggcctaaccacctccctgcagtctcttatatctcaagctttaggaacccatttctaaatgtacactagcggagaatttatattgtcagccttgattaccataggacaggcagaaaggcgataatttgtatcttttaatataaaagaagcttttaacttttccagcctattataataactgagttatattcactgtggctcaaactaattggcattgtggaacatttctttaccttcaaagttttctccaccaatcatttcagttctattgcagtcctggtgccatatgtcccctgcaaattgtgaaagtaattagtgacaaaatagcagcctgctccttttcaatggcgaaactgtcggcattagcagttttgggtaagctggcggtactataacacgtactggaaacctgttcctcatcaccacctaccagattctggaaatgccgtcttctagaaaacgatggcgtttgtggtggtcttcttttgaaaggaacagtaatttgtgtggatattgttaaagtgtttaaagaatattttgacaattaagtttacattttacaattgctttattttttattaaaatagttgtatataaatattaccctatttcactgttgttcaagtaaatctaaaccttgtagacaagtgagtcatctgatatgtatagaagctgtgatatatagagtacatttattgtgtaaatgtttatgaatataattgttcctgtgtttttataagttggggatattttgttgttttacggcaacaaaatttattgcatttaaatggtttttatgtaatagaaatcacgcaaaatagtgaaggatttaaaatatgtatatgatacatgtaaatgtacaaactttagaaagaaataaatccaacaaatttcaatca

SEQ ID NO: 184 - DNA, 3288 bp, Homo sapiens
ggggggtgttcatctccgcgaccaggaaacgggaaagatggcgacggctccgcgacgttgaggccgcgttgggcggttcagactcagggtgatggcaggagagctggctgacaaaaaggaccgtgatgcatcaccttccaaggaggaaaggaagcgatcacggactcctgacagagagcgggatagagaccgggaccggaagtcttccccatctaaagatagaaagcggcatcgttcaagggatagacgtcgaggaggcagccgttctcgctctcgttcccgttccaaatctgcagaaagagaacgacggcacaaagaacgagaacgagataaggagcgggatcggaataagaaggaccgagatcgagacaaggatgggcacagacgggacaaggaccgtaaacgatccagcttatctcctggtcgaggaaaagactttaaatctcggaaggacagagactctaagaaggatgaagaggatgaacatggtgataagaagcctaaggcccagccattatccctggaggagcttctggccaagaaaaaggctgaggaagaagctgaggctaagcccaagttcctctctaaagcagaacgagaggctgaagctctaaagcgacggcagcaggaggtggaagagcggcagaggatgcttgaagaagagaggaagaaaaggaaacagttccaagacttgggcaggaagatgttggaagatcctcaggaacgggaacgtcgggaacgcagggagaggatggaacgggagaccaatggaaatgaggatgaggaagggcggcagaagatccgggaagagaaggataagagcaaggaactgcatgccattaaggagcgttacctgggtggcatcaaaaagcggcgccgaacgagacatctcaatgaccggaaatttgtttttgagtgggatgcatctgaggacacatccattgactacaaccccctgtacaaagaacggcaccaggtgcagttgttagggcgaggcttcattgcaggcattgacctcaagcagcagaagcgagagcagtcacgtttctatggagacctaatggagaagaggcgaaccctggaagaaaaggagcaggaggaggcaagactccgcaaacttcgtaagaaggaagccaagcagcgctgggatgatcgtcattggtctcagaaaaagttagatgagatgacggacagggactggcggatcttccgtgaggactacagcatcaccaccaaaggtggcaagatccccaatcccatccgatcctggaaagactcttctctgcccccacacatcttggaggtcattgataagtgtggctacaaggaaccaacacctatacagcgtcaggcaattcccattgggctacagaatcgtgacatcattggtgtggctgagactggcagtggcaagacagcagccttcctcatccctctgctggtctggatcaccacacttcccaaaattgacaggatcgaagagtcagaccaaggcccttatgccatcatcctggctcccacccgtgagttggctcaacagattgaggaagagaccatcaagtttgggaaaccgctaggtatccgcactgtggctgtcattggtggcatctccagagaagaccagggcttcaggctgcgcatgggttgtgagattgtgattgctacccctgggcgtttgattgatgtgctggagaaccgctacctggtgctgagccgctgtacctatgtggttctggatgaggcagataggatgattgacatgggctttgagccagatgtccagaagatcctggagcacatgcctgtcagcaaccagaagccagacacggatgaggctgaggaccctgagaagatgctggccaactttgagtcgggaaaacataagtaccgccaaacagtcatgttcacggccaccatgcccccagcggtggagcgtctggccaggagctatcttcggcgacctgctgtggtgtacattggctccgcaggcaagccccatgagcgtgtggaacagaaggtcttcctcatgtcagagtcagaaaagaggaaaaagctgctggcaatcttggagcaaggctttgacccacccatcattatttttgtcaaccagaagaagggctgcgacgtgttggccaaatccctggagaagatggggtacaatgcttgcacactgcacggtggaaaaggccaggagcagcgagagtttgcgttgtccaacctcaaggctggggccaaggatattttggtggctacagatgtggctggtcgtggtattgacatccaagatgtgtctatggttgtcaactatgatatggccaaaaatattgaagattacatccaccgcattggccgcacgggacgagcaggcaagagtggggtggccatcaccttcctcacaaaagaggactctgctgtgttctacgagctgaagcaagctatcctggaaagcccagtgtcttcctgtccccccgaactagccaaccacccagatgcccagcataagccaggcaccatcctcaccaagaagcgccgggaagagaccatctttgcctgacacagcactcttcctgtgggctgagggcatctccaaagctgcctgatgcctgtttttcagaaccctcacatccctctttccaggtcctcactcttgggatatgggggcttaggaaaacaatccaactccctagcccagaccctcaggtcaggaggcctgcgtgtggggctgcaaaaggagaggacgacgctgtcggaggcagggagagcaaattaccacagcttcttggcccagttctgcccttctttgctttgggattgcactgggccatcagctcatgccaggctatgggggcagccagttggcattgctccccagactgaacagaaacctggccgccggatgggacctcctttggcacagacttgactgtgtaactgcataaactgcagtagcatcattgccctagatgccccaggagacctggcaccatgaggattacagacagtggaatcttactgtcatctggacagctgttttcctgtttggatggtaaaggaagttgagagtctttagacctgtgcacagccccgcaccaaggggtgctgtatgctctaggcatcccctcccccaggggattttctaagtagatggggggacacggtgaactggctgtgtccatctttgtcactgagtgaaatctctgttttctattctctgagaagataagtttgtatgttctgagaataaatacatgaatattaagactgttaaaaaaaaaaaaaaaaaaaaaa

SEQ ID NO: 185 - DNA, 1772 bp, Homo sapiens
ggataaatgtagcgccgcggcgcgggccagcagctctgcgaggggccggagcgcggcggagccatgcagtacccgcaccccgggccggcggcgggcgccgtgggggtgccgctgtacgcgcccacgccgctgctgcaacccgcacacccgacgcccttttacatcgaggacatcctgggccgcgggcccgccgcgcccacgcccgcccccacgctgccgtcccccaactcctccttcaccagcctcgtgtccccctaccggaccccggtgtacgagcccacgccgatccatccagccttctcgcaccactccgccgccgcgctggccgctgcctacggacccggcggcttcgggggccctctgtaccccttcccgcggacggtgaacgactacacgcacgccctgctccgccacgaccccctgggcaaacctctactctggagccccttcttgcagaggcctctgcataaaaggaaaggcggccaggtgagattctccaacgaccagaccatcgagctggagaagaaattcgagacgcagaaatatctctctccgcccgagaggaagcgtctggccaagatgctgcagctcagcgagagacaggtcaaaacctggtttcagaatcgacgcgctaaatggaggagactaaaacaggagaaccctcaaagcaataaaaaagaagaactggaaagtttggacagttcctgtgatcagaggcaagatttgcccagtgaacagaataaaggtgcttctttggatagctctcaatgttcgccctcccctgcctcccaggaagaccttgaatcagagatttcagaggattctgatcaggaagtggacattgagggcgataaaagctattttaatgctggatgatgaccactggcattggcatgttcagaaaactggatttaggaataatgttttgctacagaaaatcttcatagaagaactggaaggctatataagaaagggaatcaattctctggtattctggaaacctaaaaatatttggtgcactgctcaattaacaaacctacatggagaccttaattttgacttaacaaatagtttatgtactgctcttaggttgttttgataaagtgacattatagtgattaaattcttccccctttaaaaaaacagttagtggttttcactatttataaaaaattaattttgaactttttgttaaatttttaagttatagctttaaaggttttaataggaccttcttgaacgacttttctgtaatctgtttatctcccacttaatggaaaggcaaaggggtaccccaaatccagaggtgcctacatttcaggcagccttggagtattttaaaaggaaaacattctttacttttatatgacattcttatactgctgtctcaaatccaaaaacatttcagagctcttgtctcagagatgtgtgttctttttgtcagagatatggttgatgagaatcttaaatgcttgttttgcactatcacttagtacctgtttgaccaaggtgttaaggggatagtacctcccaattcaagcagagaaactgacctgactaaagttaatcgcagatgaactagaagtcacaggttaattaaatgtaagtagattgtagatactgttttatatcaaacaatgtttataatgtgtatatagaattgttcactgtaaaaaaaatggccaaaatgtgttttttttttaataagtaacttgactataaaataaagccgtccgtgggacgactgacctcgttgcaaaaaaaaaaaaaaa

SEQ ID NO: 186 - DNA, 4457 bp, Homo sapiens
ggcgcgaggcgctctcgctctcctcctcctccgccgtcgcccctccccccgcgcagcccccgccgccaccgccgcgagacccccgcacgccgctctccccccaccctctcctgccccgcgcgccctccggcccctgcggcccccgaagagaacgagagggcgagcgagcgcggcgttcccgggccggcccggccccctcccttcaccatcgccggccctccgccgccttcctccgcttccacctcctctccccccccccaagttgaggccccctccgggggggggaggcccgggaccgggacccgtagcgaattctcctaactccctcgacctctcctctcgcccggcccgagtgtgaggagaagggcccggcccggcctgcgtcgtgtgtgaggaggaccccgggcgggcccacgggccgtgtggggcctggtctggcccgccgggtgtgtgaagaccggggcccggtgctgcccggccggagggcgagcggaggggaggggcctggtccggcccggccggtgcgtgaggactggggcccgggcccggcgccgccgccgccgccgccgccgcgatggcccagcagcagatgaccagctcgcagaaggccctgatgctcgagctgaaatccctgcaggaggaaccggtggagggcttccggatcaccctggtggacgagtccgacctctacaactgggaggtggccatcttcggaccccccaacaccctctacgaaggcggctacttcaaggcgcatattaaatttcctattgactacccctattcaccacctaccttcagattcttgaccaaaatgtggcaccccaacatttatgagaatggagatgtatgcatttcgattcttcatccgcctgtagatgacccacagagtggagaactgccttctgaaaggtggaatcctactcagaatgtgaggactatcctattaagtgtaatctcactgcttaatgagcccaacaccttctccccagccaatgtcgatgcttcagttatgttcaggaaatggagagacagtaaaggaaaagacaaagaatatgctgaaattattaggaaacaagtttcagccactaaggccgaagcagaaaaggatggagtgaaggtccccacaaccctggcggaatactgcatcaaaactaaagtgccttccaatgacaacagctcagatttgctttacgacgacttgtatgatgacgacattgatgatgaagatgaggaggaggaagatgccgactgttatgatgatgatgattctgggaatgaggagtcgtgacgtgctccttcagtgcccctgtactgccctgccatctcaggccaaagggaggggagcaagtggggacctggccatggcccctcagcaaaaacctattcacagcgggtggggaaacacacacagctcctgctgactccccttatggatctcagtttgctcctttttatggacctttaatggagagagagtaaccctccacagaatgtctgaattcttgcattctttacccttccatcactatattgattctttttttaaaaaatatgaacccaaactcccgcctcacttcgtctctacagaatgttcacagcaaaacacgtttggtctgtttttagattcttgaagaattcaatagtctttcaagatgtttaatgtgtttaaagctgggaacctgttgggagttcacaagtgctgcatatactgggtagcaaaagaaaatggaaaaaaacccacaaaacaaactttaaaaaaaaaaaaaaacaaatttgccaaggtttagctgctcatttacattagtgtgtgtgcattcgttcagccccatggtggtgaattctgtttctttcctttcctaaggctgggacatggtgggcatcagggactttgtgctaagcctgatgaaatgtgctccttcaatctccatgaaaccatcgtaacatggaggcctcagctgctctgaggagagaaatcagactttgttttttgaaatcgattgggatcgaaagcctgaaataaatattcatactttccatagaactgagcacttggttgctatttattttaaaggcagggttatttccccccagggagtggggcaagcggggaagttgggatgagtgcgtgtgggagcaaagagttaaaaatcactatgctaagtttggttgatgctactggggggaaaaagttgaaactactggtgaccactgttgggagaggaaacatctgttttatagatttagcatggccttcccatcaaaaatacactcgtaccatgacgttttgtttttgttttttaagtagccacttttaattactcagtattaatcctaggtgcatgtgttaagatttcggttttcatcgagctgcttatactgatagtgaaaaacttggatgtgtgtgagacgagttaccgccttcttcattggatgtgatctgaactttttttctcctttcaacatacttaggctgtggagtgcaagcagaattatgcatagaaattgtggcagggctgagggagttgactgcaggcagtttttaggccagataaggctagatcttcctgcaatgcacttgctgcagctttgattttccagatctcaatcgtgttgcttcaatcaatattgagatccagcagccttcaccatccaggagacttcagaacttgaaggtaatttttggttgttatgggggtgcaccagatcataggagggcattatttggaggaaaccgctataatgtaaaatcagatttcagaaggaaaatgcagcaaggactgactgtagtcctatttcagacccctgggcactagtgtcaactcctcctttggctcgtaactcagaaagaaccaaagggcagattagggacggggcaggagggatcctaggatggccagagtaggtgacgcttacttccttagctcctccttccattctgatctcagggttttcactcttcaaactcccaaacacatgacttcttcccagcagcccttcccggcctctaaagtttggtcccagcagcccttcccagcctctaaagtttggtctggtatgaaatgggactgtttaacaagcaaggctcttaggggacactgttgagcctggtcccagaatctgtgatctccacagggccagggttgctacttgcacccagaatctagtgattttagtcagatccatggaacagagcagcttcgtaatacattgtcaagttacctgattacaaactctcatagatgttggaactacctttttactccccatactttgtaagtaatgcttccagattaacctgcaaatcttgtggagccaaagcctctcacagtgctgatttacctcccccaaaatgcccccaaacccccatgcaagtttacagccagtagcttggtcttattctcttggagccctaaaattaagcctttcattcccctttgctaaagcatctcactcccagggcagccccagcaccctggcattgcgggaggtgctctgctgcacagctgttccatcaggccctattggcctctgttagacattgactcagggagccggagcgccaagtggaggttgtacctttcagccctttggggtgttaaaagtgtcaagggctgggtttgcctctgatgagtacaatcagttccagaagactgggtaagtctcttgctagcaggtggacattctggtattttagactgactgaacgaaacccagaggctggttccagagctctgtccctgagaacacatccctgtggaaaatacttgagtttgtaattttttttcccccttctgggagtggaggtctcaggctcaatccggaaccatgtacgtacagttttgcttattatttgatgtgacatgaactcaaaatcctgcatttttagattccttttagttctaattgaggcctcactagatgctcttcagttctgtgtattttgaggctgggtggagaagtatatgattctgctgttgattctttcagtcttccccccttctccttttatcaatcattccagagttattttctattagtcaaacttttttgtagaaccttctttcccttaccctggcaaattgcttctttacttgctggtttccttacgtttggggcacatgttgtaagaaactgattggaaggggaaatgtgcagctctccactggaaaggaactctccacccctcccatcctgataaaacaaacaaggtttacatttacaactaaaaggattcagatgcaattttcaactattctgaaaccagcaggacacacctgactttaatagttttagctgaaattgtagatgttttgcttcagtttaacttatgagaaaagattatctgacggattttgtgttgacttcccctttagtggtttattttgtctttttctgcccatctgtctactaataaaatgtgaaataaaatacctgtattgctacttccccatgaa

SEQ ID NO: 187 - DNA, 7026 bp, Homo sapiens
aagagggcgtgaggagggaaggagagggaggagagagaggagagagaagggcggagtaggaggcaggggaagggggcggggcggaagagtcacgtgatccggcatggaggcggtggcggcgaccgggaggagccgccggggcagaagccgcacttgttagtgtggggggaggtgggggcgggggacgccgacaccgtcaccgtcacccagggacgccgaggagaaggcgggaggggggtgggggcgagatcaggctccgaccccccgccgaggggatgaggggagcatgggtgccaaggagtcacggatcggattcctcagctacgaggaggcgctgaggagagttacagatgtagagctaaaacgactgaaggatgctttcaagaggacctgtggactctcatattacatgggccagcactgcttcatccgggaagtgcttggggatggagtgcctccaaaggttgctgaggtgatttactgttcttttggtggaacatccaaagggctgcacttcaataatttaatagttggacttgtcctccttacaagaggcaaagatgaagagaaagcaaaatacatttttagtcttttttcaagtgaatctgggaactatgttatacgggaagaaatggaaagaatgctccacgtggtggatggtaaagtcccagatacactcaggaagtgtttctcagagggtgaaaaggtaaactatgaaaagtttagaaattggctttttctaaacaaagatgcttttactttctctcgatggcttctatctggaggtgtgtatgttaccctcactgatgatagtgatactcctactttctaccaaactctggctggagtcacacatttggaggaatcagacatcattgatcttgagaaacgctattggttattgaaggctcaatcccggactggacgatttgatttagagacatttggcccattggtttcaccacctattcgtccatctctaagtgaaggtttgtttaatgcttttgatgaaaatcgtgacaatcacatagattttaaggagatatcctgtgggttatcagcctgttgcaggggacccctggctgaaagacaaaaattttgcttcaaggtatttgatgttgaccgtgatggagttctctccagggttgaactgagagacatggtggttgcacttttagaagtctggaaggacaaccgcactgatgatattcctgaattacatatggatctctctgatattgtagaaggcatactgaatgcacatgacaccacaaagatgggtcatcttactctggaagactatcagatctggagtgtgaaaaatgttcttgccaatgagtttttgaacctccttttccaggtgtgtcacatagttctggggttaagaccagctactccggaagaagaaggacaaattattagaggatggttagaacgagagagcaggtatggtctgcaagcaggacacaactggtttatcatctccatgcagtggtggcaacagtggaaagaatatgtcaaatacgatgccaaccctgtggtaattgagccatcatctgttttgaatggaggaaaatactcatttggaactgcagcccatcctatggagcaggtcgaagatagaattggaagcagcctcagttacgtgaatactacagaagagaaattttcagacaacatttctactgcatctgaagcctcagaaactgctggcagcggctttctgtattctgccacaccaggggcagatgtttgctttgctcgacaacataacacttctgacaataacaaccagtgtttgctgggagccaatgggaatattttgttgcaccttaaccctcagaaaccaggggctattgataatcagccattagtaactcaagaaccagtaaaggctacatcattaacactagaaggaggacgattaaaacgaactccacagctgattcatggaagagactatgaaatggtcccagaacctgtgtggagagcactttatcactggtatggagcaaacctggccttacctagaccagttatcaagaacagcaagacagacatcccagagctggaattatttccccgctatcttctcttcctgagacagcagcctgccactcggacacagcagtctaacatctgggtgaatatgggaaatgtaccttctccgaatgcacctttaaagcgggtattagcctatacaggctgttttagtcgaatgcagaccatcaaggaaattcacgaatatctatctcaaaggctgcgcattaaagaggaagatatgcgcctgtggctatacaacagtgagaactaccttactcttctggatgatgaggatcataaattggaatatttgaaaatccaggatgaacaacacctggtaattgaagttcgcaacaaagatatgagttggcctgaggagatgtcttttatagcaaatagtagtaaaatagatagacacaaggttcccacagaaaagggagccacaggtctaagcaatctgggaaacacatgcttcatgaactcaagcatccagtgtgttagtaacacacagccactgacacagtattttatctcagggagacatctttatgaactcaacaggacaaatcccattggtatgaaggggcatatggctaaatgctatggtgatttagtgcaggaactttggagtggaactcagaagaatgttgccccattaaagcttcggtggaccatagcaaaatatgctcccaggtttaatgggtttcagcaacaggactcccaagaacttctggcttttctcttggatggtcttcatgaagatcttaatcgagtccatgaaaagccatatgtggaactgaaggacagtgatgggcgaccagactgggaagtagctgcagaggcctgggacaaccatctaagaagaaatagatcaattgttgtggatttgttccatgggcagctaagatctcaagtaaaatgcaagacatgtgggcatataagtgtccgatttgaccctttcaattttttgtctttgccactaccaatggacagttatatgcacttagaaataacagtgattaagttagatggtactacccctgtacggtatggactaagactgaatatggatgaaaagtacacaggtttaaaaaaacagctgagtgatctctgtggacttaattcagaacaaatccttctagcagaagtacatggttccaacataaagaactttcctcaggacaaccaaaaagtacgactctcagtgagtggatttttgtgtgcatttgaaattcctgtccctgtgtctccaatttcagcttctagtccaacacagacagatttctcctcttcgccatctacaaatgaaatgttcaccctaactaccaatggggacctaccccgaccaatattcatccccaatggaatgccaaacactgttgtgccatgtggaactgagaagaacttcacaaatggaatggttaatggtcacatgccatctcttcctgacagcccctttacaggttacatcattgcagtccaccgaaaaatgatgaggacagaactgtatttcctgtcatctcagaagaatcgccccagcctctttggaatgccattgattgttccatgtactgtgcatacccggaagaaagacctatatgatgcggtttggattcaagtatcccggttagcgagcccactcccacctcaggaagctagtaatcatgcccaggattgtgacgacagtatgggctatcaatatccattcactctacgagttgtgcagaaagatgggaactcctgtgcttggtgcccatggtatagattttgcagaggctgtaaaattgattgtggggaagacagagctttcattggaaatgcctatatcgctgtggattgggatcccacagcccttcaccttcgctatcaaacatcccaggaaagggttgtagatgagcatgagagtgtggagcagagtcggcgagcgcaagccgagcccatcaacctggacagctgtctccgtgctttcaccagtgaggaagagctaggggaaaatgagatgtactactgttccaagtgtaagacccactgcttagcaacaaagaagctggatctctggaggcttccacccatcctgattattcaccttaagcgatttcaatttgtaaatggtcggtggataaaatcacagaaaattgtcaaatttcctcgggaaagttttgatccaagtgcttttttggtaccaagagacccggctctctgccagcataaaccactcacaccccagggggatgagctctctgagcccaggattctggcaagggaggtgaagaaagtggatgcgcagagttcggctggggaagaggacgtgctcctgagcaaaagcccatcctcactcagcgctaacatcatcagcagcccgaaaggttctccttcttcatcaagaaaaagtggaaccagctgtccctccagcaaaaacagcagccctaatagcagcccacggactttggggaggagcaaagggaggctccggctgccccagattggcagcaaaaataaactgtcaagtagtaaagagaacttggatgccagcaaagaaaatggggctgggcagatatgtgagctggctgacgccttgagtcgagggcatgtgctggggggcagccaaccagagttggtcactcctcaggaccatgaggtagctttggccaatggattcctttatgagcatgaagcatgtggcaatggctacagcaatggtcagcttggaaaccacagtgaagaagacagcactgatgaccaaagagaagatactcgtattaagcctatttataatctatatgcaatttcgtgccattcaggaattctgggtgggggccattacgtcacttatgccaaaaacccaaactgcaagtggtactgttacaatgacagcagctgtaaggaacttcacccggatgaaattgacaccgactctgcctacattcttttctatgagcagcaggggatagactatgcacaatttctgccaaagactgatggcaaaaagatggcagacacaagcagtatggatgaagactttgagtctgattacaaaaagtactgtgtgttacagtaaagctaccactctggctgctagacagcttggcggtgagggagatgactccttgtagctgacatttggcaaaagcgtcactgaaaggcaagctaaatgtagttattttatcctgtggccctgaagcacaaaataaaaattctaattaaaatagttaactttaagagtagtaatcattttattttgaagtctcatacaagctctccgatagagaactttcaggcagatcccaccattagcctgtaaacaaaaggtttggcaccagccacctgggaccaaataagaattcaattgtgcttgtccagatatgaacaaatatgtagtgagtatagagtttaccataatcataacaaatattaaagatttccttggagtcagagtaaaaaacaaacaattataatgttgtctagggacgacatgatatgctacctcctttttcctgaagttttattccattatattgacaagatggagaaagcaagatcacgaaggtgtgcaaatgattcttaaggcatggacgaggatttttcaatttattttttaaactgtttccataccctttctttgtctttcttgctttttgtttttgccgttgtatttatgtttgagacacaaccagtcattggtggcaggggcatatagtggtcagtctgaaagggaggctctcttaagagctgtgtgccttccacccagagccttgtgggagacccagtagaaagaaacagcatcctgggaaatccagctaccatggccctcccagtggaggcatcttacatttaggatacttcaagtatcctcagaaatgtattctgcacccccggccccacccatgctgagggaaggggagcagttgccaatatttgcaccatcttcacatgcacctgttgcaacaagagcttctgggaaggtaagtggcattggagctagatcacgtttcacaattagtggttgttcttttctgtgtttgtcttgcactttaaaaaagagagaacacatgcaaatgaacttgcttgtgtgtatttgatggctctaagggctataaattacaaacaaaacacatcccagacattaggagttcataagtgtatttaatgaaattggtggttttaggaagtcaactttagttttgctttgtttgcatgtccactaatttttttattttgatatttgtcttttttttaaattttacagtagtcatcgaaagttatgtttctttgcttacttcatttttttctctaatcaagactggaacaaaagtataaatattatttatttcaggtagcatttttttcgtgtagttttttaatatatacttgaaggaaatgtttcaccttatttttggtctttgtttattcatttagaccctgcaagttgattctcattaattgtcagattccactaccctttcttcctcatagatagtaattaccaatgtaactaagtatttgtgttctgatatctgaggccagtaactattaatatctagttctcagagcatttggaaaggttatcttaaatggctacctaaattgaaatccttttcagaaaaaatataattgcaagtaggtaggactggcctaaattgtctaatgtaataaagtcagacaaaatgcatactttatagtttcaagattttcagtatataaaatctgtccattcccattaaaaagtggaagattttaaataatttctttacagatgttttatttaagcaggtagctcaatctactaatgttgtttgatctgtgtttgttatactggttgtaattaatttttttaattcatgaactagcagaaaatttattaaattaactattaactacattcaccttgtaaattactgtataaaacttgttgacaatgcactgactttagaaagatgttaatgtacataaatagagtgtaaataaaatagtgttgatgtaccg

SEQ ID NO: 188 - DNA, 1239 bp, Homo sapiens
ccatgactatctttattcacactcttctctgagcctgaaatgctccactcctcctttccaacctcccaccctcacccctaccccattccctcctcacgccccctgccccctgccccgtgttcatgccctgtgctggctctgcctccacacctgcctgctgcctcccacagagcccgcaaggcaggaacccagaccctggcctcagcacaagctccagtgcagaccccagcacccactctgcctggtcctgctcttccagggcccttccctggtggccgtgtggtcaggctgcacccagtccttttggcctccactgtggacagctatgagagacgcaacaagggtgctgcccgagttatcgggaccctgttgggaactgtcaacaaacactctgtggaggtcaccaattgcttttcagtgtcatacaatgagtcagatgaagtggttgttgacatggaatttgctaagaacatgtatgaactgcataaaaaagtttctccaaatgagctcatcttggggtggtacgctgccggccatgacatcacagagcactctgtgctgatccatgagtactacagccgagaggcccccaaccccatccacctcactgtggacacaagtctccagaacggccatatgagcatcaaagcctatgtcagcactttaatgggtgtccctgggaggaccgtgggagtgttcacacctttgacagtgaaatatgcatactatgacactgaatgcatcagagttgacctgatcatgaagacctgctttagccccaacagagtggttggactctcaagtgacctgcagcaagtaggaggggcatcagctcacatccaggatgccctgagcatagtgttgcaatatgcagaggatatactatctgcaaaggtgtcagctgacaatacaatcaggaaggtgggccacttcctgatgagcctggttaaccaagtaccgaaaatagttcccgatgactttgagaccatgctccacagcaacatcaatgacctgttgatggtggcctacctggccaacctcacacagtcacagattgccctcaatgaaaaacgtgtaaacctgtgaagccaccccaagcagtacgcttgctggtctaagtcttaaccccaggactcagaagtgaaggaaaaatgggttttttgtggtcttgagtcacactgagacagtcaactgtgtgtgactctaataaacgtagcctaccttttgtaaattaaagaa

SEQ ID NO: 189 - DNA, 2625 bp, Homo sapiens
gaaggacgtggggacacgggccagagtggctggccccacgcacggacaggagtgaacccgagctgtgccgaccaacccccaggatggcggaagctcaccaggccgtggccttccagttcacggtgaccccagacggggtcgacttccggctcagtcgggaggccctgaaacacgtctacctgtctgggatcaactcctggaagaaacgcctgatccgcatcaagaatggcatcctcaggggcgtgtaccctggcagccccaccagctggctggtcgtcatcatggcaacagtgggttcctccttctgcaacgtggacatctccttggggctggtcagttgcatccagagatgcctccctcaggggtgtggcccctaccagaccccgcagacccgggcacttctcagcatggccatcttctccacgggcgtctgggtgacgggcatcttcttcttccgccaaaccctgaagctgcttctctgctaccatgggtggatgtttgagatgcatggcaagaccagcaacttgaccaggatctgggctatgtgtatccgccttctatccagccggcaccctatgctctacagcttccagacatctctgcccaagcttcctgtgcccagggtgtcagccacaattcagcggtacctagagtctgtgcgccccttgttggatgatgaggaatattaccgcatggagttgctggccaaagaattccaggacaagactgcccccaggctgcagaaatacctggtgctcaagtcatggtgggcaagtaactatgtgagtgactggtgggaagagtacatctaccttcgaggcaggagccctctcatggtgaacagcaactattatgtcatggaccttgtgctcatcaagaatacagacgtgcaggcagcccgcctgggaaacatcatccacgccatgatcatgtatcgccgtaaactggaccgtgaagaaatcaagcctgtgatggcactgggcatagtgcctatgtgctcctaccagatggagaggatgttcaacaccactcggatcccgggcaaggacacagatgtgctacagcacctctcagacagccggcacgtggctgtctaccacaagggacgcttcttcaagctgtggctctatgagggcgcccgtctgctcaagcctcaggatctggagatgcagttccagaggatcctggacgacccctccccacctcagcctggggaggagaagctggcagccctcactgcaggaggaagggtggagtgggcgcaggcacgccaggccttctttagctctggaaagaataaggctgccttggaggccatcgagcgtgccgctttcttcgtggccctggatgaggaatcctactcctatgaccccgaagatgaggccagcctcagcctctatggcaaggccctgctacatggcaactgctacaacaggtggtttgacaaatccttcactctcatttccttcaagaatggccagttgggtctcaatgcagagcatgcgtgggcagatgctcccatcattgggcacctctgggagtttgtcctgggcacagacagcttccacctgggctacacggagaccgggcactgcctgggcaaaccgaaccctgcgctcgcacctcctacacggctgcagtgggacattccaaaacagtgccaggcggtcatcgagagttcctaccaggtggccaaggcgttggcagacgacgtggagttgtactgcttccagttcctgccctttggcaaaggcctcatcaagaagtgccggaccagccctgatgcctttgtgcagatcgcgctgcagctggctcacttccgggacaggggtaagttctgcctgacctatgaggcctcaatgaccagaatgttccgggagggacggactgagactgtgcgttcctgtaccagcgagtccacagcctttgtgcaggccatgatggaggggtcccacacaaaagcagacctgcgagatctcttccagaaggctgctaagaagcaccagaatatgtaccgcctggccatgaccggggcagggatcgacaggcacctcttctgcctttacttggtctccaagtacctaggagtcagctctcctttccttgctgaggtgctctcggaaccctggcgtctctccaccagccagatcccccaatcccagatccgcatgttcgacccagagcagcaccccaatcacctgggcgctggaggtggctttggccctgtagcagatgatggctatggagtttcctacatgattgcaggcgagaacacgatcttcttccacatctccagcaagttctcaagctcagagacgaacgcccagcgctttggaaaccacatccgcaaagccctgctggacattgctgatcttttccaagttcccaaggcctacagctgaagcccttaggtacctgtgttttgtttgggaactcggaggccctccccctcccccagctcagaccacagaggtggcaagagaagggctgaagctggaagactgttcatgagggacttgtgtgacctgctttgaaatgtgtgactctgctgagtgacgtaggctctgagatagctgtccacgcccacgtgtttgcttggaataaatacttgcctcagaaccttca

SEQ ID NO: 190 - DNA, 10267 bp, Homo sapiens
ggaaactctgaaagaacttagaatcagcattttgagagcagaagcttgggcatgctgtgattttccaataaactgctatcacaatgtcaaaatgcagttcagacaagagcaacacagagatctcaaacattaaaacgtaagctgtgctagaacaaaaatgcaatgaaagaaacactggatgaatgaaaagccctgctttgcaacccctcagcatggcaggcctgcagctcatgacccctgcttcctcaccaatgggtcctttctttggactgccatggcaacaagaagcaattcatgataacatttatacgccaagaaaatatcaggttgaactgcttgaagcagctctggatcataataccatcgtctgtttaaacactggctcagggaagacatttattgcagtactactcactaaagagctgtcctatcagatcaggggagacttcagcagaaatggaaaaaggacggtgttcttggtcaactctgcaaaccaggttgctcaacaagtgtcagctgtcagaactcattcagatctcaaggttggggaatactcaaacctagaagtaaatgcatcttggacaaaagagagatggaaccaagagtttactaagcaccaggttctcattatgacttgctatgtcgccttgaatgttttgaaaaatggttacttatcactgtcagacattaaccttttggtgtttgatgagtgtcatcttgcaatcctagaccacccctatcgagaaattatgaagctctgtgaaaattgtccatcatgtcctcgcattttgggactaactgcttccattttaaatgggaaatgtgatccagaggaattggaagaaaagattcagaaactagagaaaattcttaagagtaatgctgaaactgcaactgacctggtggtcttagacaggtatacttctcagccatgtgagattgtggtggattgtggaccatttactgacagaagtgggctttatgaaagactgctgatggaattagaagaagcacttaattttatcaatgattgtaatatatctgtacattcaaaagaaagagattctactttaatttcgaaacagatactatcagactgtcgtgccgtattggtagttctgggaccctggtgtgcagataaagtagctggaatgatggtaagagaactacagaaatacatcaaacatgagcaagaggagctgcacaggaaatttttattgtttacagacactttcctaaggaaaatacatgcactatgtgaagagcacttctcacctgcctcacttgacctgaaatttgtaactcctaaagtaatcaaactgctcgaaatcttacgcaaatataaaccatatgagcgacagcagtttgaaagcgttgagtggtataataatagaaatcaggataattatgtgtcatggagtgattctgaggatgatgatgaggatgaagaaattgaagaaaaagagaagccagagacaaattttccttctccttttaccaacattttgtgcggaattatttttgtggaaagaagatacacagcagttgtcttaaacagattgataaaggaagctggcaaacaagatccagagctggcttatatcagtagcaatttcataactggacatggcattgggaagaatcagcctcgcaacaaacagatggaagcagaattcagaaaacaggaagaggtacttaggaaatttcgagcacatgagaccaacctgcttattgcaacaagtattgtagaagagggtgttgatataccaaaatgcaacttggtggttcgttttgatttgcccacagaatatcgatcctatgttcaatctaaaggaagagcaagggcacccatctctaattatataatgttagcggatacagacaaaataaaaagttttgaagaagaccttaaaacctacaaagctattgaaaagatcttgagaaacaagtgttccaagtcggttgatactggtgagactgacattgatcctgtcatggatgatgatgacgttttcccaccatatgtgttgaggcctgacgatggtggtccacgagtcacaatcaacacggccattggacacatcaatagatactgtgctagattaccaagtgatccgtttactcatctagctcctaaatgcagaacccgagagttgcctgatggtacattttattcaactctttatctgccaattaactcacctcttcgagcctccattgttggtccaccaatgagctgtgtacgattggctgaaagagttgtagctctcatttgctgtgagaaactgcacaaaattggcgaactggatgaccatttgatgccagttgggaaagagactgttaaatatgaagaggagcttgatttgcatgatgaagaagagaccagtgttccaggaagaccaggttccacgaaacgaaggcagtgctacccaaaagcaattccagagtgtttgagggatagttatcccagacctgatcagccctgttacctgtatgtgataggaatggttttaactacacctttacctgatgaactcaactttagaaggcggaagctctatcctcctgaagataccacaagatgctttggaatactgacggccaaacccatacctcagattccacactttcctgtgtacacacgctctggagaggttaccatatccattgagttgaagaagtctggtttcatgttgtctctacaaatgcttgagttgattacaagacttcaccagtatatattctcacatattcttcggcttgaaaaacctgcactagaatttaaacctacagacgctgattcagcatactgtgttctacctcttaatgttgttaatgactccagcactttggatattgactttaaattcatggaagatattgagaagtctgaagctcgcataggcattcccagtacaaagtatacaaaagaaacaccctttgtttttaaattagaagattaccaagatgccgttatcattccaagatatcgcaattttgatcagcctcatcgattttatgtagctgatgtgtacactgatcttaccccactcagtaaatttccttcccctgagtatgaaacttttgcagaatattataaaacaaagtacaaccttgacctaaccaatctcaaccagccactgctggatgtggaccacacatcttcaagacttaatcttttgacacctcgacatttgaatcagaaggggaaagcgcttcctttaagcagtgctgagaagaggaaagccaaatgggaaagtctgcagaataaacagatactggttccagaactctgtgctatacatccaattccagcatcactgtggagaaaagctgtttgtctccccagcatactttatcgccttcactgccttttgactgcagaggagctaagagcccagactgccagcgatgctggcgtgggagtcagatcacttcctgcggattttagataccctaacttagacttcgggtggaaaaaatctattgacagcaaatctttcatctcaatttctaactcctcttcagctgaaaatgataattactgtaagcacagcacaattgtccctgaaaatgctgcacatcaaggtgctaatagaacctcctctctagaaaatcatgaccaaatgtctgtgaactgcagaacgttgctcagcgagtcccctggtaagctccacgttgaagtttcagcagatcttacagcaattaatggtctttcttacaatcaaaatctcgccaatggcagttatgatttagctaacagagacttttgccaaggaaatcagctaaattactacaagcaggaaatacccgtgcaaccaactacctcatattccattcagaatttatacagttacgagaaccagccccagcccagcgatgaatgtactctcctgagtaataaataccttgatggaaatgctaacaaatctacctcagatggaagtcctgtgatggccgtaatgcctggtacgacagacactattcaagtgctcaagggcaggatggattctgagcagagcccttctattgggtactcctcaaggactcttggccccaatcctggacttattcttcaggctttgactctgtcaaacgctagtgatggatttaacctggagcggcttgaaatgcttggcgactcctttttaaagcatgccatcaccacatatctattttgcacttaccctgatgcgcatgagggccgcctttcatatatgagaagcaaaaaggtcagcaactgtaatctgtatcgccttggaaaaaagaagggactacccagccgcatggtggtgtcaatatttgatccccctgtgaattggcttcctcctggttatgtagtaaatcaagacaaaagcaacacagataaatgggaaaaagatgaaatgacaaaagactgcatgctggcgaatggcaaactggatgaggattacgaggaggaggatgaggaggaggagagcctgatgtggagggctccgaaggaagaggctgactatgaagatgatttcctggagtatgatcaggaacatatcagatttatagataatatgttaatggggtcaggagcttttgtaaagaaaatctctctttctcctttttcaaccactgattctgcatatgaatggaaaatgcccaaaaaatcctccttaggtagtatgccattttcatcagattttgaggattttgactacagctcttgggatgcaatgtgctatctggatcctagcaaagctgttgaagaagatgactttgtggtggggttctggaatccatcagaagaaaactgtggtgttgacacgggaaagcagtccatttcttacgacttgcacactgagcagtgtattgctgacaaaagcatagcggactgtgtggaagccctgctgggctgctatttaaccagctgtggggagagggctgctcagcttttcctctgttcactggggctgaaggtgctcccggtaattaaaaggactgatcgggaaaaggccctgtgccctactcgggagaatttcaacagccaacaaaagaacctttcagtgagctgtgctgctgcttctgtggccagttcacgctcttctgtattgaaagactcggaatatggttgtttgaagattccaccaagatgtatgtttgatcatccagatgcagataaaacactgaatcaccttatatcggggtttgaaaattttgaaaagaaaatcaactacagattcaagaataaggcttaccttctccaggcttttacacatgcctcctaccactacaatactatcactgattgttaccagcgcttagaattcctgggagatgcgattttggactacctcataaccaagcacctttatgaagacccgcggcagcactccccgggggtcctgacagacctgcggtctgccctggtcaacaacaccatctttgcatcgctggctgtaaagtacgactaccacaagtacttcaaagctgtctctcctgagctcttccatgtcattgatgactttgtgcagtttcagcttgagaagaatgaaatgcaaggaatggattctgagcttaggagatctgaggaggatgaagagaaagaagaggatattgaagttccaaaggccatgggggatatttttgagtcgcttgctggtgccatttacatggatagtgggatgtcactggagacagtctggcaggtgtactatcccatgatgcggccactaatagaaaagttttctgcaaatgtaccccgttcccctgtgcgagaattgcttgaaatggaaccagaaactgccaaatttagcccggctgagagaacttacgacgggaaggtcagagtcactgtggaagtagtaggaaaggggaaatttaaaggtgttggtcgaagttacaggattgccaaatctgcagcagcaagaagagccctccgaagcctcaaagctaatcaacctcaggttcccaatagctgaaaccgctttttaaaattcaaaacaagaaacaaaacaaaaaaaattaaggggaaaattatttaaatcggaaaggaagacttaaagttgttagtgagtggaatgaattgaaggcagaatttaaagtttggttgataacaggatagataacagaataaaacatttaacatatgtataaaattttggaactaattgtagttttagttttttgcgcaaacacaatcttatcttctttcctcacttctgctttgtttaaatcacaagagtgctttaatgatgacatttagcaagtgctcaaaataattgacaggttttgtttttttttttttgagtttatgtcagctttgcttagtgttagaaggccatggagcttaaacctccagcagtccctaggatgatgtagattcttctccatctctccgtgtgtgcagtagtgccagtcctgcagtagttgataagctgaatagaaagataaggttttcgagaggagaagtgcgccaatgttgtcttttctttccacgttatactgtgtaaggtgatgttcccggtcgctgttgcacctgatagtaagggacagatttttaatgaacattggctggcatgttggtgaatcacattttagttttctgatgccacatagtcttgcataaaaaagggttcttgccttaaaagtgaaaccttcatggatagtctttaatctctgatctttttggaacaaactgttttacattcctttcattttattatgcattagacgttgagacagcgtgatacttacaactcactagtatagttgtaacttattacaggatcatactaaaatttctgtcatatgtatactgaagacattttaaaaaccagaatatgtagtctacggatattttttatcataaaaatgatctttggctaaacaccccattttactaaagtcctcctgccaggtagttcccactgatggaaatgtttatggcaaataattttgccttctaggctgttgctctaacaaaataaaccttagacatatcacacctaaaatatgctgcagattttataattgattggttacttatttaagaagcaaaacacagcacctttacccttagtctcctcacataaatttcttactatacttttcataatgttgcatgcatatttcacctaccaaagctgtgctgttaatgccgtgaaagtttaacgtttgcgataaactgccgtaattttgatacatctgtgatttaggtcattaatttagataaactagctcattatttccatctttggaaaaggaaaaaaaaaaaaacttctttaggcatttgcctaagtttctttaattagacttgtaggcactcttcacttaaatacctcagttcttcttttcttttgcatgcatttttcccctgtttggtgctatgtttatgtattatgcttgaaattttaatttttttttttttgcactgtaactataatacctcttaatttacctttttaaaagctgtgggtcagtcttgcactcccatcaacataccagtagaggtttgctgcaatttgccccgttaattatgcttgaagtttaagaaagctgagcagaggtgtctcatatttcccagcacatgattctgaacttgatgcttcgtggaatgctgcatttatatgtaagtgacatttgaatactgtccttcctgctttatctgcatcatccacccacagagaaatgcctctgtgcgagtgcaccgacagaaaactgtcagctctgctttctaaggaaccctgagtgaggggggtattaagcttctccagtgttttttgttgtctccaatcttaaacttaaattgagatctaaattattaaacgagtttttgagcaaattaggtgacttgttttaaaaatatttaattccgatttggaaccttagatgtctatttgattttttaaaaaaccttaatgtaagatatgaccagttaaaacaaagcaattcttgaattatataactgtaaaagtgtgcagttaacaaggctggatgtgaattttattctgagggtgatttgtgatcaagtttaatcacaaatctcttaatatttataaactacctgatgccaggagcttagggctttgcattgtgtctaatacattgatcccagtgttacgggattctcttgattcctggcaccaaaatcagattgttttcacagttatgattcccagtgggagaaaaatgcctcaatatatttgtaaccttaagaagagtatttttttgttaatactaagatgttcaaacttagacatgattaggtcatacattctcaggggttcaaatttccttctaccattcaaatgttttatcaacagcaaacttcagccgtttcactttttgttggagaaaaatagtagattttaatttgactcacagtttgaagcattctgtgatcccctggttactgagttaaaaaataaaaaagtacgagttagacatatgaaatggttatgaacgcttttgtgctgctgatttttaatgctgtaaagttttcctgtgtttagcttgttgaaatgttttgcatctgtcaattaaggaaaaaaaaaatcactctatgttgccccactttagagccctgtgtgccaccctgtgttcctgtgattgcaatgtgagaccgaatgtaatatggaaaacctaccagtggggtgtggttgtgccctgagcacgtgtgtaaaggactggggaggcgtgtcttgaaaaagcaactgcagaaattccttatgatgattgtgtgcaagttagttaacatgaaccttcatttgtaaattttttaaaatttcttttataatatgctttccgcagtcctaactatgctgcgttttataatagctttttcccttctgttctgttcatgtagcacagataagcattgcacttggtaccatgctttacctcatttcaagaaaatatgcttaacagagaggaaaaaaatgtggtttggccttgctgctgttttgatttatggaatttgaaaaagataattataatgcctgcaatgtgtcatatactcgcacaacttaaataggtcatttttgtctgtggcatttttactgtttgtgaaagtatgaaacagatttgttaactgaactcttaattatgtttttaaaatgtttgttatatttcttttcttttttcttttatattacgtgaagtgatgaaatttagaatgacctctaacactcctgtaattgtcttttaaaatactgatatttttatttgttaataatactttgccctcagaaagattctgataccctgccttgacaacatgaaacttgaggctgctttggttcatgaatccaggtgttcccccggcagtcggcttcttcagtcgctccctggaggcaggtgggcactgcagaggatcactggaatccagatcgagcgcagttcatgcacaaggccccgttgatttaaaatattggatcttgctctgttagggtgtctaatccctttacacaagattgaagccaccaaactgagaccttgatacctttttttaactgcatctgaaattatgttaagagtctttaacccatttgcattatctgcagaagagaaactcatgtcatgtttattacctatatggttgttttaattacatttgaataattatatttttccaaccactgattacttttcaggaatttaattatttccagataaatttctttattttatattgtacatgaaaagttttaaagatatgtttaagaccaagactattaaaatgatttttaaagttgttggagacgccaatagcaatatctaggaaatttgcattgagaccattgtattttccactagcagtgaaaatgatttttcacaactaacttgtaaatatattttaatcattacttctttttttctagtccatttttatttggacatcaaccacagacaatttaaattttatagatgcactaagaattcactgcagcagcaggttacatagcaaaaatgcaaaggtgaacaggaagtaaatttctggcttttctgctgtaaatagtgaaggaaaattactaaaatcaagtaaaactaatgcatattatttgattgacaataaaatatttaccatcacatgctgcagctgttttttaaggaacatgatgtcattcattcatacagtaatcatgctgcagaaatttgcagtctgcaccttatggatcacaattacctttagttgttttttttgtaataattgtagccaagtaaatctccaataaagttatcgtctgttcaaaaaaaaaaaaaaaaaaaaaaaaaaaaaaaaaaaaaaaaaaaaaaa

SEQ ID NO: 191 - DNA, 1997 bp, Homo sapiens
agtccccgaggttccaccttaaggggcgggccggggcggggctccgctgccccttcccagaggccgcgcctgctgctgagcagatgcagtagccgaaactgcgcggaggcacagaggccggggagagcgttctgggtccgagggtccaggtaggggttgagccaccatctgaccgcaagctgcgtcgtgtcgccggttctgcaggcaccatgagccaggacaccgaggtggatatgaaggaggtggagctgaatgagttagagcccgagaagcagccgatgaacgcggcgtctggggcggccatgtccctggcgggagccgagaagaatggtctggtgaagatcaaggtggcggaagacgaggcggaggcggcagccgcggctaagttcacgggcctgtccaaggaggagctgctgaaggtggcaggcagccccggctgggtacgcacccgctgggcactgctgctgctcttctggctcggctggctcggcatgcttgctggtgccgtggtcataatcgtgcgagcgccgcgttgtcgcgagctaccggcgcagaagtggtggcacacgggcgccctctaccgcatcggcgaccttcaggccttccagggccacggcgcgggcaacctggcgggtctgaaggggcgtctcgattacctgagctctctgaaggtgaagggccttgtgctgggtccaattcacaagaaccagaaggatgatgtcgctcagactgacttgctgcagatcgaccccaattttggctccaaggaagattttgacagtctcttgcaatcggctaaaaaaaagagcatccgtgtcattctggaccttactcccaactaccggggtgagaactcgtggttctccactcaggttgacactgtggccaccaaggtgaaggatgctctggagttttggctgcaagctggcgtggatgggttccaggttcgggacatagagaatctgaaggatgcatcctcattcttggctgagtggcaaaatatcaccaagggcttcagtgaagacaggctcttgattgcggggactaactcctccgaccttcagcagatcctgagcctactcgaatccaacaaagacttgctgttgactagctcatacctgtctgattctggttctactggggagcatacaaaatccctagtcacacagtatttgaatgccactggcaatcgctggtgcagctggagtttgtctcaggcaaggctcctgacttccttcttgccggctcaacttctccgactctaccagctgatgctcttcaccctgccagggacccctgttttcagctacggggatgagattggcctggatgcagctgcccttcctggacagcctatggaggctccagtcatgctgtgggatgagtccagcttccctgacatcccaggggctgtaagtgccaacatgactgtgaagggccagagtgaagaccctggctccctcctttccttgttccggcggctgagtgaccagcggagtaaggagcgctccctactgcatggggacttccacgcgttctccgctgggcctggactcttctcctatatccgccactgggaccagaatgagcgttttctggtagtgcttaactttggggatgtgggcctctcggctggactgcaggcctccgacctgcctgccagcgccagcctgccagccaaggctgacctcctgctcagcacccagccaggccgtgaggagggctcccctcttgagctggaacgcctgaaactggagcctcacgaagggctgctgctccgcttcccctacgcggcctgacttcagcctgacatggacccactacccttctcctttccttcccaggccctttggcttctgatttttctcttttttaaaaacaaacaaacaaactgttgcagattatgagtgaacccccaaatagggtgttttctgccttcaaataaaagtcacccctgcatggtgaagtcttccctctgcttctctcaaaaaaaaaaa

SEQ ID NO: 192 - DNA, 3196 bp, Homo sapiens
gcggaggccacccagagctcacagcctcctgccagcgcgctctctgtttctctgcagccccgaagctcgcgaatgtagcaggcgccccaagctcggtcctcaagaagccatggcggaatccaggggccgtctgtacctttggatgtgcttggctgctgcgctggcatctttcctgatgggatttatggtgggctggtttattaagcctctcaaagaaacgaccacttctgtgcgctatcatcaaagtatacggtggaaactggtatccgaaatgaaagctgaaaacatcaaatcatttcttcgttcttttacaaagcttcctcatctggcaggaacagaacaaaatttcttgcttgccaagaaaatccaaacccagtggaagaaatttggactagattcagccaagttggttcattatgatgtcctcttatcttaccccaatgagacaaatgccaactatatatcgattgtggatgaacatgaaactgagattttcaaaacatcataccttgaaccaccaccagatggctatgagaatgttacaaatattgtgccaccatataatgctttctcagcccaaggcatgccagagggagatcttgtatatgtgaactatgctcgcactgaagactttttcaaactagaaagagagatgggcatcaactgtactgggaagattgttattgcaagatatggaaaaatcttcagaggaaataaagttaaaaatgccatgttagcaggagccataggaatcatcttgtactcagatccagctgactactttgctcctgaggtacagccatatcccaaaggatggaatcttcctggaactgcagcccagagaggaaatgtgttaaatttgaatggtgctggtgacccactcactccaggctatccagcaaaagaatacactttcagacttgatgttgaagaaggagtgggaatcccccgaatacctgtacatcccattggatataatgatgcagaaatattattacgctacttgggaggaattgctccaccagataagagttggaagggagcccttaatgtgagttatagtatcggacctggctttacagggagtgattctttcaggaaggttagaatgcatgtttataacatcaataaaattacaaggatttacaatgtagttggaactatcagaggatctgtggaacctgacaggtatgttattctgggaggtcaccgggactcctgggtatttggagctattgacccaaccagtggggttgctgttttgcaagaaattgcccggagttttggaaaactgatgagtaaaggctggagacctagaagaactatcatttttgccagctgggatgcagaagaatttggacttctgggttccacagaatgggctgaggagaatgtcaaaatactccaggagagaagcattgcttatatcaactcggattcatctatagaaggcaattatactctcagagttgactgtactccccttctttaccaattagtgtataaactgacaaaagagatccccagccctgatgatgggtttgagagtaaatcactgtatgaaagctggttggaaaaagacccttcacctgaaaataaaaatttgcctagaatcaataagctgggatctggaagtgactttgaagcttattttcagagacttggaattgcttcaggcagagcccgttacactaagaataagaaaacagataagtacagcagctacccagtgtaccacacaatttatgagacatttgaattggtagagaaattttatgaccccacatttaaaaaacaactttctgtggctcaattacgaggagcactggtatatgagcttgtggattctaaaatcattccttttaatattcaagactatgcagaagctttgaaaaactatgcagcaagtatctataatctatctaagaaacatgatcaacaattgacagaccatggagtatcatttgactccttattttctgctgtgaaaaacttctcagaggctgcttcagattttcataaacgacttatacaagttgatcttaacaatcccattgcagtgagaatgatgaatgaccaactgatgctcctggaaagagcattcatcgatcctcttggtttaccaggaaagctgttctataggcacatcatatttgctccaagtagccacaacaaatatgctggagaatcatttcctggaatctatgatgctatctttgatattgaaaataaagccaactctcgtttggcctggaaagaagtaaagaaacatatttctattgcagcttttacaattcaagcagcagcaggaactctgaaagaagtattatagaaggtctcaagtggctagccattaaaggtgttgctaaaagtctgaggataaaattcacctttctgataacttatgaagccagggtgttctaaactcttttcatgtcatgttttgattataggctttggtcttttcatctgcaaagccttttttttttgctctttaaaagttaataattatattagcaaagtgttaatctaatgaagtaaaaaactcctgtgtggcagaaagtaaaagaaaattccctaaattatagcaaggaacatgaattctcagacattgtgagtgtgggaatgtaaaatggtaaaatcacttttgaaaacagtttggcagtttcctataaagttaaacatacacttttactttaggactccagaattccacttctagttatttattcaagagaaggaaaaacaatgatcacagcaatacttgtatgcatgttcattgcaacttaaaagcgtaaaaaccccaaatgtccatccacagacgaatgtataaactgtggtatccattacacaatagactacttactactcagcaataaaaatgaagtaactttcaataaatgcaatattattggcagacattgttgaaggaaaaaagccagacaaacaactacataaaatatgtttctatttagatgaagtggcaaactaatctgtagtgttaaaaattagattagtgattgcctgggccaagtggcaggttggggaggatggctgcaaagaagtatgaggaaactttctccaatagatgagaattttccgtatcttgatctgagtggcaaattgtaaacttaaaatatatataaaatttattgtatgaaaattaagcctcaataaacgtgattataaaaaacaa

SEQ ID NO: 193 - DNA, 3461 bp, Homo sapiens
caggtgcgggggccctcgccgccaccctgcttatctggggacagtcccggaacccggtgacccggctccgccccaacccgcgccctcgtccacccgcagcagccaaggcctcttccccggccccgggagcccgcgccacgcccgtcgctcgcgcgttccagtccaggctacagcaggggctctccagcctgcattccatggccaacagcagtgcagctgcagaagcacttctggaagcctcctgacttgaactagaccttggacaccctctccagagcccagcaattgtgagggactgatggagaagtatgtggctgctatggtgctgagtgcagctggagatgccctggggtactacaatgggaagtgggagttcctccaggatggggagaagatacaccggcagttggcccagctgggcggcttggatgccctagacgtgggaaggtggagagttagtgacgacacagtgatgcacttggccacagcagaagctcttgtggaagctgggaaagcccctaagttgactcaactgtattacctccttgctaagcattaccaagactgcatggaagacatggatgggcgggcaccaggtggtgcctcggtgcacaacgccatgcagctgaagccgggcaagcccaatggctggaggattcccttcaacagccatgagggcggctgtggggctgccatgcgggccatgtgcatcggtctcaggttcccacaccatagccaactggacacactgatccaagtgagcatcgagagtggtcggatgacccaccaccacccaacaggctacctgggggcccttgcgtctgctctttttacagcctatgctgtgaatagcagaccacccttgcagtggggaaaaggactgatggagctgctaccagaagctaaaaagtacattgtccaatcaggctactttgtagaggaaaatcttcaacactggtcctacttccaaaccaaatgggaaaattacctaaaacttagagggattttggatggagaatcagcccctaccttccctgagtctttcggtgtgaaggagagggatcagttctacacctccctgagctactctggctggggtggcagcagtgggcacgatgcccccatgattgcctacgatgctgttcttgctgcaggagactcctggaaggagcttgcccaccgagcctttttccatggtggagacagtgattctacagctgccattgctggctgctggtggggagttatgtatggttttaaaggagtgagtccctccaactatgagaaactagaatacagaaaccggctggaagagacagctagggctttatattctctcgggtcaaaagaagacactgtaatttccctttagggagacgtgatgttcacttctgatggattcttcttttgtgtatttccttttctgctatttcttttcagtttttccaaagtcaagagtcttaaccttgtactcagggaattttgagataacaagtcccttgggcaccttaagctcagttttttcaggctcatcctgttcttccagaatctatcccttttcttacactgaagagtcctttagctcaattgatagggtcagcgtctcgcaagcaaaaaatctcatgacctcatatttgagtcttcattttcatcatctacttgttctaaaagttttttctgtttgtctcaagttgggttcccacaaagtggactttgagacaaagatctgaatgcaagcagtttatatgggagatgattccaggaaataccgatatgagaatggggaaatgaaaccaggaagggaagagagctagtatggggtatgttaatgagcaggtttccactgtgggcggttggcactctgccatctgagtcctctgcctaaagcattcctcagaactgtcccatttgaagggcaagcaaacctggggtatttatccactgacttccatctgacactggttgaggaccactgccagggatgctaactccctggtaattcttggcttaccctttgtacaaaccaaaccttagtgtcttcaggtaaagactcagagatacttgcaggggcaagctgtaaagggcatgggaacagtgagggacatatgtggggtcctaacaatatctgctaggctggtctacctcctaaatatactctgaatctatcacctctattgccttcttgcactgaggatttttcagctggatttctgcaatccaagctactcaagtctgggagatgctgctctgagctgctctcagtactctcctcatcatggcagttaacacattaccaattttgttattgtctgtttgcttgtttgcattatttctaaacagaacctagcacagtgcttgggcagccaataggcattaatcagtatctattgagtgttatgaactagcctcctagctcgtgcttccctcattaccctccagagttatgtttacgaataacaaattgaccatgctaaactaatcatgttccaatgaatacatcacctttcttcatttcttgatgctcttcccaatccttgtctacctgataataaattcttacttgtccttcaagacccaactcagatagatagagcttcctgagtgaaacctgctttgattgttcaggcacttggccaccttctcctcactcctcccacagccttctgtcttggccttgtcatcacatcaatcctgttgtgtggtgctgtgtgtcttctgggtcagtcctaggcacatgctgcccagcacatgtccacctgggaaatgagatgccatcgtcacattcatttggtcaccctcagtccagccagtgggcttgctctcatttggcctgttctcaggggtgggaaggaagagcgtcccttccttctccttttgagaaaaccacagaactatgactctcatgatttttcctttgtgaaatccctggttttcagctggaagcggtgggtaaatgaggtctgatgatagcagtcctgccaccttctagttcatcccataggaatgtttttccaagtccttccagtctttttagaacgtggtggaggagggttgtgtgtgccccagggggtcgggggtaggggatgcagggaggatcttagcatttgttgttttctagtgcagggctttagccacaattgtaaacaacaggaaaaggctctttagagatcctattagatttgctttgccgattgtcactcttcatcacaggcacatttcaaaaagaggttagactttcagacttcttttttctcaaacctcaaaacttccaccccaaacttcgctctcagctggtgactttgcttctttatgtgtgtgtatgtgtgtcagagaaagagagagagagagagagaagggaggatgagaacgaatggggggaagagataaactttatgcataacattagggtaaatcaataaagatggtctgacacatcgtaaaaaaaaaaaaaaaaaaaaaaa

SEQ ID NO: 194 - DNA, 6670 bp, Homo sapiens
gttggggaggcggtttcctagactacgacaccggaaagctgggggaggcgctccgggatactgagggcggagggcggtggcagcgctggcgctggggaccggcttggtggcttcgggaaacagtttggcgccggcggccgtccgtgttactccgcatcccgccccgtctcggcacggctagcagccccctggccaccagcgtccagcaatgtgtctcaccggccgggcgtagcagctgcgcgtgcgcggaaccgcggggccatgagcgaagccggcggccggggctgtgggtccccggttccccagcgagcgcgatggagactagtggcggcgacggccgcgttctgcctggtgtcggccacctccgtgtggacggcgggggccgagcccatgagtagggaggagaaacagaagcttgggaatcaagtactggaaatgtttgatcatgcttatggtaactatatggaacatgcttaccctgctgatgaactcatgcctttaacctgtagaggtcgagttagaggccaagagccaagtcgcggtgacgttgatgatgccttgggaaaattttctctgacactgattgattctttggacactcttgtggttttaaataaaactaaagaatttgaagatgcagtgagaaaagttttaagagatgttaatttagataacgatgtagtcgtatcagtctttgaaacaaacatcagagttcttgggggtcttttgggtgggcactccctggcaatcatgctgaaagaaaaaggtgaatatatgcagtggtacaatgatgaacttctccaaatggcaaagcagttaggttacaaacttttaccggctttcaacactaccagtggccttccttatccaagaattaatttaaagtttggcatcagaaaaccagaagctcggacaggaactgagacagatacctgtacagcttgtgcaggtaccttgatccttgaatttgctgctttaagtcgattcacaggagcaacaatatttgaggaatatgccagaaaagctcttgattttctctgggaaaaaagacagcgaagtagtaatttagtgggcgtgactataaatattcatactggagattgggtacgaaaagatagtggagttggagcagggattgattcatattatgaatatctgttgaaagcctatgtcttgcttggagatgacagttttctggaaagatttaacacacactatgatgccataatgaggtatattagccagccacctcttctacttgatgtgcatatccacaaaccaatgctgaatgctcggacttggatggatgctttgcttgccttcttcccaggcttgcaggtgttaaagggggatattagacctgctattgaaactcatgaaatgttatatcaggtgattaaaaaacacaattttctaccagaggcatttaccacagatttcagagtacactgggctcaacatcctttaaggccagaatttgcagaaagtacctacttcttatataaagctacaggagatccttactaccttgaagtagggaagacacttattgaaaatttaaataaatatgctagagtgccttgcggatttgctgccatgaaggatgttcgtactggaagtcatgaggacagaatggattctttcttcttggctgaaatgtttaaatatctttacctgttatttgctgataaagaagacattatttttgacatagaagattacatctttacaacagaagctcatctgttacctctttggctctctactacaaatcaaagcatctctaaaaagaacacaacctcggaatatacagaactggatgacagtaacttcgattggacttgtccaaatactcagatcctctttcctaatgacccattgtatgctcaaagtattcgtgagcccttgaaaaatgtggtggataagagctgtcctagaggcatcatcagagtagaggagagtttcaggagtggagctaaaccccctctgagagccagagatttcatggccactaaccctgagcatttagaaatcctgaagaagatgggggtgagtttgattcacctcaaagatgggagagtccagttggtccaacatgcaatccaagctgctagttcaatcgacgctgaagatgggttgaggttcatgcaggagatgattgaattgtcaagtcagcaacaaaaagaacagcagctgcctccacgagctgtacaaattgtttcccacccattttttggcagggtagtattgactgctggaccagctcagtttgggctggatctgtctaaacataaagagacaagaggatttgttgcaagcagtaaaccatccaatggttgttcagagcttactaacccagaggcagtgatgggaaaaatcgcactgatacaaagaggacagtgcatgtttgcagaaaaggcacgcaacatccagaatgctggagccattggtggcattgttattgatgacaatgaggggagcagcagtgatactgcccctctgttccagatggcaggtgatggaaaggatacagatgacatcaagatccccatgctgttcttattcagcaaagaaggaagtatcatactggatgccatccgggaatatgaggaggtagaagtgctcctctctgataaagcaaaagatcgagatcctgaaatggaaaatgaagaacaaccatcctctgaaaatgattctcagaatcagagtggtgaacagatttcatcaagttctcaggaggttgatttggttgatcaagagtcttctgaggaaaattctctaaattctcacccagaatcattatctctagcagatatggacaatgctgcaagcatttccccttctgaacagacttctaatcccacagaaaaccatgagactacaaatcttaatggtgaatgtacagatttagataaccagcttcaagaacaatcagaaactgaggaagattccaatcctaatgttagctggggtaaaaaggtccagcctatagactccatattagcagactggaatgaagatatagaagcatttgaaatgatggagaaggatgagctatgacttgctaaacaatctgttggtaggtatttaaaaagaaaaggtaaactgtgtgtggttaatagacatcctaatactaagcaggctttctaatgggaggctttaagtatggtgatgaacaaccacgttctgactggcgtagttatcgtaggaatctggagcatgctgtgttagaattgaccttgtttaaaactgtcccatcaaaaatggaaatccacagttcccccttcaaatgcagcactgcaccaccctgcaacacctcaggccagggaaagattactgagcattcctgcgaaccagatttctgttgtctctggatagacaagaaacaaaattcatttagtagtggagtggggaataggagtttggatagccttctaattaaaggaagctcgcctttcttggttttgggggttagaggctcttttgggaagatgcatccgagtattgtggcattctgattatgctgccttcacaaaacactctaagtgacctaagtggttatgaagcaaatgcatttatggtgaaaacagtctttgctcattgctttctcttgtttcatttagtgacaaatgatcaagatgacttgattttttttccttcttaacaatgtcttttttatttaaaccaaaggtgaagccagtgtactttctcagtgagttctctgcataaagactaatcagtgggaccaggtaaaaaggtcatataatacattgtggagattgcttacttaatacttctgaaaaatggagtaagggagaaactgtaatgttgcaatatgaacctcccattgggccttccatagggaaagctgtgactactctgaaatggaacctagcattatatccttgtagggtagattataaatcatttccagttcatttctcttagaggtgattacctctagccatcagccttactccatcccatgtttggtatgcaatttgagccacaaggctcgtatcgccaacagctatatacattttgttccatttttctgtcttacagagccatgatagaactgtggttagtgagttaaaattcctggagtaactactgtttttctcctttgaaacttaggtttctaaagttgcacctaaggaatctgtcacattttctgttgaatcatggtttttgtttttgtttttaacagatattccttctgatacggacttgaaaattagtgtatggtgacctgtgtttaaaaaaaaaagtacaatacaactacatatagctatatagcttaatgagacttccaccccccccctttttttttttggtttgttgttgttgtagtagtctggtgctggccacatttaagtcttaaaaatttttaaattttgttgttgatgtttgtagacagccctgttgttgaaatcatggctttattcattttatttattttttaaacttgcctgaatttgttctaaaggaatatttaagagacataattttcttctctttaccataacattacacaaaactttttcctaaaacacggttgtgaggtactgatgaggtgtaagtggagctgttaaaaacagcagtgctgtattgcagttatgtatattcgtgtacagtatgtttagatcccaggtaaacatattcttttctgagaggataaatacctgcattcagatattccaggtaaatataattgagtcagggagtagtaaatctgatggagaattcactttggggaggggaaaaagaatagtatgcaagacccttattggcttttaattatacctgaaaccaaaatggatatttttagtctctctgcatgtgagatttggtgtaacaagatagaactataatatatacagtatatggaaggatagatatagtgctttgttcattttaattgcaaagctgccaaaatagttgaagcttaattacttgacttgccttgatttataggactggggcttggagaaaatgagcagatgttcctctaagacatcgattacagaagccttatatacatggatttgattttgtatttgtagctgaaagtcactgttgtctaaaactaacttttctaagttatcaaaacaacctaatttcttttccaacaaggagaacttaatggcatgaaggattgtgtgacacattggaaaagccagcttactgccactctcttcctttggccattagagggaggtgttgcctttcattgacgcttagaagcaaattgttcacttgttaagaaaagtaaatccttaaaaaaagaaaaggaaaaaatttaaccaatttttcttaatacccagaaggaattatactcaatatttccctagttaagaaaagaggagataatgttcgtctaaaaaactccaacgttgtaattacaactctacattcatttacttacttgacatactgccacaaagtagtttttgagttcattaaaaattccaaaggcattagttgttttttttttttttagtgttttgttttttagttaacttttatagacattttagtaacttgctaaagattcaggggattctatgaaaccccgaatttagaaacatctggtctacctcagttaaatgttgactgcttagaaatatagctgaagtgatcaccacagccataaaattgtttaagaaagatttatataatgtttacaaatctggaatcaaggattttagctgaaatcctttaagagatattagagcaagtatttaattcaggtattttcaagttttaaaacttaacctgtttacctactaaaaataaaatagctagtttttttctgcatataaaagttcattgaaatgatatgcccttatttgcaatacttttcccataaagttttaagtgtgaaagaattgtaatttactagatatgtttggtatgggatattttgttaggcaagttttcttttttcttcttaaattgcaataggcttccaaaaagagtataattgtttcagaacaaattaactcttggcattatacgtctccctttttctttacagtattagtaaaaagaaaaattgtacactttctgattttaacttcactaatgtaattactctctcaagaagcttttaaaatttaaattaccatcacacaaccttttttatagtaaagccaacatttgttctctcaccaaaccccatgccaaattcatcatgaagaaagctcagcataagtaattcaaatactgcttataattttagaggggggtagaatttagtaaatattccagccggtcgttttatgcacaaggcttcagtcagaacatagaaaaaaaaaacattctgtgaatgaaatattgtatgttcagattttataaaagacatttttaaaagcccaatttacagccgtatattttcttatgatgtaatttatgaaaaagatgtctgtactaacaggtgctgtaacactactgttgttggattttattgtttggtgataaatgtatacaatatttctaagggaaactatgtactgtgatgtaaaagtctgggcaaaatgtatataatcctgtatataattatgtatttgattataattactgattgtaaagatttaataaaatatgtaaatattccagtttagttttaaaaaaaaaaaaaaaaaaaaaaaaaaaaaaaaaaaaaaaa

SEQ ID NO: 195 - DNA, 2718 bp, Homo sapiens
cctttctgtggcgaaacatcgacttcctacgacctagaaatcgccgccagggctaggctggtgtttgtcctaagtgggtacttgcttgggttgagaaatcacattttggctattccccgacttgaaccaggggatagaaatcgtagtcaccggctgggcgcagcggctcatgctgtaatcctggcagtttgggaggccgaggcgggcagattattgaggttaggagttcgagaccagcctggtcaatatgatgaaacaccgcctctagtaaaaatacaaaaattatccgggcgtggtggcgagcgcctgtaatcccagctactcaggaggctgaggcagtagaatcccttgaacctggggtgcggaggttgcagtgagccaagatcgcgccactgcactccaggctgggcgacacggcgagactctgtctcaaaacaaaacaaaaggaaaagaagagaaaagaaaaagaaacgcaggcaccctgaaatcgaaacttgttaggaccaacaagccaacgacagacgaatctgcggggtcctgcgacagacacgccagccccgccgccacagcacagggttctggaggtcgagctgttctgcgggttctgcggcggcgctgggaagagacggcgcccgggcagctcccctgtcaccggcttggaggagcggcgggctcccctagcccagcgccgccgccgccgcccgggaacgccaggctcaccccagctggggaagctccgaatccctcagatcggcgacctgagtgctgtcgccccgagaaaatggaggcatcgagcaacgagctgtgctgagaccgagagacctcagttctgcgaaatgtcggtgcctggagcttgcgaatgactgcggccggcgggttgtcaaggacaacattccttatggcgcaaccaacagcgctgtcaccaagaaactggactctgagaaaaaagagggtttcggccaccgagaaactccgtgccacatgtgccgtgacagcaaaaccgcccgctccgcgccgctggtgaaagagctaacgaacgccaggtgctgcgacagtgacaccgggactagaaggcctcggatggagaatgggacgcccagagcaagcaggaaaacgttttgtttggctcaactagcgctgtcgcaaccggaaaactgtcaggccagtgctgctgcggatgtgagaaaccggtgatccgaaggaggagtggcgctgggcgctggactcgctggtgtgaaaatctggctgctctaggacccggcaagcgcgggcaccaggcgaacgccagcgactttgccagacaaatgcatgtcttttttggtcgccattcaaagatgcagccggcagtcagccccggctctgagaaacaagtggaggtgtcagccataaaccctccgttcagggaaaagagagtcgctgcgacggatcgattggccgttgggtggaactttctttggtggcctagtgactagaaaataaaaacgaaaacgaaataaaaaactgctactgacattactcccacgctccctcctcaagtcagtggcttcaggcttaagaaaacctgtatttttcttggctgatccgtgatccctaattactgagggccccgcgacccaccaagtgcgattcgcagagggaaaggagctggaataaggatccagaatgggacggatttggctcctccaggaagaaagcaaaacaaatgcaggtcgcgaacactttacattgcaggaagctgctcttccagtggccgcggctgggtccttccacaccacctctctgtcctaggccttcgtcccggttcagccctcacggattctaggctagcggtcaacaaccgcatccctccggaacctggaaactctaggtccgagatctcggtgaagaatgaaaggcacagcgccgctcaacccaggcttcaggcctgccccgctggtcccgtcccttccctgtgggatggaactctgtgggaatcgctccttattctgatggttcactcattcagatgtccttgatatttggggatatttctaaaacagctggggagaaaaatggactgcgaggctccggtgttggacgtgaaattggcagtgagacatccgcctctaagcccagggaaaagcttaaattgtggttctctgtctctagcaccgtgatctttgaaatgcgttattgattttcttctttcttctgggaaatgcaatgcaggtgaacttgtaagtgttgaatcctccctctcctcactgttcaatcagactgaggcctacttcctttctgataagaaatatggaactgccattgctcagtaggaaaatgtcctttctacaagcattcatatttcaataaaaatctgcactttgtgagttgagccccctcaaagagacctacagaccctgccatgagcatctccatccacactcatcatttcccattttcaccacttctgctcctgtgcaaaccagtactatccttttctgggggatcctaggcagaagcgatggcaggacaaaggcagagaaggcactgccaggtcctgcatgccagtaaaactactcatgtcagctgttctgcaggatcccatgagaagatggcctaattggattatttcagcaagctaagtaatttgaagagagaggctaagccaatgtagtactagagctacactggccttctttggcttaacatttgtctggaattataatttcctcaatctaagaa

SEQ ID NO: 196 - DNA, 1426 bp, Homo sapiens
gactatctcccagcggcaggcccttcgataaaatcaggaacttgtgctggccctgcaatgtcaagggagggggctcacccagggctcctgtagctcagggggcaggcctgagccctgcacccgccccacgaccgtccagcccctgacggggcaccccatcctgaggggctctgcattggcccccaccgaggcaggggatctgaccgactcggagcccggctggatgttacaggcgtgcaaaatggaagggtttcccctcgtcccccctcagccatcagaagacctggtgccctatgacacggatctataccaacgccaaacgcacgagtattacccctatctcagcagtgatggggagagccatagcgaccattactgggacttccacccccaccacgtgcacagcgagttcgagagcttcgccgagaacaacttcacggagctccagagcgtgcagcccccgcagctgcagcagctctaccgccacatggagctggagcagatgcacgtcctcgatacccccatggtgccaccccatcccagtcttggccaccaggtctcctacctgccccggatgtgcctccagtacccatccctgtccccagcccagcccagctcagatgaggaggagggcgagcggcagagccccccactggaggtgtctgacggcgaggcggatggcctggagcccgggcctgggctcctgcctggggagacaggcagcaagaagaagatccgcctgtaccagttcctgttggacctgctccgcagcggcgacatgaaggacagcatctggtgggtggacaaggacaagggcaccttccagttctcgtccaagcacaaggaggcgctggcgcaccgctggggcatccagaagggcaaccgcaagaagatgacctaccagaagatggcgcgcgcgctgcgcaactacggcaagacgggcgaggtcaagaaggtgaagaagaagctcacctaccagttcagcggcgaagtgctgggccgcgggggcctggccgagcggcgccacccgccccactgagcccgcagcccccgccgggccccgccaggcctccccgctggccatagcattaagccctcgcccggcccggacacagggaggacgctcccggggcccagaggcaggactgtggcgggccgggcctcgcctcacccgccccctccccccactccaggccccctccacatcccgcttcgcctccctccaggactccaccccggctcccggacgccagctgggcgtcagaccccaccggggcaaccttgcagaggacgacccggggtactgccttgggagtctcaagtccgtatgtaaatcagatctcccctctcacccctcccacccattaacctcctcccaaaaaacaagtaaagttattctcaatccatcaaaaaaaaaaaaaaaaaa

SEQ ID NO: 197 - DNA, 3894 bp, Homo sapiens
ctctttccgggacaacatggcgccgtccacgccgctcttgacagtccgaggatcagaaggactgtacatggtgaatggaccaccacattttacagaaagcacagtgtttccaagggaatctgggaagaattgcaaagtctgtatctttagtaaggatgggaccttgtttgcctggggcaatggagaaaaagtaaatattatcagtgtcactaacaagggactactgcactccttcgacctcctgaaggcagtttgccttgaattctcacccaaaaatactgtcctggcaacgtggcagccttacactacttctaaagatggcacagctgggatacccaacctacaactttatgatgtgaaaactgggacatgtttgaaatctttcatccagaaaaaaatgcaaaattggtgtccatcctggtcagaagatgaaactctttgtgcccgcaatgttaacaatgaagttcacttctttgaaaacaacaattttaacacaattgcaaataaattgcatttgcaaaaaattaatgattttgtattatcacctggaccccaaccatacaaggtggctgtctatgttccaggaagtaaaggtgcaccttcatttgttagattatatcagtaccccaactttgctggacctcatgcagctttagctaataaaagtttctttaaggcagataaagttacaatgctgtggaataaaaaagctactgctgtgttggtaatagctagcacagatgttgacaagacaggagcttcctactatggagaacaaactctacactacattgcaacaaatggagaaagtgctgtagtgcaattaccaaaaaatggccccatttatgatgtagtttggaattctagttctactgagttttgtgctgtatatggttttatgcctgccaaagcgacaattttcaacttgaaatgtgatcctgtatttgactttggaactggtcctcgtaatgcagcctactatagccctcatggacatatattagtattagctggatttggaaatctgaggggacaaatggaagtgtgggatgtgaaaaactacaaacttatttctaaaccggtggcttctgattctacatattttgcttggtgcccggatggtgagcatattttaacagctacatgtgctcccaggttacgggttaataatggatacaaaatttggcattatactggctctatcttgcacaagtatgatgtgccatcaaatgcagaattatggcaggtttcttggcagccatttttggatggaatatttccagcaaaaacaataacttaccaagcagttccaagtgaagtacccaatgaggaacctaaagttgcaacagcttatagacccccagctttaagaaataaaccaatcaccaattccaaattgcatgaagaggaaccacctcagaatatgaaaccacaatcaggaaacgataagccattatcaaaaacagctcttaaaaatcaaaggaagcatgaagctaagaaagctgcaaagcaggaagcaagaagtgacaagagtccagatttggcacctactcctgccccacagagcacaccacgaaacactgtctctcagtcaatttctggggaccctgagatagacaaaaaaatcaagaacctaaagaagaaactgaaagcaatcgaacaactgaaagaacaagcagcaactggaaaacagctagaaaaaaatcagttggagaaaattcagaaagaaacagcccttctccaggagctggaagatttggaattgggtatttaaagattcacggaaagcaagttgatgaccagaaatcagtgcaaacacatcttctgttaaacccattggtatacacagaatattcctgtgcccacacttaatgtcaatctataattttaaccatttatccaagattctactaagtgtaaaattatttaataatgtctattaaattgatatttatatcttgcatcctatatcatgtcaatatgtgatatagaaaagagatacgtgaattttttagctaagcttgacagattgaaagacaagtgtcatttttttttgtagagggtgatatataccatgtaaatgaataaagacattttaaatttaatcactgtttttattataagttccttagttcagatatcctttattaatttataagatgtgtaaaactacttaattctcacaagactctatgaagtaattcttttaatctctattttataaatgaaaaaactaaggccataaatttaagaaatttgtcagtgtctcaaagctaggaaatggccatctaatcccagagcctatgctttaggtcactatgatatatactactcctgtatcctcaagtaatgtatcatttagtaacactaagcaccctgcttagttttcatggatactgccaaattgccctatctcaagctttatacttgcaccatttaaagttttccacactgttggcaatatcagaagtgataaggctttgaaatgttcgccactttgataaagaggaaatgattgtttgttactgttatatacatgtatttttatcagagatgggttatgtacttttccacgtttgatagttggttgtatttctttagtgaattgatttttcttttcctttgcccatttttctgtttggatgtttgactttcttcttaatttgtaagagtatcctatgtagtaacaaaatccttttttaaaaatttttaaagaaaaagtatacacacaggacttttttttttctaattcaaaaaatacaaaggcatgcaatgaaaattaagtctgttccactaccacattttccagttttttgtgtatctttctaatgatagataccatatgagtattcaaatatacatacacatacacttaaaaaaaaaagatggcatatactaactgttctgtttggggctttttggtggtggtgtttgtttgacagggtctcactctgcctcccaggttggagtgcaccttgaactcctggactcaagtgatccttcacctcctccttccaagtatctgacactacaggcttgcatcactatgcccagcttatactcaccatagtggttctgtactcccttaaaatattctggaggccaggcatgctggctcacacctgtaatcccagcaccttgggaggccaaggtgggtggatcacctgaggtcaggagttcaagaccagcctgatcaacatggtgaaaccccatctctactaaaaatacaaaagtatccaggcgtggtagcacatacctgtaatcccagctacttgggaggctgaggtaggaaaattgtttgaacccggcagacagaggttgcagtgagccgacatcgtgccattgcactccaagcctgggcaacaagagtgaaaccgtctcacacacacacaaaaaaaaatattttggagctccttctatatgagtctctctctcttatctctctcaggatgtgtgtatgtgtttgtttctctggaaaaccctgactaatacagattagctatgtattaggtaatacataatgcctaatacataactaatatatggacaggaagttaatagactgactgtgccaccttaaaactcgtatgttgaagccctaacctccaacgtggtggtattgggagatgggccttttggaaggtaagtgtgtttgaatgaggtgaagaggttggggacttcgtgatgggattattgtccttacaagaaaagacaccagagagcttgttctgtctctttgggccatgtgaagacatggtgagaaagcagccagctgtaagccagagagtcctcaccagaacctaaccatgctggtgatatcctcatctcagacttctaacctccagaactgtgagaaaataaacttctttgtttaaaccaaaaaaaaaaaaaaaa

SEQ ID NO: 198 - DNA, 2240 bp, Homo sapiens
gaggcctaggggcggggcttcgccgagaccccggaggctttgggtgcgctgcagcggtctgcggcgcgcagctgtttcggtaactgctttgcctcccggctcccgcaggaggatgctggtggtggaggtggcgaacggccgctccctggtgtggggagccgaggcggtgcaggccctccgggagcgcctgggtgtggggggccgcacggtaggcgccctgccccgcgggccccgccagaactcgcgcctgggcctcccgctgctgctgatgcccgaagaggcgcggctcttggccgagatcggcgccgtgactctggtcagcgccccgcgtccagactctcggcaccacagcctggccctgacatccttcaagcgccagcaagaggagagcttccaggagcagagcgccttggcagctgaggcccgggagacccgtcgtcaggagctcctggagaagattacggagggccaggctgctaagaagcagaaactagaacaggcttcaggggccagctcaagccaggaggccggctcgagccaggctgccaaagaggatgagaccagtgatggccaggcttcgggagagcaggaggaagctggcccctcgtcttcccaagcaggaccctcaaatggggtagcccccttgcccagatctgctctccttgtccagctggccactgccaggcctcgaccggtcaaggccaggcccctggactggcgtgtccagtctaaagactggccccacgccggccgccctgcccacgagctgcgctacagtatctacagagacctgtgggagcgaggcttcttcctcagtgcggctggcaagttcggaggtgacttcctggtctatcctggtgaccccctccgcttccacgcccattatatcgctcagtgctgggcccccgaggacaccatcccactccaagacctggttgctgctgggcgccttggaaccagcgtcagaaagaccctgctcctctgttctccgcagcctgatggtaaggtggtctacacctccctgcaatgggccagcctgcagtgaactccagagacctaggggatgtggctgtgtcggcagcaagagcctttctggatgttccccagctcttctctgggagtctagaacatcctcctacctttctccgcggttagtttttgattccaggttttcgaacactacatcttttttatgttcttccttgtttcaaagcacttattggctgtgtttttgtagttacctattttcacactgtgagcttcccgagaatggggcctgggtttgattcatctgttttctacagggtttaagtctcaggaggtctcaataaacttggtatataaatgttcatgatttgaatgtttgcgacagtcctggaacccgtggatggtctcatctgcatgtacaggtgagaaaaaggcctggaggggggggactgacttgcccaaagtcacacacttagtaaatagcaggcctggcctttcaaaattggtttttctgactcctaaatctgcactctttctacctcactaaacttcctcttgaaaagatttctatgaaatttcccagatgcatacaaacgttataaataaaaatataggctgggcacgatgacccacacctgtaatcccacagaacttttggaggccaaggcagggggatcgcttgagcccaggagtttgagaccagctctggcaacattgtaatacccagtctctacaaaaaataatttaaaaaaaaattagccagggatcccttgagcctgggaagttgaggctgctgtgagctgtgattgcaccactgccctccagcctgggagacagagcaagaacctgtctcaaaaaatatatatatgtgtgtgtgtatatatgtaaatatacacacatgtatgtatatatatgtgtgtgtatatatatatatattatgaaaggaaatgagtattgtaattttaggagttcagagcctggggagaaaggaaggactctggaaggcgttctgctttttcatggcctgggtagtggtggagaatttttttgatactgtatatttatattttagactcttttttggatgtgttatattctgcaatttttataaaagctaaaacacatgtatttgtaaaaaatttgcacttatgaaatcatttacccatgtttttgcttaagaaagtactagaacactaccactattccaataattacacctttatcttatcaatgtgaaaaaaaaaaaaaaaaaa

SEQ ID NO: 199 - DNA, 4994 bp, Homo sapiens
gccggtctctgggaagaaggcggcggcggcgaaaggcgggggtgctgtgggggccgggccgtgtttacacagcggcgggcgggcgcggacgcggaacccggcgcggcggcggcacgatggtcatggcgtatttcgtcgagaatttttggggggaaaaaaatagtggctttgatgtcctctaccataatatgaaacatggacagatatcaacaaaagaactagcagattttgtaagggaacgagctaccatagaggaggcatactccaggtcaatgacaaaactagcaaaatctgcaagcaattattcacaacttggaacatttgcaccagtatgggatgtattcaaaacatctacagagaaattagcaaattgtcacttggatcttgttagaaaattacaagaattaataaaggaagttcagaagtatggagaagaacaagtaaagtctcataaaaagactaaagaagaagttgcaggaactctggaagctgtccaaaccattcagagcataactcaggccctccagaaatccaaggaaaattacaatgccaagtgtgtagaacaggagcgtttgaaaaaggaaggagctacacaaagagaaatagaaaaggcagctgttaaatctaagaaagctacagatacctataaactctatgtggaaaaatatgcattagcaaaagctgatttcgaacagaaaatgacagaaacagctcagaaatttcaagatattgaagaaactcatctcattcacataaaggaaattataggatccttgtcaaatgctataaaggaaattcatttgcagataggccaggtccatgaagaatttataaataacatggctaatactacagttgaaagtttgatacaaaaatttgctgagtcaaaaggcactgggaaggaaagacctggcctcattgaatttgaagaatgtgacactgctagtgcagttgaaggtataaaaccaaggaaaagaaagacctttgctttgccaggaatcattaaaaaggaaaaagatgcagaatctgtggaatgtcctgatgcagattcattgaacattcctgatgtagatgaagaaggctacagtattaaaccagaaacaaatcagaatgataccaaagagaaccatttctactcatctagtgattctgactccgaagatgaagaaccaaagaagtatcggatagaaattaagcctatgcatccaaataactcacatcacacaatggcttctttggatgaattaaaagtatctatagggaatataacactctccccagcaatatctagacacagtccagtacagatgaatcggaatttgtctaatgaggagttaacaaaatcaaagccatctgctccacccaatgaaaaaggaaccagtgatttacttgcttgggaccccctatttggaccatctcttgattcatcttcttcatcttcactaacttcatcatcatcagccaggcccacaactcctctttctgtaggcaccattgtcccacctccgaggcctgcttccagaccaaagcttacttcaggcaaactcagtgggattaatgaaatacccaggccattcagcccacctgtaacttccaacaccagcccacctcctgctgcaccattagcccgggcagaaagttcttcttctatctcatcatctgcttcattgagtgctgccaatactccaacagtaggtgtgtcacggggtcccagccctgtcagccttggaaatcaggataccttacctgtggcagttgcccttacagaatctgttaatgcctactttaaaggagcagatcccaccaagtgtattgtgaagatcactggtgatatgacaatgtcatttccaagtggaattattaaagtcttcaccagcaatccaactccagctgtgttgtgcttcagggtgaaaaatatcagcagactagagcagattcttccaaatgcacagcttgtgttcagtgatccatcacaatgtgattccaacacaaaagatttttggatgaacatgcaagctgttacagtctacctcaagaagctgtcagagcaaaatccagctgcttcttattataatgtagatgtattaaagtatcaggtatcatcaaatggtattcagtccactcctctgaatcttgcaacatactggaaatgtagtgctagcaccacagatcttagagtggattataaatacaatccagaagctatggtggcacctagtgtgctttccaacatacaggtggtggtaccagtggatggaggagtaacgaacatgcagtcccttccccctgcaatatggaatgcagaacaaatgaaagccttttggaaattgtctagtatttcagaaaaatcagaaaatggaggttctgggtccctccgagcaaaatttgatctttcagaaggacctagtaaacccacgacacttgcagtacaattcctcagcgagggaagtaccctttcaggagtagatttcgaacttgtgggcactggctataggctttccttaataaagaagcggtttgctactggacgatacctggcggattgttgatggacctgggaaagtgatgtggcttcagggattacaaacctgccattctgcattatctgttctttccaaacactattttaacttgtatgatgtctttcaaacttagacatatttgagagctgactacaaacattaaatcgcacttttaaagtgagtcattgaaataaatagtactgaaatgattctctatgttgtaaatgatcaactacaatattcaggaagcacatttattcagattctcagtaaaaatgaagtttttgtaggattaatttttaaattatttccagtgtctatgttgaaaaaaagggttatagtgtaatatcaggcctaaagtttcagaagagcaagcacaaagtaatttagctttccatacatttttagagtcagagataactttgaaatttcataagtttgatattcagtggatacaaatagaacatgaattctaagttttgggtaatgttaactcagaacacttaatcaaattgagctatgtgccataaggtaatcagaccagagtccaagttgtatgcaaaaaatctataatttgattctcataaacatattaataaagtataagtgatgttttatatgatttttaaaaaaaattctcaagtgcaatgtgttttaaaataagcttgcaaatgacagcagagacatttacttctgcagttagttaactttataggagttgtgatttttttgatgaattaatgctgtagatttaatttatttttatatggaattgcataatgtgtgccttttaaaacaataacaaaaaccagagatgtgcctatacaatttgtgttcattaatgtgcctcactttttttctcagtctgaatcttctgttcagaatcttacagtgatcaagcatttttataagatatttgcaatttttgtaaatatttttggcctgcaactgggaaggggattcagagtcataaagcctaacttaagaatcctggctcacttctttggtgatacactgtagccactagaaagagaaataaacccaatggcatgtgtttacaggaagaaagattaccttcagatacttgacattaacctcatcaaaagtgtgtgaattttaaaacaaattctaaaaaaactatagtgctaaattggtaactggtattttaactctcaatttagcattttccttgatactttatcattgaaaatttatgcatttatttactgattgtgttgtgaacatgagttttatggtattttgtgagggatgcattttttaaaagattaattttggaaacagaaggagaagcactgccatttgtttttatttcaacaattggaaaaattaccaatttgtacattttaattattcaatttctactttgtaaaaatagggaaattatttgaagtgatatatttggttaaacatttctaaaaataaactaccaatactaaatagtaagaaacctaactttagtagcaaatcttgattaattgaagaaataaaatatttcggataaggtttcataatttacaaatgggaatttcatttataataataaatatgagtgtcctttatttgcctagtagaagtgataaattgtgttatatatgataatttatataaaaccactaattgttccgttaagcttcacagaaaataaaacctctattactagacatttatgtaacatcttgctgtactaaatacagcagaaaatctactctttagcaatatataacacagtatatgcttttttatatattcaatgttagcccaagtctgaatttacatttgactaaagcagcacataagataatttgctaaaatgctaatctttactaaatagtgagctaaattagaatttctaactcttatattgtgctcttttaaatgccaattacagtcccttactggaattctaactgtaatttgctttgcaatcaaactgcttttagggcagccaatattttattattggaattcagacactgttcttaccgtgtttgtttttaatcaaatattacctaaaaatgtacaaattagtgaaatggttaaacttctgcactttcttagttaccacagtcttcataccaagtattgggtacaggttacaattttgaagccatatgagtttatattgattttttttttccatttaaaaatccactaatggtgtaaaagagaccagtagattttcaatgggaaatgtacctagcaagctggttcttgcttatatatagtgataaactttgtagctgcctctttaaccaagaatttgtaaacacaactctaataaatgtgagttttaaaggattgttatttactactttggattgtaattagaacaatgcacatctgtcttccaagattttgtaaatatttttgatttttttcattaaatgtaaattttacataaaagttgtgctcttaataaacatgtaatatataatttaaaaaaaaaaaaaa

SEQ ID NO: 200 - DNA, 6132 bp, Homo sapiens
aattggaagcaaatgacatcacagcaggtcagagaaaaagggttgagcggcaggcacccagagtagtaggtctttggcattaggagcttgagcccagacggccctagcagggaccccagcgcccgagagaccatgcagaggtcgcctctggaaaaggccagcgttgtctccaaactttttttcagctggaccagaccaattttgaggaaaggatacagacagcgcctggaattgtcagacatataccaaatcccttctgttgattctgctgacaatctatctgaaaaattggaaagagaatgggatagagagctggcttcaaagaaaaatcctaaactcattaatgcccttcggcgatgttttttctggagatttatgttctatggaatctttttatatttaggggaagtcaccaaagcagtacagcctctcttactgggaagaatcatagcttcctatgacccggataacaaggaggaacgctctatcgcgatttatctaggcataggcttatgccttctctttattgtgaggacactgctcctacacccagccatttttggccttcatcacattggaatgcagatgagaatagctatgtttagtttgatttataagaagactttaaagctgtcaagccgtgttctagataaaataagtattggacaacttgttagtctcctttccaacaacctgaacaaatttgatgaaggacttgcattggcacatttcgtgtggatcgctcctttgcaagtggcactcctcatggggctaatctgggagttgttacaggcgtctgccttctgtggacttggtttcctgatagtccttgccctttttcaggctgggctagggagaatgatgatgaagtacagagatcagagagctgggaagatcagtgaaagacttgtgattacctcagaaatgattgaaaatatccaatctgttaaggcatactgctgggaagaagcaatggaaaaaatgattgaaaacttaagacaaacagaactgaaactgactcggaaggcagcctatgtgagatacttcaatagctcagccttcttcttctcagggttctttgtggtgtttttatctgtgcttccctatgcactaatcaaaggaatcatcctccggaaaatattcaccaccatctcattctgcattgttctgcgcatggcggtcactcggcaatttccctgggctgtacaaacatggtatgactctcttggagcaataaacaaaatacaggatttcttacaaaagcaagaatataagacattggaatataacttaacgactacagaagtagtgatggagaatgtaacagccttctgggaggagggatttggggaattatttgagaaagcaaaacaaaacaataacaatagaaaaacttctaatggtgatgacagcctcttcttcagtaatttctcacttcttggtactcctgtcctgaaagatattaatttcaagatagaaagaggacagttgttggcggttgctggatccactggagcaggcaagacttcacttctaatggtgattatgggagaactggagccttcagagggtaaaattaagcacagtggaagaatttcattctgttctcagttttcctggattatgcctggcaccattaaagaaaatatcatctttggtgtttcctatgatgaatatagatacagaagcgtcatcaaagcatgccaactagaagaggacatctccaagtttgcagagaaagacaatatagttcttggagaaggtggaatcacactgagtggaggtcaacgagcaagaatttctttagcaagagcagtatacaaagatgctgatttgtatttattagactctccttttggatacctagatgttttaacagaaaaagaaatatttgaaagctgtgtctgtaaactgatggctaacaaaactaggattttggtcacttctaaaatggaacatttaaagaaagctgacaaaatattaattttgcatgaaggtagcagctatttttatgggacattttcagaactccaaaatctacagccagactttagctcaaaactcatgggatgtgattctttcgaccaatttagtgcagaaagaagaaattcaatcctaactgagaccttacaccgtttctcattagaaggagatgctcctgtctcctggacagaaacaaaaaaacaatcttttaaacagactggagagtttggggaaaaaaggaagaattctattctcaatccaatcaactctatacgaaaattttccattgtgcaaaagactcccttacaaatgaatggcatcgaagaggattctgatgagcctttagagagaaggctgtccttagtaccagattctgagcagggagaggcgatactgcctcgcatcagcgtgatcagcactggccccacgcttcaggcacgaaggaggcagtctgtcctgaacctgatgacacactcagttaaccaaggtcagaacattcaccgaaagacaacagcatccacacgaaaagtgtcactggcccctcaggcaaacttgactgaactggatatatattcaagaaggttatctcaagaaactggcttggaaataagtgaagaaattaacgaagaagacttaaaggagtgcttttttgatgatatggagagcataccagcagtgactacatggaacacataccttcgatatattactgtccacaagagcttaatttttgtgctaatttggtgcttagtaatttttctggcagaggtggctgcttctttggttgtgctgtggctccttggaaacactcctcttcaagacaaagggaatagtactcatagtagaaataacagctatgcagtgattatcaccagcaccagttcgtattatgtgttttacatttacgtgggagtagccgacactttgcttgctatgggattcttcagaggtctaccactggtgcatactctaatcacagtgtcgaaaattttacaccacaaaatgttacattctgttcttcaagcacctatgtcaaccctcaacacgttgaaagcaggtgggattcttaatagattctccaaagatatagcaattttggatgaccttctgcctcttaccatatttgacttcatccagttgttattaattgtgattggagctatagcagttgtcgcagttttacaaccctacatctttgttgcaacagtgccagtgatagtggcttttattatgttgagagcatatttcctccaaacctcacagcaactcaaacaactggaatctgaaggcaggagtccaattttcactcatcttgttacaagcttaaaaggactatggacacttcgtgccttcggacggcagccttactttgaaactctgttccacaaagctctgaatttacatactgccaactggttcttgtacctgtcaacactgcgctggttccaaatgagaatagaaatgatttttgtcatcttcttcattgctgttaccttcatttccattttaacaacaggagaaggagaaggaagagttggtattatcctgactttagccatgaatatcatgagtacattgcagtgggctgtaaactccagcatagatgtggatagcttgatgcgatctgtgagccgagtctttaagttcattgacatgccaacagaaggtaaacctaccaagtcaaccaaaccatacaagaatggccaactctcgaaagttatgattattgagaattcacacgtgaagaaagatgacatctggccctcagggggccaaatgactgtcaaagatctcacagcaaaatacacagaaggtggaaatgccatattagagaacatttccttctcaataagtcctggccagagggtgggcctcttgggaagaactggatcagggaagagtactttgttatcagcttttttgagactactgaacactgaaggagaaatccagatcgatggtgtgtcttgggattcaataactttgcaacagtggaggaaagcctttggagtgataccacagaaagtatttattttttctggaacatttagaaaaaacttggatccctatgaacagtggagtgatcaagaaatatggaaagttgcagatgaggttgggctcagatctgtgatagaacagtttcctgggaagcttgactttgtccttgtggatgggggctgtgtcctaagccatggccacaagcagttgatgtgcttggctagatctgttctcagtaaggcgaagatcttgctgcttgatgaacccagtgctcatttggatccagtaacataccaaataattagaagaactctaaaacaagcatttgctgattgcacagtaattctctgtgaacacaggatagaagcaatgctggaatgccaacaatttttggtcatagaagagaacaaagtgcggcagtacgattccatccagaaactgctgaacgagaggagcctcttccggcaagccatcagcccctccgacagggtgaagctctttccccaccggaactcaagcaagtgcaagtctaagccccagattgctgctctgaaagaggagacagaagaagaggtgcaagatacaaggctttagagagcagcataaatgttgacatgggacatttgctcatggaattggagctcgtgggacagtcacctcatggaattggagctcgtggaacagttacctctgcctcagaaaacaaggatgaattaagtttttttttaaaaaagaaacatttggtaaggggaattgaggacactgatatgggtcttgataaatggcttcctggcaatagtcaaattgtgtgaaaggtacttcaaatccttgaagatttaccacttgtgttttgcaagccagattttcctgaaaacccttgccatgtgctagtaattggaaaggcagctctaaatgtcaatcagcctagttgatcagcttattgtctagtgaaactcgttaatttgtagtgttggagaagaactgaaatcatacttcttagggttatgattaagtaatgataactggaaacttcagcggtttatataagcttgtattcctttttctctcctctccccatgatgtttagaaacacaactatattgtttgctaagcattccaactatctcatttccaagcaagtattagaataccacaggaaccacaagactgcacatcaaaatatgccccattcaacatctagtgagcagtcaggaaagagaacttccagatcctggaaatcagggttagtattgtccaggtctaccaaaaatctcaatatttcagataatcacaatacatcccttacctgggaaagggctgttataatctttcacaggggacaggatggttcccttgatgaagaagttgatatgccttttcccaactccagaaagtgacaagctcacagacctttgaactagagtttagctggaaaagtatgttagtgcaaattgtcacaggacagcccttctttccacagaagctccaggtagagggtgtgtaagtagataggccatgggcactgtgggtagacacacatgaagtccaagcatttagatgtataggttgatggtggtatgttttcaggctagatgtatgtacttcatgctgtctacactaagagagaatgagagacacactgaagaagcaccaatcatgaattagttttatatgcttctgttttataattttgtgaagcaaaattttttctctaggaaatatttattttaataatgtttcaaacatatataacaatgctgtattttaaaagaatgattatgaattacatttgtataaaataatttttatatttgaaatattgactttttatggcactagtatttctatgaaatattatgttaaaactgggacaggggagaacctagggtgatattaaccaggggccatgaatcaccttttggtctggagggaagccttggggctgatgcagttgttgcccacagctgtatgattcccagccagcacagcctcttagatgcagttctgaagaagatggtaccaccagtctgactgtttccatcaagggtacactgccttctcaactccaaactgactcttaagaagactgcattatatttattactgtaagaaaatatcacttgtcaataaaatccatacatttgtgtgaaa

SEQ ID NO: 201 - DNA, 3844 bp, Homo sapiens
agccattttgttccgcccgaggagaccctaagatggcggcgagggggacggtgaaggttgcctcccgcccgtccgggctctgatcctccgtctccccgtcccccggcggccggcccatggcctggcggaggcccgaaccatggacctccgcaccgccgtgtacaacgccgcccgtgatggcaagctgcagctgctccagaagctgctcagcggccggagccgggaggaactggacgagctgacgggcgaggtggccggcgggggaacgccgctactcatcgccgcccgctacggccacctggacgtggtggagtacctggtggaccggtgcggcgcgagcgtggaggccggtggctcggtgcacttcgatggcgagaccatcgagggcgcgccgccgctgtgggccgcctccgcagccggccacctggacgtggtgcggagcctgctgcgccgcggggcctcggtgaaccgcaccacgcgcaccaactccacgcctctccgcgccgcctgcttcgacggccacctggaggtggtgcgctacctggtcggcgagcaccaggccgacctggaggtggccaaccggcacggccacacgtgcctcatgatctcgtgctacaagggccaccgtgagatcgcccgctacctgctggagcagggcgcccaggtgaaccggcgcagcgccaagggcaacacggccctgcatgactgcgccgagtccggcagcctggagatcctgcagctgctgctggggtgcaaggcccgcatggaacgtgacggctacggcatgaccccgctgctcgcggccagcgtgacgggccacaccaacatcgtggagtacctcatccaggagcagcccggccaggagcaggtcgcagggggagaggctcagcctgggctgccccaagaagacccctccaccagccaggggtgtgcgcagcctcagggggctccgtgctgcagctcctccccagaggaaccactgaacggggaatcttacgaaagctgctgtcccaccagccgggaagctgccgtggaagccttggaattgctgggagctacgtatgtggataagaaacgagatctgcttggggcccttaaacactggaggcgggccatggagctgcgtcaccaggggggcgagtacctgcccaaaccggagcccccacagctggtcctggcctatgactattccagggaggtcaacaccaccgaggagctggaggcgctgatcaccgacccggatgagatgcgcatgcaggccctgttgatccgggagcgcatcctcggtccctcgcacccggacacttcctattacatccgttacaggggtgccgtgtacgccgactcgggcaatttcgagcgctgcatccgcttgtggaagtacgccctggacatgcaacagagcaacctggagcctctgagccccatgaccgccagcagcttcctctccttcgcggaactcttctcctacgtgcttcaggaccgggccgccaaaggcagcctgggcacccagatcggctttgcagacctcatgggggttctcaccaaaggggtccgggaagtggaacgggccctgcagctgcccagggagcccggagactcagcccagttcaccaaggcgctggccatcatcctccacctgctctacctgctggagaaagtggagtgcacccccagccaggagcacctgaagcaccagaccgtctaccgcctgctcaagtgcgcgcccaggggcaagaacggcttcacccctctgcacatggctgtggacaaggacaccacaaacgtgggccgctatcccgtgggcagattcccctccctgcacgtggtcaaagtgctgctcgactgcggggccgacccggacagcagggattttgacaacaacaccccgctacacatagcagcccagaacaactgcccggccatcatgaatgccctgatcgaagcaggggcccacatggacgccaccaatgccttcaagaagacggcctacgagctgctggacgagaagctgctggccaggggtaccatgcagcccttcaactacgtgaccctgcagtgccttgcggcccgggccctggataagaacaagatcccttacaagggcttcatcccggaagatctggaggcgttcatcgaactgcactgacctgcccagaacgcctgcaccctcacctctcccctctcctgctgagatgggggaaatccggctgcggcatagcagatgctcgttcttgcctccttcaggcaccaatcaggagaagggttctgcctcccatcccctctacctgcagacagggtcggaggtgttagcgagcctttggtgctagaagcctgcggggtcatgtgctaagaggacagtctttctccgggagcccgctcactcattctgagttaggaaaagacacaagaccttccccacatcctgtctgcctgggttagggaggcctttgccttgttacctagaggcggagggactgaagccattgcgttccttccctgctagaaacacaggaagaagttgaggactgtctgccttccctcgtccctttacctggccagataactccagccgctgaatacagtgttaggactgggggctcctgagatgagagtttgagattcagggaatgagaccacctctcatttcttccagcatgatcgcgccctgctcccgtgccaccgtagtccctggcagacaggcagggctctgcccagggcagcctgccacttgcatagctttcggttggtttggtgttctgtttatttaataagtgggcaggttgcaagcgttgcacagaaattctgagattttactgcctttttttttttttttaagaaagttgtttgttggactccataagtgaatttcaagcagtgaggattttgtggtgcctgagatggccgagggcacagggagtgagctgtatgtgtgaggaatttggtgagcgagataaaagtccacggtgtcaacccctaaaacatgggtgaccgtacatttttatacatctccactctacggccttttacaggctttccgattttacaggcctttccaagtttccattctccttagagagagaactgtgcttccaaacagaaatcaggagtgaccacaaagcctgaaaacactttgccacccagcaaagaactggcacaattggtttgggtctgcattgccatagtgcccgagttaaaactgcaggccactctgccttgcagtggcctctgatttcattgtgggtgcatccacaggtggcccgagctgttctttcagctgctccaaggattgagacccaagtcatcatgaaaaaggcccaagtacagtcttaatgcgataaatccactagctaagacgtcgagtgccaagaccagccttccagccgaggtttggacaaagtctcaggttcccgtgactcagggtaaggtgctggggctgccagaggacctgccccagcaagatttttgtcaagagcgagactccatcagcccaggcagacgggagcaggttcttggccagcgtagacagcagcaaacagcagcagggaagccattctcactgcatcctccctgcagtagccacggccaggcccttaggaggagcagtgaccgggggtgtccagaaatatcctgtccctggatggaaactaggtctcgtttggatttttttttttttttgccgtgttaggaaattatttattaatttacaagacaggttttaactcagccgaggtgggaaatggtgtccctgtccctcccaaagcacagagcacagaaatgaggccgtttacatggcgagtctccgtgctggtgtttaagtcattaaaaagatactcaaagagaa

SEQ ID NO: 202 - DNA, 1657 bp, Homo sapiens
gacggaaaccagaatcgttttgggtctggtcgccaagatggcgtcctccgcctccgcccggactccggcagggaagcgagtgataaatcaggaagaattgcggcggttaatgaaggagaagcagcgtctgagcaccagtcggaaacggatagaatctccattcgcgaagtacaaccgtttggggcagctgagttgtgccctgtgtaacactccggttaagagcgagctcctgtggcagactcacgtcctgggaaagcagcaccgagagaaagtggccgagctgaaaggcgcgaaggaagccagccagggttcgtccgccagttcagcgcctcattccgtcaagaggaaagcgccggacgcagacgaccaagatgtcaagagagcgaaggccaccttggtgcctcaggtacagccctccacatctgcgtggaccaccaactttgacaaaataggaaaggagttcattagagcgactcccagtaagccttcaggactcagtttactccccgattatgaagatgaggaggaggaggaagaggaggaggaaggagatggagaaagaaaaaggggggacgccagcaagccgctctccgacgcacagggcaaggagcactcagtttcctcttcacgggaggtaacaagtagtgtgctgccaaacgatttctttagtactaatcctcccaaggcccccataattcctcattcagggtcaattgagaaagcagaaatacatgaaaaagtggtggaaaggagagaaaacaccgcggaagcgttaccggaaggtttttttgacgaccctgaggtagatgcaagagtacgaaaggttgatgctccaaaagatcagatggacaaagagtgggacgaattccaaaaagccatgaggcaggtcaacactatttccgaagccatagttgccgaagaggatgaggagggacggttggaccgccagattggggagatcgatgagcagatagagtgttaccgacgggtggaaaagctacggaatcgccaggatgaaataaaaaataaacttaaagaaatcctgaccataaaagaactgcagaaaaaggaagaagagaatgctgacagcgatgatgagggggaactacaggatttgttgtctcaggattggagggtgaaaggggcattgttatagggttttaaagacccaaggtttctaacagcctctgctgttgtataaaaagtgctgtctctcagtagtatagcggttacttcatgcctcaagatttgggtacctggattgctaaactggattgttgagataaaatgagccagtgagctacagcactttggaaaatttgtgtaacatgtttttgaggtaaagttgtttttgaaatttctgaagtgttatataccaaaatgccaacatttccacgacagacttaactgtataatttcgttgtaaaatctgtaagttgtaaatattgtacatagttaaatctgtattctgttttgaatttttttaattaatagaaagaccaaccggcaaactttcagatgaatgcttactgtggtatttggaatgtatgtatcttctgaaccctacatcaagttgaaaaggtttgttttcttgtttctttggtttttgtatggttttttagaacacttcataaacacataagtcattgtaggttaa

SEQ ID NO: 203 - DNA, 12416 bp, Homo sapiens
cttcttctcgctgagtctcctcctcggctctgacggtacagtgatataatgatgatgggtgtcacaacccgcatttgaacttgcaggcgagctgccccgagcctttctggggaagaactccaggcgtgcggacgcaacagccgagaacattaggtgttgtggacaggagctgggaccaagatcttcggccagccccgcatcctcccgcatcttccagcaccgtcccgcaccctccgcatccttccccgggccaccacgcttcctatgtgacccgcctgggcaacgccgaacccagtcgcgcagcgctgcagtgaattttccccccaaactgcaataagccgccttccaaggccaagatgttcataaatataaagagcatcttatggatgtgttcaaccttaatagtaacccatgcgctacataaagtcaaagtgggaaaaagcccaccggtgaggggctccctctctggaaaagtcagcctaccttgtcatttttcaacgatgcctactttgccacccagttacaacaccagtgaatttctccgcatcaaatggtctaagattgaagtggacaaaaatggaaaagatttgaaagagactactgtccttgtggcccaaaatggaaatatcaagattggtcaggactacaaagggagagtgtctgtgcccacacatcccgaggctgtgggcgatgcctccctcactgtggtcaagctgctggcaagtgatgcgggtctttaccgctgtgacgtcatgtacgggattgaagacacacaagacacggtgtcactgactgtggatggggttgtgtttcactacagggcggcaaccagcaggtacacactgaattttgaggctgctcagaaggcttgtttggacgttggggcagtcatagcaactccagagcagctctttgctgcctatgaagatggatttgagcagtgtgacgcaggctggctggctgatcagactgtcagatatcccatccgggctcccagagtaggctgttatggagataagatgggaaaggcaggagtcaggacttatggattccgttctccccaggaaacttacgatgtgtattgttatgtggatcatctggatggtgatgtgttccacctcactgtccccagtaaattcaccttcgaggaggctgcaaaagagtgtgaaaaccaggatgccaggctggcaacagtgggggaactccaggcggcatggaggaacggctttgaccagtgcgattacgggtggctgtcggatgccagcgtgcgccaccctgtgactgtggccagggcccagtgtggaggtggtctacttggggtgagaaccctgtatcgttttgagaaccagacaggcttccctccccctgatagcagatttgatgcctactgctttaaacctaaagaggctacaaccatcgatttgagtatcctcgcagaaactgcatcacccagtttatccaaagaaccacaaatggtttctgatagaactacaccaatcatccctttagttgatgaattacctgtcattccaacagagttccctcccgtgggaaatattgtcagttttgaacagaaagccacagtccaacctcaggctatcacagatagtttagccaccaaattacccacacctactggcagtaccaagaagccctgggatatggatgactactcaccttctgcttcaggacctcttggaaagctagacatatcagaaattaaggaagaagtgctccagagtacaactggcgtctctcattatgctacggattcatgggatggtgtcgtggaagataaacaaacacaagaatcggttacacagattgaacaaatagaagtgggtcctttggtaacatctatggaaatcttaaagcacattccttccaaggaattccctgtaactgaaacaccattggtaactgcaagaatgatcctggaatccaaaactgaaaagaaaatggtaagcactgtttctgaattggtaaccacaggtcactatggattcaccttgggagaagaggatgatgaagacagaacacttacagttggatctgatgagagcaccttgatctttgaccaaattcctgaagtcattacggtgtcaaagacttcagaagacaccatccacactcatttagaagacttggagtcagtctcagcatccacaactgtttcccctttaattatgcctgataataatggatcatccatggatgactgggaagagagacaaactagtggtaggataacggaagagtttcttggcaaatatctgtctactacaccttttccatcacagcatcgtacagaaatagaattgtttccttattctggtgataaaatattagtagagggaatttccacagttatttatccttctctacaaacagaaatgacacatagaagagaaagaacagaaacactaataccagagatgagaacagatacttatacagatgaaatacaagaagagatcactaaaagtccatttatgggaaaaacagaagaagaagtcttctctgggatgaaactctctacatctctctcagagccaattcatgttacagagtcttctgtggaaatgaccaagtcttttgatttcccaacattgataacaaagttaagtgcagagccaacagaagtaagagatatggaggaagactttacagcaactccaggtactacaaaatatgatgaaaatattacaacagtgcttttggcccatggtactttaagtgttgaagcagccactgtatcaaaatggtcatgggatgaagataatacaacatccaagcctttagagtctacagaaccttcagcctcttcaaaattgccccctgccttactcacaactgtggggatgaatggaaaggataaagacatcccaagtttcactgaagatggagcagatgaatttactcttattccagatagtactcaaaagcagttagaggaggttactgatgaagacatagcagcccatggaaaattcacaattagatttcagccaactacatcaactggtattgcagaaaagtcaactttgagagattctacaactgaagaaaaagttccacctatcacaagcactgaaggccaagtttatgcaaccatggaaggaagtgctttgggtgaagtagaagatgtggacctctctaagccagtatctactgttccccaatttgcacacacttcagaggtggaaggattagcatttgttagttatagtagcacccaagagcctactacttatgtagactcttcccataccattcctctttctgtaattcccaagacagactggggagtgttagtaccttctgttccatcagaagatgaagttctaggtgaaccctctcaagacatacttgtcattgatcagactcgccttgaagcgactatttctccagaaactatgagaacaacaaaaatcacagagggaacaactcaggaagaattcccttggaaagaacagactgcagagaaaccagttcctgctctcagttctacagcttggactcccaaggaggcagtaacaccactggatgaacaagagggcgatggatcagcatatacagtctctgaagatgaattgttgacaggttctgagagggtcccagttttagaaacaactccagttggaaaaattgatcacagtgtgtcttatccaccaggtgctgtaactgagcacaaagtgaaaacagatgaagtggtaacactaacaccacgcattgggccaaaagtatctttaagtccagggcctgaacaaaaatatgaaacagaaggtagtagtacaacaggatttacatcatctttgagtccttttagtacccacattacccagcttatggaagaaaccactactgagaaaacatccctagaggatattgatttaggctcaggattatttgaaaagcccaaagccacagaactcatagaattttcaacaatcaaagtcacagttccaagtgatattaccactgccttcagttcagtagacagacttcacacaacttcagcattcaagccatcttccgcgatcactaagaaaccacctctcatcgacagggaacctggtgaagaaacaaccagtgacatggtaatcattggagaatcaacatctcatgttcctcccactacccttgaagatattgtagccaaggaaacagaaaccgatattgatagagagtatttcacgacttcaagtcctcctgctacacagccaacaagaccacccactgtggaagacaaagaggcctttggacctcaggcgctttctacgccacagcccccagcaagcacaaaatttcaccctgacattaatgtttatattattgaggtcagagaaaataagacaggtcgaatgagtgatttgagtgtaattggtcatccaatagattcagaatctaaagaagatgaaccttgtagtgaagaaacagatccagtgcatgatctaatggctgaaattttacctgaattccctgacataattgaaatagacctataccacagtgaagaaaatgaagaagaagaagaagagtgtgcaaatgctactgatgtgacaaccaccccatctgtgcagtacataaatgggaagcatctcgttaccactgtgcccaaggacccagaagctgcagaagctaggcgtggccagtttgaaagtgttgcaccttctcagaatttctcggacagctctgaaagtgatactcatccatttgtaatagccaaaacggaattgtctactgctgtgcaacctaatgaatctacagaaacaactgagtctcttgaagttacatggaagcctgagacttaccctgaaacatcagaacatttttcaggtggtgagcctgatgttttccccacagtcccattccatgaggaatttgaaagtggaacagccaaaaaaggggcagaatcagtcacagagagagatactgaagttggtcatcaggcacatgaacatactgaacctgtatctctgtttcctgaagagtcttcaggagagattgccattgaccaagaatctcagaaaatagcctttgcaagggctacagaagtaacatttggtgaagaggtagaaaaaagtacttctgtcacatacactcccactatagttccaagttctgcatcagcatatgtttcagaggaagaagcagttaccctaataggaaatccttggccagatgacctgttgtctaccaaagaaagctgggtagaagcaactcctagacaagttgtagagctctcagggagttcttcgattccaattacagaaggctctggagaagcagaagaagatgaagatacaatgttcaccatggtaactgatttatcacagagaaatactactgatacactcattactttagacactagcaggataatcacagaaagcttttttgaggttcctgcaaccaccatttatccagtttctgaacaaccttctgcaaaagtggtgcctaccaagtttgtaagtgaaacagacacttctgagtggatttccagtaccactgttgaggaaaagaaaaggaaggaggaggagggaactacaggtacggcttctacatttgaggtatattcatctacacagagatcggatcaattaattttaccctttgaattagaaagtccaaatgtagctacatctagtgattcaggtaccaggaaaagttttatgtccttgacaacaccaacacagtctgaaagggaaatgacagattctactcctgtctttacagaaacaaatacattagaaaatttgggggcacagaccactgagcacagcagtatccatcaacctggggttcaggaagggctgaccactctcccacgtagtcctgcctctgtctttatggagcagggctctggagaagctgctgccgacccagaaaccaccactgtttcttcattttcattaaacgtagagtatgcaattcaagccgaaaaggaagtagctggcactttgtctccgcatgtggaaactacattctccactgagccaacaggactggttttgagtacagtaatggacagagtagttgctgaaaatataacccaaacatccagggaaatagtgatttcagagcgattaggagaaccaaattatggggcagaaataaggggcttttccacaggttttcctttggaggaagatttcagtggtgactttagagaatactcaacagtgtctcatcccatagcaaaagaagaaacggtaatgatggaaggctctggagatgcagcatttagggacacccagacttcaccatctacagtacctacttcagttcacatcagtcacatatctgactcagaaggacccagtagcaccatggtcagcacttcagccttcccctgggaagagtttacatcctcagctgagggctcaggtgagcaactggtcacagtcagcagctctgttgttccagtgcttcccagtgctgtgcaaaagttttctggtacagcttcctccattatcgacgaaggattgggagaagtgggtactgtcaatgaaattgatagaagatccaccattttaccaacagcagaagtggaaggtacgaaagctccagtagagaaggaggaagtaaaggtcagtggcacagtttcaacaaactttccccaaactatagagccagccaaattatggtctaggcaagaagtcaaccctgtaagacaagaaattgaaagtgaaacaacatcagaggaacaaattcaagaagaaaagtcatttgaatcccctcaaaactctcctgcaacagaacaaacaatctttgattcacagacatttactgaaactgaactcaaaaccacagattattctgtactaacaacaaagaaaacttacagtgatgataaagaaatgaaggaggaagacacttctttagttaacatgtctactccagatccagatgcaaatggcttggaatcttacacaactctccctgaagctactgaaaagtcacattttttcttagctactgcattagtaactgaatctataccagctgaacatgtagtcacagattcaccaatcaaaaaggaagaaagtacaaaacattttccgaaaggcatgagaccaacaattcaagagtcagatactgagctcttattctctggactgggatcaggagaagaagttttacctactctaccaacagagtcagtgaattttactgaagtggaacaaatcaataacacattatatccccacacttctcaagtggaaagtacctcaagtgacaaaattgaagactttaacagaatggaaaatgtggcaaaagaagttggaccactcgtatctcaaacagacatctttgaaggtagtgggtcagtaaccagcacaacattaatagaaattttaagtgacactggagcagaaggacccacggtggcacctctccctttctccacggacatcggacatcctcaaaatcagactgtcaggtgggcagaagaaatccagactagtagaccacaaaccataactgaacaagactctaacaagaattcttcaacagcagaaattaacgaaacaacaacctcatctactgattttctggctagagcttatggttttgaaatggccaaagaatttgttacatcagcaccaaaaccatctgacttgtattatgaaccttctggagaaggatctggagaagtggatattgttgattcatttcacacttctgcaactactcaggcaaccagacaagaaagcagcaccacatttgtttctgatgggtccctggaaaaacatcctgaggtgccaagcgctaaagctgttactgctgatggattcccaacagtttcagtgatgctgcctcttcattcagagcagaacaaaagctcccctgatccaactagcacactgtcaaatacagtgtcatatgagaggtccacagacggtagtttccaagaccgtttcagggaattcgaggattccaccttaaaacctaacagaaaaaaacccactgaaaatattatcatagacctggacaaagaggacaaggatttaatattgacaattacagagagtaccatccttgaaattctacctgagctgacatcggataaaaatactatcatagatattgatcatactaaacctgtgtatgaagacattcttggaatgcaaacagatatagatacagaggtaccatcagaaccacatgacagtaatgatgaaagtaatgatgacagcactcaagttcaagagatctatgaggcagctgtcaacctttctttaactgaggaaacatttgagggctctgctgatgttctggctagctacactcaggcaacacatgatgaatcaatgacttatgaagatagaagccaactagatcacatgggctttcacttcacaactgggatccctgctcctagcacagaaacagaattagacgttttacttcccacggcaacatccctgccaattcctcgtaagtctgccacagttattccagagattgaaggaataaaagctgaagcaaaagccctggatgacatgtttgaatcaagcactttgtctgatggtcaagctattgcagaccaaagtgaaataataccaacattgggccaatttgaaaggactcaggaggagtatgaagacaaaaaacatgctggtccttcttttcagccagaattctcttcaggagctgaggaggcattagtagaccatactccctatctaagtattgctactacccaccttatggatcagagtgtaacagaggtgcctgatgtgatggaaggatccaatcccccatattacactgatacaacattagcagtttcaacatttgcgaagttgtcttctcagacaccatcatctcccctcactatctactcaggcagtgaagcctctggacacacagagatcccccagcccagtgctctgccaggaatagacgtcggctcatctgtaatgtccccacaggattcttttaaggaaattcatgtaaatattgaagcgactttcaaaccatcaagtgaggaataccttcacataactgagcctccctctttatctcctgacacaaaattagaaccttcagaagatgatggtaaacctgagttattagaagaaatggaagcttctcccacagaacttattgctgtggaaggaactgagattctccaagatttccaaaacaaaaccgatggtcaagtttctggagaagcaatcaagatgtttcccaccattaaaacacctgaggctggaactgttattacaactgccgatgaaattgaattagaaggtgctacacagtggccacactctacttctgcttctgccacctatggggtcgaggcaggtgtggtgccttggctaagtccacagacttctgagaggcccacgctttcttcttctccagaaataaaccctgaaactcaagcagctttaatcagagggcaggattccacgatagcagcatcagaacagcaagtggcagcgagaattcttgattccaatgatcaggcaacagtaaaccctgtggaatttaatactgaggttgcaacaccaccattttcccttctggagacttctaatgaaacagatttcctgattggcattaatgaagagtcagtggaaggcacggcaatctatttaccaggacctgatcgctgcaaaatgaacccgtgccttaacggaggcacctgttatcctactgaaacttcctacgtatgcacctgtgtgccaggatacagcggagaccagtgtgaacttgattttgatgaatgtcactctaatccctgtcgtaatggagccacttgtgttgatggttttaacacattcaggtgcctctgccttccaagttatgttggtgcactttgtgagcaagataccgagacatgtgactatggctggcacaaattccaagggcagtgctacaaatactttgcccatcgacgcacatgggatgcagctgaacgggaatgccgtctgcagggtgcccatctcacaagcatcctgtctcacgaagaacaaatgtttgttaatcgtgtgggccatgattatcagtggataggcctcaatgacaagatgtttgagcatgacttccgttggactgatggcagcacactgcaatacgagaattggagacccaaccagccagacagcttcttttctgctggagaagactgtgttgtaatcatttggcatgagaatggccagtggaatgatgttccctgcaattaccatctcacctatacgtgcaagaaaggaacagtcgcttgcggccagccccctgttgtagaaaatgccaagacctttggaaagatgaaacctcgttatgaaatcaactccctgattagataccactgcaaagatggtttcattcaacgtcaccttccaactatccggtgcttaggaaatggaagatgggctatacctaaaattacctgcatgaacccatctgcataccaaaggacttattctatgaaatactttaaaaattcctcatcagcaaaggacaattcaataaatacatccaaacatgatcatcgttggagccggaggtggcaggagtcgaggcgctgatccctaaaatggcgaacatgtgttttcatcatttcagccaaagtcctaacttcctgtgcctttcctatcacctcgagaagtaattatcagttggtttggatttttggaccaccgttcagtcattttgggttgccgtgctcccaaaacattttaaatgaaagtattggcattcaaaaagacagcagacaaaatgaaagaaaatgagagcagaaagtaagcatttccagcctatctaatttctttagttttctatttgcctccagtgcagtccatttcctaatgtataccagcctactgtactatttaaaatgctcaatttcagcaccgatggccatgtaaataagatgatttaatgttgattttaatcctgtatataaaataaaaagtcacaatgagtttgggcatatttaatgatgattatggagccttagaggtctttaatcattggttcggctgcttttatgtagtttaggctggaaatggtttcacttgctctttgactgtcagcaagactgaagatggcttttcctggacagctagaaaacacaaaatcttgtaggtcattgcacctatctcagccataggtgcagtttgcttctacatgatgctaaaggctgcgaatgggatcctgatggaactaaggactccaatgtcgaactcttctttgctgcattcctttttcttcacttacaagaaaggcctgaatggaggacttttctgtaaccaggaacattttttaggggtcaaagtgctaataattaactcaaccaggtctactttttaatggctttcataacactaactcataaggttaccgatcaatgcatttcatacggatatagacctagggctctggagggtgggggattgttaaaacacatgcaaaaaaaaaaaaaaaaaaaaaaaaagaaattttgtatatataaccattttaatcttttataaagttttgaatgttcatgtatgaatgctgcagctgtgaagcatacataaataaatgaagtaagccatactgatttaatttattggatgttattttccctaagacctgaaaatgaacatagtatgctagttatttttcagtgttagccttttactttcctcacacaatttggaatcatataatataggtactttgtccctgattaaataatgtgacggatagaatgcatcaagtgtttattatgaaaagagtggaaaagtatatagcttttagcaaaaggtgtttgcccattctaagaaatgagcgaatatatagaaatagtgtgggcatttcttcctgttaggtggagtgtatgtgttgacatttctccccatctcttcccactctgttttctccccattatttgaataaagtgactgctgaagatgactttgaatccttatccacttaatttaatgtttaaagaaaaacctgtaatggaaagtaagactccttccctaatttcagtttagagcaacttgaagaagagtagacaaaaaataaaatgcacatagaaaaagagaaaaagggcacaaagggattggcccaatattgattctttttttataaaacctcctttggcttagaaggaatgactctagctacaataatacacagtatgtttaagcaggttcccttggttgttgcattaaatgtaatccacctttaggtattttagagcacagaacaacactgtgttgatctagtaggtttctatttttcctttctctttacaatgcacataatactttcctgtatttatatcataacgtgtatagtgtaaaatgtgaatgactttttttgtgaatgaaaatctaaaatctttgtaactttttatatctgcttttgtttcaccaaagaaacctaaaatccttcttttactacac

SEQ ID NO: 204 - DNA, 2062 bp, Homo sapiens
cctgggtcccgtcacatccttcttgctcaaccactgggtgcacaggatggaaacttctattccctctctggaagacagcgcgtggcttggcttcacagagttgtggctggagaccgaagcagcccctttctcaggcttactgtcaccagtctgtctgtgttaggggagaggggagtccgctctgtcctgaaggcccagagatggaaggacaagtggtaggccgggtgttcaggctcttccaacgccgactgcttcaactccgagcaggaccaccccaggacaattcaggggaagctttaaaggaaccagaaagggcccaggagcactctttgcccaactttgctggggggcagcacttctttgaataccttcttgtggtttctctcaaaaagaagcgttcagaggatgattacgagcctataatcacctaccaatttcccaagcgggagaacctgcttcggggtcagcaggaggaggaggagcggctgctcaaagctatccccttgttctgcttcccagatgggaatgagtgggcatcactcaccgagtatcccagggagaccttctccttcgttctgaccaatgtggatgggagcagaaagattggatactgcaggcgcctcttgcctgccggccctggccctcgccttcccaaagtgtactgcatcatcagctgcatcggctgcttcggcttgttctccaagatcctggatgaagtggagaagagacatcagatctccatggctgtcatctacccgttcatgcagggcctccgagaggcagccttccctgctcctgggaagactgtcactctcaagagcttcatccccgactcaggcactgagttcatttcactgacacggcccctggactcccacctagaacatgtggattttagttctctattgcactgtctcagttttgaacagatacttcagatctttgcctctgccgtgctggagagaaaaatcatcttcctggcggaaggtctcagcaccttgtctcagtgcatccatgctgctgccgcactgctctaccccttcagctgggcgcacacctacatccctgttgtccctgagagccttctggccaccgtctgctgccccacccccttcatggttggagtacaaatgcgcttccagcaggaggtcatggacagccctatggaagaggtcctgctggtcaatctttgtgaaggaaccttcttaatgtcggttggtgatgaaaaagacatcctgccaccgaagcttcaggatgacatcttagactctcttggtcaggggatcaatgagttaaagactgcagaacaaatcaacgagcatgtttcaggcccctttgtgcagttctttgtcaagattgtgggccattatgcttcctatatcaagcgggaggcaaatgggcaaggccacttccaagaaagatccttctgtaaggctctgacctccaagaccaaccgccgatttgtgaagaagtttgtgaagacacagctcttctcacttttcatccaggaagccgagaagagcaagaatcctcctgcaggctatttccaacagaaaatacttgaatatgaggaacagaagaaacagaagaaaccaagggaaaaaactgtgaaataagagctgtggtgaataagaatgactagagctacacaccatttctggacttcagcccctgccagtgtggcaggatcagcaaaactgtcagctcccaaaatccatatcctcactctgagtcttggtatccaggtattgcttcaaactggtgtctgagatttggatccctggtattgatttctcaggactttggagggctctgacaccatgctcacagaactgggctcagagctccattttttgcagaggtgacacaggtaggaaacagtagtacatgtgttgtagacacttggttagaagctgctgcaactgccctctcccatcattataacatcttcaacacagaacacactttgtggtcgaaaggctcagcctctctacatgaagtctgtggacatgtaaggacgagagtaaagaggaaaatcttataaaaaaaaaaaaaaaaaaaa

SEQ ID NO: 205 - DNA, 4857 bp, Homo sapiens
cagactcacgcagctccagcccatcttgctgacctaattcagaaaagaagtgctacagctctgtgcctgtcatctttgcagtgtagcattttcaggtgatctaggaaacagttatttttatgagcaaataagagaaacaggaatcatgatggggatatatttaacagacccagtactggataaaacttaaagccagtttctattcaacatagtgaaaaggtcaccttgcctggctgagaaaagcagcaaaatatcagctttgttggtttcagttaacctcttagcccgggctaatctcttttccttgatgttcaaaccaatttgggatatctaactctaaagagagacacactgtactcatggtagatgacaaggaaaagaacatgaaatgtctcaccttcttcttgatgcttccagagacggtaaagaacaggtccaagaaaagctcaaagaaagcaaataccagcagcagcagtagcaacagcagcaagttgccaccagtttgttatgaaataattaccttgaagactaaaaagaagaagatggctgctgatatattcccccgtaaaaagccagccaactccagcagcaccagcgtccagcagtaccaccagcagaatctcagtaacaacaaccttatcccggccccaaactggcagggtctttatcccaccattagagagagaaatgcgatgatgttcaataatgatttgatggcagatgtacattttgtggttgggccaccaggtgggactcaacggttgccaggacacaaatatgttttagctgttgggagctctgtgttccatgcgatgttttacggagaacttgcagaggacaaagatgaaatccgtataccagatgtcgaacctgctgcttttctcgctatgctgaaatatatctattgtgatgaaattgacttggctgctgacacagtgctggccacactttatgctgccaaaaagtacattgtccctcaccttgccagagcctgtgttaatttcctggagaccagcctgagtgccaagaatgcctgtgtgctcctctcccagagctgcctgttcgaggagccagacctgacccagcgttgctgggaggtgattgatgcccaggctgagttagctctcaagtctgagggattctgcgatattgacttccagacactagaaagtattctccgtagggaaactctgaatgccaaagaaattgtggtttttgaggcagctctcaactgggctgaagtagaatgccaacgacaagatctggcgttgagcattgaaaataaacgcaaggttctaggaaaggcactttacttgatccgcatacccacaatggccctcgatgattttgcaaatggtgctgcacagtccggggtattaactctcaatgagaccaacgacatcttcctctggtatactgcagccaaaaagcctgagcttcagtttgtgagtaaagcccgtaagggccttgtcccccagcgctgtcaccgtttccagtcgtgtgcctatcgaagcaaccaatggcgctatcgtggtcgctgtgacagcatccagtttgcagttgataaaagagtgttcattgctggctttgggctgtatggctccagctgtggttctgcagaatacagtgccaagattgaacttaagcggcagggcgttgtcctggggcagaacttgagcaagtacttctcagatgggtccagcaatacctttcccgtatggtttgaatacccagtgcagatcgagccagacaccttctacacagccagtgtgatactggatggcaatgaactcagctactttggacaagaaggcatgacagaagttcagtgtggcaaagtgactgtccagtttcagtgctcctcagatagcaccaatggcactggggtacagggagggcagatccctgaacttatattctatgcttgaaaactcacttcctgaagcagcttgagctccaaagtgcacatctggttccaacttgcctgatgcttagctcatctgcaaatatgtgatcagtgccggtaatttgtaatgaatgaagcggtaggcaggttctaatttcttttaaccttttaattatgtacaggcaaaaatgcagcattccgcttttaactatctgcttaaaagagctaacgttcttattaaggctttgtggtttttagagttgcatctatgaacctggggagattatgtgctttcccaagcgttccaccaccctctcagttttgtccctctgaagataattttggatcaccttgaatttccttttggacgttatttgatgaacagaaataaattgataacaagagttatttttaaacagaactcctcttaccccccaaaacagataaacctcagtgtacaattttgaaagaagttttgccttgtaatgagtaataatttagaaagtagacagtggttgtgtttggctctcgttttattccttttacatttgttgcttctgggatttaaaaaattactaaattcataagatagttaggtattaaacacttcagaatatcaatgtaaaattggaaaataaggaactgggggcatttgtttaggccatgacttctacaagcagatttcttttcttttagtttagaagacaaaaaatttcaatacagatacttcttttagaagtaaatttttagattttattgtcagtagaaaaaagttaaactcctactaatttaaactaagacagtttaaaaaggaagcctgaaaaagactcatactacaaataatttaattgatggcatataagaatatgcagtttgaaaaagccaaactcttctctccacttagcttttgatccccactgtttgcttatttgtataagtcatactgtgtagaatttctattttctttttccccattaaaagaggaccaaacaattctttatacaaatggagtagcaactagttttgtagcactacatttaatgtaatgagatacctttgttcatttttttaaatttgaaatatactttacctgatccactttgattgtatactatattctttgttaattttaattttgtcctgttcctagactgctagaatctggcccctggccatcttaaagtgccaacatatgcctgcagggtttataaaaaatggcctggagtgacacattttattatacctaatattcactgcatcagtatcacatctagctcccttacttgtccacagataatgtaaacaaaggagggaaaaacttattaaattctccttcgctgctggcttgtgctggtttagtgcctgtgtccctggcagtgtccagtgtgttcacttccagttgaagtatccatgtgtttctgggcagcttttctgctcagtgtgatcctgagatggcttccccgccgccacccagagtgtggtccttggccgcctcctgctcctgctctgcaagcctgaaactggcttgtctggagccaggagttagtcctggggtgtgtgtgtgcctgcgcacccatgcgcatgcaagtgtgtttgccagctcaggagctgtctcctctctacctggctagtaagaggtgggacagtaatggtcctcctgctggccccagcaaggcccatgagtgactgccctgacgtattcactgtgcctctgggccacttcttcccctgtagatgtgggcttgttgccttcagccggcttccctgagggaggagaacactggattattggaaatgttttaatcactcttgccattacctacatctattagcatagatgatgaaaagctgttactggtgattatagatgagtatttccaggacaacattctaaaagtacaattatttcttattggggagattacaggtagtttggcaaagcattgaagtacaaaggtacattttcaattaaaaagcacacttctacaaaagatttggtttttaaattatggttacacatttcagtaactcatagctgctgtgcaaattggtagaccttataagaaggcacttgtttgtaagccagagaagaaactttaattgcatcctatcagattgttgaggtgggtgtgatagtcttcaggtgcagtgcgttcattcactaacgctcactgtcagtgcccatgtttgctagctgcctccatgtgactagtgagctgctggtgaaagtcgtgtgaaatcctgtacactgtgtatagaacaatgtaattttatgttaattgttattactttaaaacatatctaccatctgattggctggtaccgagagctgtgggtaaaatttgaaaattgtatttagaataagaaattttacattttaaaccctattgtcctttatgcattttcaatgaaatggaatgaaggctaatatgcttgctttatttacttttgtaatcttggattttgtagcttttaaaactagaaaccattgttctaacaaagcaggcaactttattctataaacacaactttattaagcagaatacactgtagatgcttttccccaacgtatctggctggcagtctttgtcgttgttcattctggggataaaggggaactaggctagcagttctaatgtgacattctttaagcatatcttaaaatagtatttaagtaaatggtctaatttctacataattattgcactgaacttttttgtttattaaggtgtttaaataagctcagctaattcaagacactgtagtcacttgtgcatcagtgtgcttgaatttagtagcttacagcattatttatgaaggaaaaaatacataaatatgaagtacctcatgttgaatgttattgtactgtatttttaatgtaacagtgcagatcttgttagacacatgaatgtgtataatcatgttaaatgcaaataaaactagttcataga

SEQ ID NO: 206 - DNA, 3773 bp, Homo sapiens
aggcgcacaggtaccattttgaccgtaaacatcctgccgatttgaaccgaggatttgggcggcaggaagagccgcggcgtaacggcagccatcttgtttgtttgagtgaatcggaaaggaggcgccggctgtggcggcggcgggagctgctcggaagctacacctcgcaagggctcccccctttccccaccccctcccccgacccttttcccctccccgggccacccagcccgcccaactcccagcggagagcaaggttttcttctgttttcatagccagccagaacaatgttctacgcacattttgttctcagtaaaagagggcctctggccaaaatttggctagcggcccattgggataagaagctaaccaaagcccatgtgttcgagtgtaatttagagagcagcgtggagagtatcatctcaccaaaggtgaaaatggcattacggacatcaggacatctcttactgggagtagttcgaatctatcacaggaaagccaaataccttcttgcagactgtaatgaagcattcattaagataaagatggcttttcggccaggtgtggttgacctgcctgaggaaaatcgggaagcagcttataatgccattactttacctgaagaatttcatgactttgatcagccactgcctgacttagatgacatcgatgtggcccagcagttcagcttgaatcagagtagagtggaagagataaccatgagagaagaagttgggaacatcagtattttacaagaaaatgattttggtgattttggaatggatgatcgtgagataatgagagaaggcagtgcttttgaggatgacgacatgttagtaagcactactacttctaacctcctattagagtctgaacagagcaccagcaatctgaatgagaaaattaaccatttagaatatgaagatcaatataaggatgataattttggagaaggaaatgatggtggaatattagatgacaaacttattagtaataatgatggcggtatctttgatgatccccctgccctctctgaggcaggggtgatgttgccagagcagcctgcacatgacgatatggatgaggatgataatgtatcaatgggtgggcctgatagtcctgattcagtggatcccgttgaaccaatgccaaccatgactgatcaaacaacacttgttccaaatgaggaagaagcatttgcattggagcctattgatataactgttaaagaaacaaaagccaagaggaagaggaagctaattgttgacagtgtcaaagagttggatagcaagacaattagagcccaacttagtgattattcagatattgttactactttggatctggcaccgcccaccaagaaattgatgatgtggaaagagacaggaggagtagaaaaactgttttctttacctgctcagcctttgtggaataacagactactgaagctctttacacgctgtcttacaccgcttgtaccagaagaccttagaaaaaggaggaaaggaggagaggcagataatttggatgaattcctcaaagaatttgaaaatccagaggttcctagagaggaccagcaacagcagcatcagcagcgtgatgttatcgatgagcccattattgaagagccaagccgcctccaggagtcagtgatggaggccagcagaacaaacatagatgagtcagctatgcctccaccaccacctcagggagttaagcgaaaagctggacaaattgacccagagcctgtgatgcctcctcagcaggtagagcagatggaaataccacctgtagagcttcccccagaagaacctccaaatatctgtcagctaataccagagttagaacttctgccagaaaaagagaaggagaaagagaaggaaaaagaagatgatgaagaggaagaggatgaagatgcatcagggggcgatcaagatcaggaagaaagaagatggaacaaaaggactcagcagatgcttcatggtcttcagcgtgctcttgctaaaactggagctgaatctatcagtttgcttgagttatgtcgaaatacgaacagaaaacaagctgccgcaaagttctacagcttcttggttcttaaaaagcagcaagctattgagctgacacaggaagaaccgtacagtgacatcatcgcaacacctggaccaaggttccatattatataaggagctagaagcattatagctagtgtttgattcactagtgcttacaaattgcccccatgtgtaggggacacagaaccctttgagaaaacttagatttttgtctgtacaaagtctttgcctttttccttcttcatttttttccagtacattaaatttgtcaatttcatctttgagggaaactgattagatgggttgtgtttgtgttctgatggagaaaacagcaccccaaggactcagaagatgattttaacagttcagaacagatgtgtgcaatattggtgcatgtaataatgttgagtggcagtcaaaagtcatgatttttatcttagttcttcattactgcattgaaaaggaaaacctgtctgagaaaatgcctgacagtttaatttaaaactatggtgtaagtctttgacaagaaaaaaaaacaaacaaacacttctttccatcagtaacactggcaatcttcctgttaaccactctccttagggatggtatctgaaacaacaatggtcaccctcttgagattcgttttaagtgtaattccataatgagcagaggtgtacgcgaaattgtgttatgactgatagccttcagctacaaaaagataggactgacctggtttaaagtgttctattttgtaaatcattccatttgagtctttctgatgaacttggctatactgaaatctgttattttagtgaggctccaaaatgagcaaagctaggcctgattagagtagagtgactattaaaaaacataactttctaggagctataaatcaaagttttaaaaagatgtttggatatatttgagtattccgatcatgaaaacagaaattgccctgcctactacaaggacagactgatgggaaattatgcacctggtcaacttagcttttaagcagacgatgctgtaaaaactaacggcttctctgatatttattgtaagttttagtactgatctccttttccagtgctgcacactcctggtttggaactttaatagcgttgcaacgaaatcctatatccagtttcctgtaatttaattgaagaaaaatacatccaaataaagactttattattaacagaccagatagcatcagaaatcatgtgactgttatgattatcagaatgtcttaactttttagggcaaagttaacactgaaagttctagcttaagtgttgaaacttttgtgggaaaaaaaaatcacttttgaaactcagacttcagtgtatacccaataatttaaaattatgtgaaatgttttaaatttgtgaactcgtaattactgttttaatgattcagtttcttcagagtggtaattgtataaaattgctattgcagctttacattcaatatgatgtgcctgtaaaccaaggagttttccccgtttgtaaaaagacattgtagataattgaatgtttgattttagaaaggtcattagtttcttgttacacattttgttagtctggtttttgttgcttatcgggtttaatattgttcttgaaaatagttgatgctatgttatgtataacttttctaataaaagttgtgttataagctgtaaaaaaaaaaaaaaaaaaaaaaaa

SEQ ID NO: 207 - DNA, 5605 bp, Homo sapiens
gtgaactaaagagtcgccgcagacaagcaggcccccagatggagaaccagcctgtgaggtggcgggccctgccaggcctcccacgccctcctgggctccccgcagccccctggctcctccttggcgtgctgctgctgcccgggaccctgcgactggcaggaggacagtcagtgacccacaccggcctgcccatcatggcctccctggccaacacagctatctccttcagctgcaggatcacctatccatacactccccaattcaaggttttcacagtcagctactttcatgaagatctccagggacagaggagccctaagaagccaacaaactgccaccctggactgggcacagagaaccagagccacaccctggactgccaggtcacccttgtgctgccgggagcatcggccactggcacctactactgctctgtccactggccacactccacggtgagaggcagcggcaccttcatcctggtcagagacgcagggtaccgagagcccccgcagagtccacagaagctcctgctctttggcttcaccggcctcctgagtgtcctgagtgtagtgggcacggccctgctgctctggaacaagaagcggatgcggggtccagggaaggaccccaccaggaagtgcccagatccaagatctgccagcagccccaagcagcatccttcagaatctgtctacacagctctgcagcgccgcgagaccgaggtctatgcctgcatcgagaatgaggatggcagctcacccaccgccaagcagagccccctctcccaggagagaccgcatagattcgaagatgatggcgaacttaacctggtctatgaaaatctctaggatgggctccaccgctcatagagcttgccctgggtcagaggaccggggcagcccctgccaccaaaggacttgatctgagttgggagtaaggcccccagggacaccccatcatttcaccctcacattcaaggcccttcctgtcttggccggccccactgcccccccattctatgccccaaccaccaaggctttcccatcttggggcctttgcccaggctgttccttctgccaggcaggcccttcctcccttggcccaaccagcaaagcgcccctcagtcttcaagggctttcctggatgccacccttgcccagagccctgctcactgcctcatgctgacagagcagcatgctctcttggcaccagcctgcacctcagccagtagggcagcctctgagctgagggaggaccctgcaggggcgcctagcagtgctgtgtggggagccgaggtatggaggagctggggagcagctatgcaaatccctacctacccagctgggccagaggcacgaggcagccaggcagggtgggagcaggggctggcgtgggaggtctgggggacagacaaggatgatggacccctcagaggcaagactaggatcagggacagatctggaggcccaggacatggctgagaggtggtcagcaggctgggggcatggagcagagagggcttgggtacaagctggagaggaaggagattctggcatgttggggtgagggcagagggacagatgaggggaggagggtgctggctaaacaggaactgaatgaatggcctgaagctccctctcccaagggttcccactcccattggcctggccctgtacgtgcactctgtcatctccttggtcaccctctgctccaggccttctccaccacaggacctcagctgtccctccttctacccaaggtggagtcccccaaagtcccttctgtctggcctatcctgtgcccaccacctgtggcttcatccagccctcctcctctatctttatctgccataggccgcagccctggccccctgtggattgaggtcccaagtggtccagctgtggggtttggtgctgggaccctcaatggcagccggaaggtccctctgaggcagaagctcaagccccatggggacagtggctccccagtgcctggccctgagccatttctgctgtttcaggtgcccacatcaccctcatttcctcctcgcagtagccctgcaccgtggccagaaacccatccacaggcaggcagtggctggggtccgggtgccccgggctgttgggctctgcttcctccctctgctcccccatgtctccctgagttctcccacctttgctcatttgtaaaatgggcaggtcaatcttcccaccccaccgtgtgggctgccccaaccccaaatgtgcccagggaggggggggaacccaaggcacaggccccgcccctgcccccaagcagcactgggctactggctcacagaagcacctttggttctgcaggtcatgcccctccctgcagggaagggaaagctggtggtagaggctgggcacagactgacgtccagaagaagtcccttggccctgctagggtggcaccagacttctctggtcccacaggacagccagtggcctcccaacttggttctgggcccccgcctgcaagcacacatggcaaggagggctttagcaggctcacataaccgagtggcaaggcccctgctcccagaggctggatttgaatgaactccgggcctgtttggggaggtgaagctgccaggtgtgcacaggggcctcccaggctcctggctccaccagccaaggaggtgggggcaagggtcagggcaatgggggacaatgccgctcagggtgcagtgagctcccctgggaaaaccgaagccagcaagaccaggagagggccacctcactgggcctgcctcccccacctcctgggcctctctgacctcagctcctagaccctggacccttggctgggactcagcattttccagtctttttcaggggtagacaggggagcctgggttaaactttaccactgtgccctggcccaggcatcaccaacacggcctccctgcagctgccctgccaccgacagaccccgattaaacccacacctggccttggcctcccctgctctataccttgcatggtttttgcctcacttggaataaaattccaactcctccctgtggcgtaggaggttcttgggggctgacccatcacccctctggtggacagagacattgccagcgtggtggtcgtctgtgcttggttcagggcaaggctgggaggcagtgggtgctgaggtcttcagtgagcaaggagagaggcagggaggaggaggaggaggaggagagcacagcatgaaaggacgggaccctaaagggctttggcccaagggagggtggggcaagaatgttctgagacttctgtgggcagcaaagaggactgagcacctgttctccagcccccaggactgagagcctgcagagacaagctggcacagggcgaggggtggcagggaacttcagggtgggaggtgcatggggcaggcgggaggaggaagaacagagaggggacagagagggtatgaatgggagctcctggggtgcaggcttgctttccactatgaatgggtggaggagggaagagaagaaaattgcttttgagacccacccaggctgggtggcctcagggcctcccttgaatccctgctccacctcccacagccttgtggacttgggcaagtcactggccacctgagcctcagtttgcagtgacagtcaagacagctcaggccaggcgtagtggcttatgcctgtaatcccagcatgttgggaggccgaggcgggtggatcacttgaggccaggagtttgagaccagcctggccaacgtggtgaaaccccgtctctactaaaaatacaaaaattagcctggtgtggtggcacgcacctgtagtcccagctactcgagaggctaaggcaggagaatctcttgaacctgggagacagaggttgcagtgagccgaagtggcaccactgcacaccagcctgggctacagagcacgctctgtccaaataaacaaacaaacaaacactactcagtgtctcagaaaggacagaaggggactccctggctcaggcagaagctcagtgggtgtgcatttccttcaagactcgtccttcagaaggaataggcttctggggcagtacagaggagtctaagtgagaggcaggcctccctgggagctgggcccaggctctctgcagccatgcctttaaggagtgcctacggggtagcacgatcagatggacaggccagggctgcccagagctgggggtgggagcaaggtaagcagagaggtgagggaaggagggtgctggcttagcaggagctgaatgaatgggcctggaggggaaaagctaagggggatggggtggcttgagtggagtaggtgaggcctaggtgaaggggagctgtggaccttccaggacggacggatgtgagcagtcctgagtggggactggagttagggtggggaagggaagccccaggcagcccctgcaggcccctgcccctgggccctaccgcagcagggcagccctgtctctgggtctcagctgatgcttccctctgcccactggcccctgacctggtgggatttcccaccatctctcccggcccagcctgccctgccctcctaggtcttcccaacctcccctctgcagaaacatctcagccacgtctggcacccccaggcatccctgcctgcctctaggaagttgaccccttcaatgggtttcagcctccaaccccacccccgcttgactcctgctctgtcagcacttgcttgagaaaatcatcctgggaaaccagcttctgggagcaggggccttgccactcggttctgcgagcctgctgaagccctccttgccacgtgtgcttgcaggcgggggcccagaactaagctaggaggccactggctgtcctgtgggaccagggaagtctggtgccaccctagcagagggcccatggacttcttctggaggtcagtctgtgcccagcctctaccaccagtccagaacttgcagtgggtgcggtaaacggtggcccctcctcagcaaacatttccaggggattctggcagcagagtttccatgggaacatgtgctggttctgcgctgaacccggtgtggctggggttcccttcacagccaatattgcaggaactgagcctggtggcctcggccagggtaggcagtgctctttggccacccagtgtcacaaacctgaactcaagttacaggcaaaacctgcttttcctttttctttctctctctctctctttttttttttgttaaagcacattctaatgtaaagtccatgctccattctaaagatgcctctgggatttcagggatggatttttatgtagttcaatagttttcttggcagacagcttatgcaggagaggtgggccgttggctcagtccagccaggctgagtggcgtcactccattccttgcaatgccaggggatgtcatttgtccacctgagggggcttccccagtctcccttccctgacctgtggtcagaatgatggcctcagccttgactgagcgcgggtcaggccagactctctgaacttggtgttggcgtgtgttttgtgtgtgtctggaggtgacatatgtgggtgacagaagcatatgttacagtgaaacattaaaactacagcaaagtgaaa

SEQ ID NO: 208 - DNA, 5144 bp, Homo sapiens
ccctgtccctggctcacgtgatcgcgcctagggagaaaacgtctgactccagccaccggccttcaaggcacggctttttattccttcggctggtcggcctctcgcccttcagctacctgtgcgtccctccgtcccgtcccgtcccggggtcaccccggagcctgtccgctatgcggctcctgcctctagccccaggtcggctccggcggggcagcccccgccacctgccctcctgcagcccagcgctgctactgctggtgctgggcggctgcctgggggtcttcggggtggctgcgggaacccggaggcccaacgtggtgctgctcctcacggacgaccaggacgaagtgctcggcggcatgacaccgctaaagaaaaccaaagctctcatcggagagatggggatgactttttccagtgcttatgtgccaagtgctctctgctgccccagcagagccagtatcctgacaggaaagtacccacataatcatcacgttgtgaacaacactctggaggggaactgcagtagtaagtcctggcagaagatccaagaaccaaatactttcccagcaattctcagatcaatgtgtggttatcagaccttttttgcagggaaatatttaaatgagtacggagccccagatgcaggtggactagaacacgttcctctgggttggagttactggtatgccttggaaaagaattctaagtattataattacaccctgtctatcaatgggaaggcacggaagcatggtgaaaactatagtgtggactacctgacagatgttttggctaatgtctccttggactttctggactacaagtccaactttgagcccttcttcatgatgatcgccactccagcgcctcattcgccttggacagctgcacctcagtaccagaaggctttccagaatgtctttgcaccaagaaacaagaacttcaacatccatggaacgaacaagcactggttaattaggcaagccaagactccaatgactaattcttcaatacagtttttagataatgcatttaggaaaaggtggcaaactctcctctcagttgatgaccttgtggagaaactggtcaagaggctggagttcactggggagctcaacaacacttacatcttctatacctcagacaatggctatcacacaggacagttttccttgccaatagacaagagacagctgtatgagtttgatatcaaagttccactgttggttcgaggacctgggatcaaaccaaatcagacaagcaagatgctggttgccaacattgacttgggtcctactattttggacattgctggctacgacctaaataagacacagatggatgggatgtccttattgcccattttgagaggtgccagtaacttgacctggcgatcagatgtcctggtggaataccaaggagaaggccgtaacgtcactgacccaacatgcccttccctgagtcctggcgtatctcaatgcttcccagactgtgtatgtgaagatgcttataacaatacctatgcctgtgtgaggacaatgtcagcattgtggaatttgcagtattgcgagtttgatgaccaggaggtgtttgtagaagtctataatctgactgcagacccagaccagatcactaacattgctaaaaccatagacccagagcttttaggaaagatgaactatcggttaatgatgttacagtcctgttctgggccaacctgtcgcactccaggggtttttgaccccggatacaggtttgacccccgtctcatgttcagcaatcgcggcagtgtcaggactcgaagattttccaaacatcttctgtagcgacctcacacagcctctgcagatggatccctgcacgcctctttctgatgaagtgattgtagtaggtgtctgtagctagtcttcaagaccacacctggaagagtttctgggctggctttaagtcctgtttgaaaaagcaacccagtcagctgacttcctcgtgcaatgtgttaaactgtgaactctgcccatgtgtcaggagtggctgtctctggtctcttcctttagctgacaaggacactcctgaggtctttgttctcactgtattctttttatcctggggccacagttcttgattattcctcttgtggttaaagactgaatttgtaaacccattcagataaatggcagtactttaggacacacacaaacacacagacacaccttttgatatgtaagcttgacctaaagtcaaaggacctgtgtagcatttcagattgagcacttcactatcaaaaatactaacatcacatggcttgaagagtaaccatcagagctgaatcatccaagtaagaacaagtaccattgttgattgataagtagagatacattttttatgatgttcatcacagtgtggtaaggttgcaaattcaaaacatgtcacccaagctctgttcatgtttttgtgaattctaggctggtgctgcactgaaatagagcagtaagcttgtgataaaggccaattccaggtagctcttgaaggtgatagccatctactttccagtggctgccaaccacagggagtgccagttaacactggaaggattaaggcaaggtcccttctcttgagactcccctctgagatctgaaaaatgaagtggcttaggaacatcagcagtgaagaactgccaagagttggtgaaggttgtctcttccgagggccttctgaagacagggctcttgaacagacaagtggaagggctgtaccagggataaaggaaagaagtgcctgtccagcagggagcttgaatttaagttccatgtatgaagtcattggctctatctgcatttttctgtcattctcttcatttgttttaaggtggaaaattttcttacagttgatgcaaagtatcaactactttaccctaccttctccccttttagatgggttcttcctgagttttggagtcttgtatgattatcagtattcccctgtcaaaatcaaatctattcaggtttcttcactgttgagaacacctaaatgtttttatttttgagaagtggggacagagtctcactatgtcacccaggctggagtgcaatggcatgatctcagctcactgcaaccttcgcctcctgggttcaagcgattctcctgcctccgcctcctgagtagctgggattataggcacgcaccaccacgcccagctaattttttgtatttttagtagagacagagtttcaccatgttggccaggctggtcttgaactcctgaccttgtgatccacccacctcggcctcccagagtgctgggattacaggcatgagccaccacgcttggctaagaacacctaaatttttatgtttcttggctcaaaaaccagttccatttctaatgttgtcctcacaagaaggctaattggtggtgagacagcaggggaggaggaagagctgtggtttgtaacttgttcaactcaggcaataagcgattttagctttatttaaagtcttctgtccagctttaagcactttgtaagacatggctgaaagtagcttttctatcagaattgcagatagtcatgttgggctaacagtcaattggatatattcctttacctcacatgaccccagcaactgtggtggtatctagaggtgaaacaggcaagtgaaatggacacctctgctgtgaatgttttagagaaggaaattcaaaaaatgttgtaactgaaagcactgttgaatatgggtatcggctttctttttcactttgactcttaacattatcagtcaacttccacattaatgaaagttgaccatagttatttccaaataaaaagaaaccaactcttaccaggtcttggactgtgatgtcatattattcagttttatgcttgttcctgagcagaactcataagagtgacatagtcagctgctgacggcacctcagccacgccactcttactcagttcagtgggtgtgcttgcgtggtaggatgtggtgcagccctctctacgctcttctatttttggtatatttcctatctaaccttcaaatagcttccaattctttttttcttggactggcttcattctgaatttgtgctaaaataatctttcataaagagacctcagtttatagcgtaacagactacacaatgcactgatgttttcataatgtttaagggacccactgcaagaagcttgctgcctccttttaattgtattcatttagattttgattttccatgttaagaaggtgaggtccatgttggtgcccttcagagtagagaaccatgtaaacattaggaatgaacagaggccttaggaatgaatagagagtttgccttatacaatttcctgttacaaagctctccctctcatgcaaagtagggaacaccttttgagcatctttgaatttgacaaatggtgctgttgcaaacactttttttttgagatgaagtctcgcggttgtcacccgggctggagtgcagtggcgtgatctcggctcactgcaacttccacctcctgggttccagcagttctcctgcctcagcctcccaagtagctgagattacaggcgcctgccaccccacctggctgatttttgtaattttagtagagacggggtttcaccatgttggccaggctgattaactcctgacctcaggtgatccacctttctcggcctcccaaagtgctgggattacgggtgtgagccaccgtgcccggcctgcaaacacattttaattgacaacactagggctgttgtacaaaatagtaatgatagccatggaagttttaccttattctgtgagaagtgttcttaaacttattaagtgtctaaactaaggtttagtgcttttttaaaggaaagttgtcccaggattcatcctaaagaaagcaaaagttaattcaactgatccaccaatggaattagatgggtagagttgggttcttgagttttaccaccacttagttcccactgaattttgtaacttcctgtgtttgcatcctctgttcctattctgcccttgctctgtgtcatctcagtcatttgacttagaaagtgcccttcaaaaggaccctgttcactgctgcacttttcaatgaattaaaatttatttctgttctagtgggaaaaaaaaaaaaaaaaaa

SEQ ID NO: 209 - DNA, 886 bp, Homo sapiens
agacggtcttcgccgagagtcgtcggggtttcctgcttcaacagtgcttggacggaacccagcgctcttcccctagcccggccggccgcccatagccagccgtccgtcacctcttcaccgccccctcagaccgccccaaggtccccccgccgccgctccagcgccgccgctgcagccgcctctctttagtcgccgccatggcgaccccgtccacctcgcaggagcgccaggactacaaccaggactcagaggccgccatcaaccgccacatcaacctggagctctgcgcctcctacttttacctgtccatgtcttatactttgaccgcgatgatgtggctttgaagaactttgccaaatactttctttaccaatctcatgaggagagggaacatgctgagaaactgatgaagctgcagaaccaacgaggtggccgaatcttccttcaggatatcaagaaaccagactgtgatgactgggagagcgggctgaatgcgatggagtgtgcattatatttggaaaaaaatgtgaatcagtcactactggaactgtacaaactggccactgacaaaaatgacccccatttgtgtgacttcattgagacacattacctgaatgagcaggtgaaagccatcaaagaattgagtgaccacgtgaccaacttgcgcaagatgggagcgcccgaatctggctcggcagaatatctcttcgacaagcacaccctgggagacagtgataatgaaagctaagtctcaggctaatttccccatagccgtggggtgccttccttggtcaccaaggcagtgcgtgcacgttagggtttcctttaccttttctataagttgtaccaaaacatccacttaagttctttgatttgtaccattcct

SEQ ID NO: 210 - DNA, 1750 bp, Homo sapiens
ggcttccgtccattcttccggtggagatggctgcggccgtggcggggatgctgcgagggggtctcctgccccaggcgggccggctgcctaccctccagactgtccgctatggctccaaggctgttacccgccaccgtcgtgtgatgcactttcagcggcagaagctgatggctgtgactgaatatatccccccgaaaccagccatccacccatcatgcctgccatctcctcccagccccccacaggaggagataggcctcatcaggcttctccgccgggagatagcagcagttttccaggacaaccgaatgatagccgtctgccagaatgtggctctgagtgcagaggacaagcttcttatgcgacaccagctgcggaaacacaagatcctgatgaaggtcttccccaaccaggtcctgaagcccttcctggaggattccaagtaccaaaatctgctgcccctttttgtggggcacaacatgctgctggtcagtgaagagcccaaggtcaaggagatggtacggatcttaaggactgtgccattcctgccgctgctaggtggctgcattgatgacaccatcctcagcaggcagggctttatcaactactccaagctccccagcctgcccctggtgcagggggagcttgtaggaggcctcacctgcctcacagcccagacccactccctgctccagcaccagcccctccagctgaccaccctgttggaccagtacatcagagagcaacgcgagaaggattctgtcatgtcggccaatgggaagccagatcctgacactgttccggactcgtagccagcctgtttagccagccctgcgcataaatacactctgcgttattggctgtgctctcctcaatgggacatgtggaagaacttggggtcggggagtgtgtttgtcacttggttttcactagtaatgatattgtcaggtatagggccacttggagatgcagaggattccatttcagatgtcagtcaccggcttcgtccttagttttcccaacttgggacgtgataggagcaaagtctctccattctccaggtccaaggcagagatcctgaaaagatagggctattgtcccctgcctccttggtcactgcctcttgctgcacgggctcctgagcccacccccttggggcacaacctgccactgccacagtagctcaaccaagcagttgtgctgagaatggcacctggtgagagcctgctgtgtgccaggctttgtgctgagtgctgtacatgtattagttcctttactgctgaccacattgtacccatttcacagagaaggagcagagaaattaagtggcttgctcaaggtcatgcagttagtaagtggcagaacagggacttgaaccaagccctctgctctgaagaccgcgtcctgaatttcttcactagagcttcctcatcaggttacccagaagtgggtcccatccaccatccaggtgtgcttggatgttagttctccaccctcgaggtgtacgctgtgaaaagtttgggagcactgctttataataaaatgaaatatattctacttcctttattttgtggtttacacggttgtcctccctctaaacttactctcaggggcttctctgtcatctgactttcctcactcttgcttcccttcctaggaaaatcctcttcccctatacctgttcccacaaatggcatcccgcgcatgcttgccctattaaaggcagctgacagctgtacccactaaaaaa

SEQ ID NO: 211 - DNA, 2097 bp, Homo sapiens
ggtccttcagcctcgttcccgggcagtataaagtttgctgtctcctttgttcgccctcgttgcgcagtagtgctagcggcttcgcggttcggtcctcgcacccggcagccgccactggtgctgagctgctaggaagcccctatcgccgagctcgttggagcttgaacccattgtcacccctccgactcaccggcccaaaaaaaaaaaaacatggttgaagcagatcgcccaggaaagctcttcattggtgggcttaatacggaaacaaatgagaaagctcttgaagcagtatttggcaaatatggacgaatagtggaagtactcttgatgaaagaccgtgaaaccaacaaatcaagaggatttgcttttgtcacctttgaaagcccagcagacgctaaggatgcagccagagacatgaatggaaagtcattagatggaaaagccatcaaggtggaacaagccaccaaaccatcatttgaaagtggtagacgtggaccgcctccacctccaagaagtagaggccctccaagaggtcttagaggtggaagaggaggaagtggaggaaccaggggacctccctcacggggaggacacatggatgacggtggatattccatgaattttaacatgagttcttccaggggaccactcccagtaaaaagaggaccaccaccaagaagtgggggtcctcctcctaagagatctgcaccttcaggaccagttcgcagtagcagtggaatgggaggaagagctcctgtatcacgtggaagagatagttatggaggtccacctcgaagggaaccgctgccctctcgtagagatgtttatttgtccccaagagatgatgggtattctactaaagacagctattcaagcagagattacccaagttctcgtgatactagagattatgcaccaccaccacgagattatacttaccgtgattatggtcattccagttcacgtgatgactatccatcaagaggatatagcgatagagatggatatggtcgtgatcgtgactattcagatcatccaagtggaggttcctacagagattcatatgagagttatggtaactcacgtagtgctccacctacacgagggcccccgccatcttatggtggaagcagtcgctatgatgattacagcagctcacgtgacggatatggtggaagtcgagacagttactcaagcagccgaagtgatctctactcaagtggtcgtgatcgggttggcagacaagaaagagggcttcccccttctatggaaagggggtaccctcctccacgtgattcctacagcagttcaagccgcggagcaccaagaggtggtggccgtggaggaagccgatctgatagagggggaggcagaagcagatactagaaacaaacaaaactttggaccaaaatcccagttcaaagaaacaaaaagtggaaactattctatcataactacccaaggactactaaaaggaaaaattgtgttactttttttaaattccctgttaagttcccctccataatttttatgttcttgtgaggaaaaaagtaaaacatgtttaattttatttgactttcgcattgcttttcaacaagcaaatgttaaatgtgttaagacttgtactagtgttgtaactttccaagtaaaagtatcccctaaaggccacttcctatctgatttttcccagcaaatgaggcaggcaattctaagatcttccacaaaacatctagccatctaaaatggagagatgaatcattctacctatacaaacaagctagctattagagggtggttggggtatgctactcataagatttcagggtgtcttccaactgaaatctcaatgttctcagtacgaaaaacctgaaatcacatgcctatgtaaggaaagtgctattcacccagtaaacccaaaaaagcaaatggataatgctggccattttgcctttctgacatttccttgggaatctgcaagaacctcccctttcccttcccccaataagaccatttaagtgtgtgttaaacaactacagaatactaaataaaaagtttggccaaaaccaaccatgaagctgcaaaaaaaaaaaaaaaaaa

SEQ ID NO: 212 - DNA, 468 bp, Homo sapiens
accaagccttccacgtgcgccttatagcctctcaacttcttgcttgggatctccaacctcaccgcggctcgaaatggaccccaactgctcctgcgccactggtggctcctgcacctgcactggctcctgcaaatgcaaagagtgcaaatgcacctcctgcaagaagagctgctgctcctgctgccccatgagctgtgccaagtgtgcccagggctgcatctgcaaaggggcatcagagaagtgcagctgctgtgcctgatgtccggacagccctgctcgaagatatagaaagagtgacctgcacaaacttggaattttttttccatacaaccctgacccatttactgtattttttttaatgaaatatgtgaatgataataaaagttgctgacttaaaaaaaaaaaaaaaaaaaaaaaaaaaaaaaaaaaaaaaaaaaaaaaaaaaaaaaaaaaaaaaaaaaaaaaaaa

SEQ ID NO: 213 - DNA, 829 bp, Homo sapiens
gattattttctcaggtgtttgcaacagtgttctaactattaacgctacgatgcctgaacctaccaagtctgctcctgccccaaagaagggctccaagaaggcggtgactaaggctcagaagaaggacgggaagaagcgcaagcgcagccgcaaggagagctattcagtgtatgtgtacaaggtgctgaagcaggtccatcccgacaccggcatctcttccaaggcaatggggatcatgaattccttcgtcaacgacatcttcgagcgcatcgcaggcgaggcttcccgcctggcgcattacaacaagcgctcgaccatcacctccagggagatccagacggccgtgcgcctgctgcttccgggggagctggccaagcacgccgtgtcggagggcaccaaggccgtcaccaagtacaccagttccaagtaactttgccaagggagagacatgaagacagaggagaaatgaatgcataaaataactgataatatgaatctatacatagaacttaggaagtctcatctgcctgaaaatgactgtgtggatcccacccaaatccaactcatcctggtttgctgcacactggttcatcaaaagaaggttaccgaggggaaggaactaaaggtgtttgcacttcatgttactttttgagtttataaacataaaaacagaatttacttctgttacagacctagttactgggaattcattacttgccatggactacctttgctaagaaaagtctgaatgagaagatggcaggacgtctgaaaaaaaaagttataattaataaaatctgcggagaattgtaaaaaaaaaaaaaaaaaa

SEQ ID NO: 214 - DNA, 1661 bp, Homo sapiens
cggccgctgggtccgtgaaggggagtgaggcactcctcaccctgtggcagctcctagtcaggaggcctctcccctccacctgcacgtcatgtggctgtggctcccaggaccagcgcctggagcgggtgagtgaacgtccctctcctccgtgggcactgcctccgctgtgagccacccttcaggctacgtgcatttccgcctgttctcagggtttaaccgaaaccgaacattaaccgtagccctaacgcggctgagggatccaggccttgcctctgggccgggtgagagacagacactcgccaaccagtccgcagtggctccccgtgtgtgcgaggctcccgcctgcgtgtgtgcgtgtgcatgtgtgcctgcgcacaggggagggaaagttcttcagctgccgagggcgggagtaggggctggagcagcaccctgcggcgaggccccacaggagaatcgatggttctgatgctgtcagcctctgggtgcaaattctgagggcccgggagcgtctggcggccctgagcagcttgctggggaagctccgtggaggaggaagtccggaggcatgtgatgtgaatcagctgacatcatcttgacgggagccctgtgaggcggacacttaactccagtttcacaggagggagccatggatttgctgcgggagctgaaggccatgcctatcacgctgcacctgctccagtccacccgagtcgggatgtctgtcaacgcccttcggaagcagagctcggatgaggaggtcattgcactggccaagtctctcatcaagtcctggaagaagctcctggatgcttccgatgccaaagccagggagcgggggaggggcatgcctctgcccacgtcctcgagggatgcctcagaggccccggatcccagccgcaagaggccggagctgcccagggcaccgtcgactccgaggatcaccacatttcctccggtgcctgtcacctgtgatgccgtgcgcaacaagtgccgcgagatgctgaccgctgccctgcagacggaccatgaccacgtggccatcggtgcggactgcgagcgcctgtcggctcagatcgaggaatgcatcttccgggacgttggaaacacagacatgaagtataagaaccgtgtacggagtcgtatctccaacctgaaggatgccaagaaccctgacctgcggcggaatgtgctgtgtggggccataacaccccagcagatcgctgtgatgacctcagaggagatggccagtgatgagctgaaggagatccgtaaggccatgaccaaggaggccatccgagagcaccagatggcccgcactggcggcacgcagacagacctgttcacctgcggcaagtgcaggaaaaagaactgcacctacacacaggtgcagacccgcagctctgatgagcccatgaccacctttgttgtctgcaacgagtgtggaaaccgctggaagttctgctgacccctcgtgtagatgtgctgcagccttgggccctccccggcccacgtcctccgttgacacagcttctctggagaccctagaaggcggcatgtcctgccctcaacctgcctgcctggattgcacctttctgccctttccccctcattattaaatgtttctttttgccaaaaaaaacaaaaaaaaaaaaaaaaaa

SEQ ID NO: 215 - DNA, 2423 bp, Homo sapiens
gcaatttccgcttccggtccgtcgcctccttctgttgcttcccgtctcctcggcggctcccctcccccgcccggctctccgcgccccttctgggcggcggggcggcggagccgtcggcgtgcggccctccttgcgttcgtgcgtgcgcccgtggcccggcgcacgtcccgcgacaccgaggccgagcggggcagggggctgaccgccatgaccccccagagcccggcgtgagggggccgagatgcggtgacctgccagcacctgccgcagccttcgtccgggagtcgccccatctctccacgcatcggggccctgtgccccttgctgctgcagccgggcaccatgtcgacctcgtccttgaggcgccagatgaagaacatcgtccacaactactcagaggcggagatcaaggttcgagaggccacgagcaatgacccctggggcccatccagctccctcatgtcagagattgccgacctcacctacaacgttgtcgccttctcggagatcatgagcatgatctggaagcggctcaatgaccatggcaagaactggcgtcacgtttacaaggccatgacgctgatggagtacctcatcaagaccggctcggagcgcgtgtcgcagcagtgcaaggagaacatgtacgccgtgcagacgctgaaggacttccagtacgtggaccgcgacggcaaggaccagggcgtgaacgtgcgtgagaaagctaagcagctggtggccctgctgcgcgacgaggaccggctgcgggaagagcgggcgcacgcgctcaagaccaaggaaaagctggcacagaccgccacggcctcatcagcagctgtgggctcaggcccccctcccgaggcggagcaggcgtggccgcagagcagcggggaggaggagctgcagctccagctggccctggccatgagcaaggaggaggccgaccaggaggagcggatccgtcgcggggatgacctgcggctgcagatggcaatcgaggagagcaagagggagactgggggcaaggaggagtcgtccctcatggaccttgctgacgtcttcacggccccagctcctgccccgaccacagacccctgggggggcccagcacccatggctgctgccgtccccacggctgcccccacctcggacccctggggcggcccccctgtccctccagctgctgatccctggggaggtccagcccccacgccggcctctggggacccctggaggcctgctgcccctgcaggaccctcagttgacccttggggtgggaccccagcccctgcagctggggaggggcccacgcctgatccatggggaagttccgatggtggggtcccggtcagtgggccctcagcctccgatccctggacaccggccccggccttctcagatccctggggagggtcacctgccaagcccagcaccaatggcacaacagccgggggattcgacacggagcccgacgagttctctgactttgaccgactccgcacggcactgccgacctccgggagcagcgcaggagagctggagctgctggcaggagaggtgccggcccgaagccctggggcgtttgacatgagtggggtcaggggatctctggctgaggctgtgggcagccccccacctgcagccacaccaactcccacgccccccacccggaagacgccggagtcattcctggggcccaatgcagccctcgtcgacctggactcgctggtgagccggccgggccccacgccgcctggagccaaggcctccaaccccttcctgccaggcggaggcccagccactggcccttccgtcaccaaccccttccagcccgcgcctcccgcgacgctcaccctgaaccagctccgtctcagtcctgtgcctcccgtccctggagcgccacccacgtacatctctccccttggcgggggccctggcctgccccccatgatgcccccgggccccccggcccccaacactaatcccttcctcctataatccagggcggaagggggcctggctccatccggctgccccattccggctccctgggagatcagtgttgtgagtgcatgtgaaatgggggatccccacccccagtgcccttccccttcctggggcccactcacactacaccctcttcctttcccaccccacctccccggagagaaactggacatggggcctggggaggggagctggccagaggaggacccctttcccgtggcattagaagggggaggggtggctggggcccccacccattccccctccctccaaactcccaacccccagtcagtgtttgagcctcctcgttcccctcacgcacccgctcacgcaccctcggtgaatccttggtgatgattttggcaactttgggaataaatggcaattcccacgggcttggcaaaaaaaaaaaaaaaaaa

SEQ ID NO: 216 - DNA, 9351 bp, Homo sapiens
aaccgtccccaacggtcgccagcgcgcggctcccgggccccctcgctcctcccctctggcccctccgagcgctgggggtgcttccctccccgcctcctcgcactcccactcgcgggcacgccggtggctgtgccgccatgccccaccacaggctgctcacgggcctaggcgcggcggcccgagataggggcccctgagcctcccgggggaggagagaggcagcgagccgcgctccgccccctccccccgggccgccgccgccgccgcctcgccgccccagcctggcgggagaaggaggaggagcagcaggcctccgggcccggcgccgccgcccgcaggacatttctgatttatttgcatccttgaagagcatctgtagaagaggaagtaaaagatgggtgtgaaaacatttactcatagctcctcttcccacagccaggaaatgcttggaaagctaaatatgctgcgaaatgatggacatttttgtgatatcactattcgtgtccaggacaaaatcttccgggcacataaggtggtactagcagcttgcagtgatttctttcgcaccaaacttgtaggccaagccgaggatgagaacaagaatgtgttggatctgcatcatgttacagtgactggctttatacctcttttagaatatgcttacacagccactctatcaattaacacagaaaatattattgatgttctagcagcagccagctatatgcaaatgttcagtgttgccagcacctgctcagagttcatgaaatcaagcattttatggaatacacccaacagccaacctgaaaagggtctagatgctggacaagaaaataattctaactgcaattttacttctcgagatgggagcatttctcccgtgtcctcagagtgcagtgtggtagaaagaaccattcctgtctgccgagaatcccggagaaagcgcaaaagctacattgttatgtctcctgaaagtcctgtaaagtgtggcacacaaacaagctcaccccaggtattgaattcttcagcttcctactcagaaaatagaaaccaaccagttgactcttccttagcttttccttggacttttccttttggaattgatcgaaggattcagcctgagaaagttaagcaagcagaaaatacccggactttagaattacctggcccatctgagaccggtagaagaatggctgattatgtgacttgtgagagcacaaaaactaccttgcctttaggtaccgaagaagatgtccgggtcaaagtagaaagattaagtgatgaggaggtccatgaggaagtgtcccagcctgtcagtgcatctcagagttcgctgagtgatcagcagacagttccaggaagtgaacaagtccaagaggaccttctgattagtccacagtcttcctctataggctcagtagatgaaggcgtttctgagggcttgcctacacttcaaagcacgtctagcactaatgctcctccggatgatgatgatcgattggaaaatgttcagtatccctaccaactctacattgctccttccaccagcagtacagagcgaccaagtccaaatggtcccgacagaccttttcagtgtccaacctgcggggtgcgattcacccgtattcagaacctaaagcagcacatgctcatccactcaggaattaaaccatttcagtgtgaccgctgtgggaaaaagttcaccagggcttactcgctaaagatgcatcgcctaaagcatgaagtgatttcctagtaccggactacttaaaccaggaacaagaagagacccttgttcaatatgatcttggagaacacggttttgaaagcaactcctctgttcaaatgcctgtcatttcacaggtctcctcaacccagaattgtgaaagcacttttcccttggggtctcttggtgggctggcagaaaaagaggaagaagtgccagagcagccaaagagcagtgcttgtgctgaggcaaccagagatgaccccccaaaatcagagctgtcttctataactattgagtagttttgtgatttggcttcagttttgttttttggaaagtgcctgtgcttggtcttgtacatttaaatttaatttaattttttaaacaaaaaaagccgggtgggagggagggggagattgggaaagaatttccctttttactttctgagccctgaaactgattttatttttcctaactgagagattgcttctgtaagtacacaataacatgatgttgaaacagaaactatgagacttaaggagaactggttgacttaaaacatataccagttccttcttccattgttaaaagtaggctaacaacagatcattagctagagaggaaatcagatgattattgaccttcttgagacaagagggtacatgagaaactaattactaaacagcttgacaaatggcctgagtagatacttactgctgtacacaggatgttgtataatattttgtaaagcctgttgtttttggaagtatttatggtaagctttcttaaaaattattatggtaaatacttctgaaatccggcgtacttttctttaagctttgtcatttctgttatgatttttcatggtgaaattttggtactgagatgggcattctctgtacctttatagtaccactccaaaggcaaggaaccatgattgacaacagtcaagctgtggatgaaatgaccaggaacggagaatgaagtatgtaaatcccagcttcataggaactcttctcatactgcttttcagattaaaattgctgtttacctggtctccgaatgtaatgcctgactgtgtcattgcccggatcagttttccccctgccccatcaatatgttctcttgcatatattggcgtgctgccatataaagtaaaaatactggagatattctatattttatatataggtttatgtgttgttggggatgttttcattgtgctcttttggacataataaataattctctattgaggctacattctttttttttttctttttttttaaaagaatggcatctcactctgttgcccaggctggagtatagtggctaagtcatagctcactgcagcttcgaactcctgggctcaggccattctcctgcctcagcctcttgagtatctaggattataggcatgctccaccacacctggttaacttcatttttattttttgtagagatgaggtctcactatggtgcccaggctggtcttgaactcctagaccaagtgatcctcctcctttggcctcccagactgctgggatcactgcaccggccaaggctgcattcttaacccaactagattgtttactgaatcccatatgacagcgatacattgtccttacatatttatttttagacattgcaaagttattaaaaacagttaactatagtttttacacaacgtaggcaacaatgaagagtatagactgtaagattttcatctatgactcataaatctgggagaaaaaaattattaagactaatgagaaactgaaaaccttaaactaatgaatattatttctgctgctaaaaatatgaaactttctggtctgtagttgaaatttgtatgatcctctagacttgggtatacttttcatctggtgccattaaagcatctctaatattgatcctaaatatttgtaagtccatgagcagtgaactttggaataagtttctgtgtagatacccaaagtttaataattatgagagcacctgatttgatagacagaaaatacagttctttagtcaaaacacaagatctgaattttgttcaggtgctagaccatactaaatgtatatatttttaattatagtgatttgtttcatttttttagattggctaattctgtaattttttccccaaaaacatgtgaagaaaggaaaagtaaattaaattccttagaactgttttaggttaagattctctgtgtctgcccatattctgcagtccttaacttgttttcaactctttacctcactcatgaacttgtttttacccatttgctgccaaacataggtgtgttcccttcaggagaatcagcatatacaggttatgataggctcccaccatttatgcttcttcactgatagggttgcattactttctgcagcagactataatacttcatatagtactgctgtgtctcaactggaaaggtcaggaattttaatgttacgttgtggtctttgaaaactgttaggcctagcaatagataaatctcaaaattaattttaaaatctgtattgacaagaataggtaaaattatgaccaggaatcattgttacccttagttccaagaggtggtttttgaaagagcaagaggaaagaaaaaagaaaagaaggaaagaagaataaagaagagaaacgtgtaagaatggtttgcagattgattggttaaaagtgtttttagcacatccccaaccctgaaaacttcgcattaagagccaagcacaatgttggtagctccaagatattctgactgtgttctcagaatgagggattacccatcactgggtattccttcccaagtagaaactttagattttcactggtaatacacattgccaagttttatgggaaatctgaatatactgtgaaaatgcatatctggttagttgtctgctgcccagatcttatcaataccagtaactaaccagtatttaacataaaatgatacaaataaaggcctttttctatttcagtgagggtacatttttcttgatatatatgtactttaaggatattggatctgtttatggatctgttttaggaaacagatttgcaagggataattgtatatatagtagtatttaggtttatttcaaattcatcttagggatgcctagatgcataatttttaccaggacatattgaaaatattgcaaagagatagccagttatattatcccattcattagaaattaccagtgtaactaaacataaatattccagtttagagtgcttaaacgtagctatctttcttaaggccaggagggtaactttgtggtatctaaagggcttaaatttcagaatgcagaataaattgcctttttaaaaccaagcattttgtacaagcttttattttcagttttttaactaccaaataggtgtgatgtactttagaagtaaacaaagatgttcacccatgataatggatgttaaagctcctgcagttgttcttttcgtgtttaaagggtatattctaatagtggaagcatcaaacatgtcagtgatttcatctcattcagaaataaagagattaatattggtctttattttttggcattttaagttttatataaatggatgcagatggagattatcacccacaaatatatttaaatggatttttcttaatttgaatttcaagtaatctttttatttcaagtaattagttacgcatttagttacattgccagttttttttttttatcaatttcagtaagacaaaatatactaaaatgtttaaatagcctcattcaatcttacattttgacatttcagcaatcattctggcttacagtaattagatcccctgttacgacacatgccctttgttcttaataactagcaaaaaaaaaaaaaaaaaaaaactttcatcttgttaaaatactttgccaaatgaaatagactagtcaatacatctgatgtccataattattggtaactcagttaccttctaactaataggctggttcaggagactctcccagtttataaatggttctcttgggagcctttggaagctgtattaaatctttcagtcttttatttctaattttttctcttaatctaaatagaggccagttatctattttatcagcttttattcttgaagattctcagattatgttttagtcccttttagctttaatagtccttgaaaaatacattactgtataatgtggcaattctgtaacagagacttattacttgaatgaataatcctaaaattttaatattttagctgaagtttgagatttgtggaatgaacaaaagaattagaaactttcatatgttactttgtttcagtcatctgcaaagtatgaagctgtaattctgaaatacacatccaagtgaatgagaattaaaaattttctaaatattaatactaactgggaaaaaaaaactagtgtgaagtttacagttagaagaaacagacccaaagttgccagaaggtaataaataaatgtagttttcactgtaagtaagttattgacgtaagatgctttatttgtaatatatttagattttgaaagttattgagagatgaatgtataaaagctaaattttcttttctgaagcagtgaaacaaaattggggtaacaaggaagctctgttgtggcaaacatgtctatgaggaatattaaaactaagcatactcccacaggctttaaactcaaactatgaacatttaaattaagttgttccttattttgcctatacccatttttatctttcattgtcgtttttgcttgacagtatggtgacagagtatttttatttggaaagtcctcagcaagatgaattagccaaaagcaataatggttcagattaaacaataaagtggaattgattcaatcccaggctcaactaagaacagtcgctctctggatgtttcattttagacgatagataagttgagatgttgtaatatttatggggggttaagcctgtgtcagttatgggatgaagacttgtagtaccagtaccatcagtggtcatacttttttttaactttttactaaactaatacagttagacatttccactctatcgtgattatatttttatgatgggaaaataaaaacacttccatgtttttataaatagtctctgcaaagatttcagatgttattggtatctcggtttggcagtatctgaaaaattgagattgtctttgaaatgtttgtgctacttttacttaagtaaacccccactgtgcaagacccaggccggcttcagctaataccaaggtttctgtgtgcataatagtttacagagaacttaagagtaaggactgcggattaaaaacaaaactttttttaactttaaaatttttagtttttgttcaaagtacctggtttataaagtcaaattcttttattagttcctttctcgtttaaattgactgatgttgctgatgaagcttaaagtcccaggcacggttgtggcgatatactgataaaattggtgcctagtggtgggaggagctccagtgtcaggacttttattaaaaggcccttgttttcccaaatgccaatctagccacatttagatttcattattcaataaaacagatgaaaaatcatcccataaatgaatgttgaggttaccaaagtacatcacctgctgaggaaggataaatcttcctgctttaagggagccctgtcatctctcctcttaatgcacgtttcccttggtattagtggaagctgtgttcaagatgggaagcctttcctgcagttcttagaaacacctgctttctaaggagagccttttctaggattagcttatgtgtgttttctctaggcgattttttatttcagttaccaatttaattttcaagttgacagatgctgtgtaaagtctctcataatgagagtagtccattaaattgttgaaagttgcactgcttttcatctttcaggtacctgaaatgagtgacatcaggtatttggaaggagtaagatcataaactgtattcattttcttccttgtacaaagtgatgacttctaatgcttatatctcaaggtattttttaaaaaagcaacggtccctaatagagtaaaatttggttttggtccaagttcccaataatgtatttaatgtttctgttgtttactggtgcctcccgttgcatcaggtagagattgcctgcctctttgtagggcagccttgtggcaccttatgtccaacttggaggatagtatatggcttctttgtgcctctactatcttttcaaaagccattttataaaaatcctaggtagcctattttaatatttaaatatatatatttgtgaaagaacttttagaacagaccttttctttttactttaaaattcctgtatttccatttttaagagtaaatttaatctccaggatttagaagtgtctttccagagaagcataatgagaaagtcagactgaggtaataagaccagaattaagtgatagaagaaactgttgtttggttaaaggacacagatttgaaggaaaaaaattttgatgtaacaattttttaaataaaattttgtttttctgtaatgtcatatttgctgctacagtagctcaatattttacagggctaacataaagctggctccatttaaaaactggagtacttcctagtgcagccagcctaggcggaaactgtacaccatggtcttccagatgggtgactgatggctttgggtagctgatgcatgctttaatatttgcctatagcccggcagcaaggaagtcggggcggggggacttttttaccctgccagttatagcattgtgattctttctgggcactggcattttgtgaaactctcaagggaaggtgatgcaggggagaaaatgtgaattaaattacatagatgggtgtttttatgtcttctacccctttcctagaattagtacaactcttaactgtgccagtccccagttcaccagctttgtatccagtcgtcatctcattcaagtatggctttacttggtgacactggccatagctaagttaacttggcatgtttgacttttgacaataacaaaaatggttttggattttgttttatttccaaaaaatgtatacaatatcagaacttcacattttatatactagtatctggctattagtattttacaggaaccatagttcttggtgactacatatatatatatatttttgtgaccttttttgtaaactaagtgccgtttcaacgttacaatcatttttagggttattgtaatcaatgtgaatatcatgttttttcaaatctgttctgagcctatagtgtttgctttgtgaacatgtgtattgtatatattctgtatagttatattgtactgaaattagcttgtttgatataaggaaaatatgtattgagtacctttttgctagcctgattgtttaatctttttaaaaaaggtttaaactttttttaaaaaaaaaatctttaaactggcctttattacatggtcacacataaagttgcagttaggaaagggatgggcagggaaaaactagttttgagtgtctttagatagaaacatgagactaaggtttgattttgttttcgttttctcattaaaatatcttatgctttatggaataaaaaaaaaaaaa

SEQ ID NO: 217 - DNA, 2156 bp, Homo sapiens
gcgcatgcgtggattgtcgtcttctgtccaagttggtcgcttccctgcgccaaagtgagcagtagccaacatgtcagggtgggagtcatattacaaaaccgagggcgatgaagaagcagaggaagaacaagaagagaaccttgaagcaagtggagactataaatattcaggaagagatagtttgatttttttggttgatgcctccaaggctatgtttgaatctcagagtgaagatgagttgacaccttttgacatgagcatccagtgtatccaaagtgtgtacatcagtaagatcataagcagtgatcgagatctcttggctgtggtgttctatggtaccgagaaagacaaaaattcagtgaattttaaaaatatttacgtcttacaggagctggataatccaggtgcaaaacgaattctagagcttgaccagtttaaggggcagcagggacaaaaacgtttccaagacatgatgggccacggatctgactactcactcagtgaagtgctgtgggtctgtgccaacctctttagtgatgtccaattcaagatgagtcataagaggatcatgctgttcaccaatgaagacaacccccatggcaatgacagtgccaaagccagccgggccaggaccaaagccggtgatctccgagatacaggcatcttccttgacttgatgcacctgaagaaacctgggggctttgacatatccttgttctacagagatatcatcagcatagcagaggatgaggacctcagggttcactttgaggaatccagcaagctagaagacctgttgcggaaggttcgcgccaaggagaccaggaagcgagcactcagcaggttaaagctgaagctcaacaaagatatagtgatctctgtgggcatttataatctggtccagaaggctctcaagcctcctccaataaagctctatcgggaaacaaatgaaccagtgaaaaccaagacccggacctttaatacaagtacaggcggtttgcttctgcctagcgataccaagaggtctcagatctatgggagtcgtcagattatactggagaaagaggaaacagaagagctaaaacggtttgatgatccaggtttgatgctcatgggtttcaagccgttggtactgctgaagaaacaccattacctgaggccctccctgttcgtgtacccagaggagtcgctggtgattgggagctcaaccctgttcagtgctctgctcatcaagtgtctggagaaggaggttgcagcattgtgcagatacacaccccgcaggaacatccctccttattttgtggctttggtgccacaggaagaagagttggatgaccagaaaattcaggtgactcctccaggcttccagctggtctttttaccctttgctgatgataaaaggaagatgccctttactgaaaaaatcatggcaactccagagcaggtgggcaagatgaaggctatcgttgagaagcttcgcttcacatacagaagtgacagctttgagaaccccgtgctgcagcagcacttcaggaacctggaggccttggccttggatttgatggagccggaacaagcagtggacctgacattgcccaaggttgaagcaatgaataaaagactgggctccttggtggatgagtttaaggagcttgtttacccaccagattacaatcctgaagggaaagttaccaagagaaaacacgataatgaaggttctggaagcaaaaggcccaaggtggagtattcagaagaggagctgaagacccacatcagcaagggtacgctgggcaagttcactgtgcccatgctgaaagaggcctgccgggcttacgggctgaagagtgggctgaagaagcaggagctgctggaagccctcaccaagcacttccaggactgaccagaggccgcgcgtccagctgcccttccgcagtgtggccaggctgcctggccttgtcctcagccagttaaaatgtgtttctcctgagctaggaagagtctacccgacataagtcgagggactttatgtttttgaggctttctgttgccatggtgatggtgtagccctcccactttgctgttccttactttactgcctgaataaagagccctaagtttgtactatatactgttaaaaaaaaaaaaaaaaaaaaaaa

SEQ ID NO: 218 - DNA, 2415 bp, Homo sapiens
gcaagcctgggccgctcctccttccctcaagcagcccgacggccatggaggctgaagagacgatggaatgccttcaggagttccctgaacatcataaaatgatcctcgaccgattgaatgaacagcgagagcaggaccggtttactgacatcaccctaattgtcgacggacaccattttaaggctcacaaggctgttttggctgcttgtagtaagttcttctacaaattctttcaggagtttacccaagaaccattggtggagatagaaggtgttagtaaaatggcctttcgccatttaattgagttcacatatacagcaaaattaatgatacaaggagaagaagaagccaatgatgtatggaaagcagcagagtttctacaaatgctagaagctatcaaagcccttgaagtcaggaacaaagaaaactcagctcccttagaggaaaataccacaggaaaaaatgaggccaaaaaaaggaagattgcagaaacttcaaatgttatcactgagtcattgccatctgcagaatcagaacctgttgaaattgaggtagagattgccgaaggcaccattgaagtggaagatgaaggcatcgaaacattagaggaagtggcttctgccaagcagtccgtaaagtacatacagagcacaggttcctctgatgattctgctctagcactgttggcagatattaccagcaagtaccgtcaaggtgacagaaaagggcagattaaagaagatggctgtccatctgaccccacgagcaaacaggagcacatgaaatcacactccactgagagtttcaagtgtgaaatatgcaataaacgatatcttcgagagagcgcatggaaacagcacctaaattgttaccaccttgaagaaggtggagtcagtaagaagcaaagaactgggaaaaaaattcatgtatgtcagtactgtgagaaacagtttgaccattttggacattttaaagaacatcttcgaaaacatacaggtgaaaaaccttttgaatgtccaaattgtcatgaacgatttgctagaaatagcactctgaaatgtcacctcactgcatgccaaactggagtaggggcaaaaaaaggaaggaagaagctctacgaatgccaggtctgcaacagtgtgtttaacagctgggaccagttcaaagatcacttggtaatacacactggagataaacccaaccattgtactttatgtgatttgtggtttatgcaaggaaatgaattaaggaggcatctcagtgatgctcacaatatttcagagcgtctagtaacggaagaagttctttcagtagaaacacgtgtgcaaactgaacctgtaacatcaatgactattatagaacaagttgggaaggtgcatgtgctaccattgcttcaggttcaggtggattcagcacaagtgactgtggaacaagtccatccagatctgctccaggacagccaggtgcacgattcacacatgagtgagcttccagagcaggtccaagtgagttatctagaagtgggccgaattcagactgaagaaggtactgaagtacatgtagaggagctgcatgttgaacgggtcaatcaaatgccagtggaagtacaaactgaacttctagaagcagatttggaccacgtgaccccagaaatcatgaaccaagaggagagagagtctagccaagcagatgctgctgaggctgccagggaagatcacgaagatgctgaggatttagagaccaagccaacagtggattctgaagcagaaaaggcagagaatgaggacagaacagctctgccagttttagaatgaaattacacatgaatatatttttaaatttacttgttgggtttttgaactgattatgggcagtttgactgtccttaattaagcctaacagacaagtggaccaaagttaagctgtttcctgttgtgctgaactgttgtccgttgaaacacattgattcccctccccctacttattgccacagaggagggatcttttccataactgaaggggagttttgagaagtatatttctggaaacttaaatggattatattcttattatatagttgggtacgaatgtatctattttcattgtggtaaaagttcttccttttctctttcccaggtcatgttcttcctcaaattttttccatattgtaaaatcaaacttaaatcattagaatacaagtttatgtattctaatgcatgttagaaaattgaataatataggaaacacaaggctgcatgatgaaaagtgcattgttactgtgcagttaaattttggcttctggctttctttagtttgaacaaacgttcttgtctaccccagtagtcacagatgccatctttgcaacagaaagagtggtggtggcaaaatttctagaatgttaaaaaaaaaaaaaaa

SEQ ID NO: 219 - DNA, 437 bp, Homo sapiens
cctttcctcagctgccgccaaggtgctcggtccttccgaggaagctaaggctgcgttggggtgaggccctcacttcatccggcgactagcaccgcgtccggcagcgccagccctacactcgcccgcgccatggcctctgtctccgagctcgcctgcatctactcggccctcattctgcacgacgatgaggtgacagtcacggccctggccaacgtcaacattgggagcctcatctgcaatgtaggggccggtggacctgctccagcagctggtgctgcaccagcaggaggtcctgccccctccactgctgctgctccagctgaggagaagaaagtggaagcaaagaaagaagaatccgaggagtctgatgatgacatgggctttggtctttttgactaaacctcttttataacatgttcaataaaaagctgaacttt

SEQ ID NO: 220 - DNA, 739 bp, Homo sapiens
cgtggcgcagcgactcggaggttcgcctccagcttgcgcatcatctgcggccgggtcccgatgagcctcctgttgcctccgctggcgctgctgctgcttctcgcggcgcttgtggccccagccacagccgccactgcctaccggccggactggaaccgtctgagcggcctaacccgcgcccgggtagagacctgcgggggatgacagctgaaccgcctaaaggaggtgaaggctttcgtcacgcaggacattccattctatcacaacctggtgatgaaacacctccctggggccgaccctgagctcgtgctgctgggccgccgctacgaggaactagagcgcatcccactcagtgaaatgacccgcgaagagatcaatgcgctagtgcaggagctcggcttctaccgcaaggcggcgcccgacgcgcaggtgccccccgagtacgtgtgggcgcccgcgaagcccccagaggaaacttcggaccacgctgacctgtaggtccgggggcgcggcggagctgggacctacctgcctgagtcctggagacagaatgaagcgctcagcatcccgggaatacttctcttgctgagagccgatgcccgtccccgggccagcagggatggggttggggaggttctcccaaccccactttcttccttccccagctccactaaattccctcctgccttaaaaaaaaaaaaaaaaaaaaaaaaaaaaaaaaaaaaaaaaaaaaaaaaaa

SEQ ID NO: 221 - DNA, 651 bp, Homo sapiens
gacggaaggagcggcggcgacggaggaggaggatggaggcggtggtgttcgtcttctctctcctcgattgttgcgcgctcatcttcctctcggtctacttcataattacattgtctgatttagaatgtgattacattaatgctagatcatgttgctcaaaattaaacaagtgggtaattccagaattgattggccataccattgtcactgtattactgctcatgtcattgcactggttcatcttccttctcaacttacctgttgccacttggaatatatatcgatacattatggtgccgagtggtaacatgggagtgtttgatccaacagaaatacacaatcgagggcagctgaagtcacacatgaaagaagccatgatcaagcttggtttccacttgctctgcttcttcatgtatctttatagtatgatcttagctttgataaatgactgaagctggagaagccgtggttgaagtcagcctacactacagtgcacagttgaggagccagagacttcttaaatcatccttagaaccgtgaccatagcagtatatattttcctcttggaacaaaaaactatttttgctgtatttttaccatataaagtatttaaaaaacaggaaaaaaaaaaaaaaaaaaaaaaaaaaaaaa

SEQ ID NO: 222 - DNA, 1587 bp, Homo sapiens
gggcagaggactgctgtttgctgacacaatcttggtgcgttggaagtgaaagggaagaggcactggtggctgtgctttgggcccgagcagccagaagccagttgccatcacctatgacgaggagacagcgcctggggcagagcccagtatggggcctagccagggctgggttctcacccacctgtgccgccctgccttgttacctggaagcacagccttggggactgagcaggccctcactgtcactttaagaagggaatcagccactttgtgctcaccacctctggggaaggtgtgagaggagagaaggaagtggctgtttggctgctgacaacatgaagacttcctgcgatgagaacagaggcacaggtgccggccctgcagcccccagaacctggactggagggggccatggggcaccggaccctggtcctgccctgggtgctgctgaccttgtgtgtcactgcggggaccccggaggtgtgggttcaagttcggatggaggccaccgagctctcgtccttcaccatccgttgtgggttcctggggtctggctccatctccctggtgactgtgagctgggggggccccaacggtgctggggggaccacgctggctgtgttgcacccagaacgtggcatccggcaatgggcccctgctcgccaggcccgctgggaaacccagagcagcatctctctcatcctggaaggctctggggccagcagcccctgcgccaacaccaccttctgctgcaagtttgcgtccttccctgagggctcctgggaggcctgtgggagcctcccgcccagctcagacccagggctctctgccccgccgactcctgcccccattctgcgggcagacctggccgggatcttgggggtctcaggagtcctcctctttggctgtgtctacctccttcatctgctgcgccgacataagcaccgccctgcccctaggctccagccgtcccgcaccagcccccaggcaccgagagcacgagcatgggcaccaagccaggcctcccaggctgctcttcacgtcccttatgccactatcaacaccagctgccgcccagctactttggacacagctcacccccatggggggccgtcctggtgggcgtcactccccacccacgctgcacaccggccccagggccctgccgcctgggcctccacacccatccctgcacgtggcagctttgtctctgttgagaatggactctacgctcaggcaggggagaggcctcctcacactggtcccggcctcactcttttccctgaccctcgggggcccagggccatggaaggacccttaggagttcgatgagagagaccatgaggccactgggctttccccctcccaggcctcctgggtgtcacccccttactttaattcttgggcctccaataagtgtcccataggtgtctggccaggcccacctgctgcggatgtggtctctgtgtgtgcgtgtgtgggcacaggtgtgagtgtgtgagtgacagttaccccatttcagtcatttcctgctgcaactaagtcagcaacacagtttctctgatgtcgaaaaaaaaaaaaaaaaaa

SEQ ID NO: 223 - DNA, 842 bp, Homo sapiens
ctggggcccgctgtcggtctcccgtcctccgacatcttgtctggaacttccgcctggcagtctccagtaggagtggagctctgtgcggcgtagtttggtggaaaaacgggccttgcgtcggcctcacccccagtgtttgtgtttcagaatgaagactattctcagcaatcagactgtcgacattccagaaaatgtcgacattactctgaagggacgcacagttatcgtgaagggccccagaggaaccctgcggagggacttcaatcacatcaatgtagaactcagccttcttggaaagaaaaaaaagaggctccgggttgacaaatggtggggtaacagaaaggaactggctaccgttcggactatttgtagtcatgtacagaacatgatcaagggtgttacactgggcttccgttacaagatgaggtctgtgtatgctcacttccccatcaacgttgttatccaggagaatgggtctcttgttgaaatccgaaatttcttgggtgaaaaatatatccgcagggttcggatgagaccaggtgttgcttgttcagtatctcaagcccagaaagatgaattaatccttgaaggaaatgacattgagcttgtttcaaattcagcggctttgattcagcaagccacaacagttaaaaacaaggatatcaggaaatttttggatggtatctatgtctctgaaaaaggaactgttcagcaggctgatgaataagatctaagagttacctggctacagaaagaagatgccagatgacacttaagacctacttgtgatatttaaatgatgcaataaaagacctattgatttggaccttcttcttaaaaaa

SEQ ID NO: 224 - DNA, 7085 bp, Homo sapiens
ctcgcctgctcgcaagatggcggacgaggacggggaagggattcatccctcagcccctcacaggaacggaggtggcggcggcggcggggggtctgggctccactgcgccgggaacggcggcgggggaggcggcggcccgcgggtcgtgcgcatcgtcaagtccgagtccggctacggcttcaacgtgcggggccaagtgagcgagggcgggcaactgcggagcatcaacggggagctgtacgcgccgctgcagcatgtgagcgccgtgctgcccgggggggcggccgatcgggccggggtgcgcaagggggaccgcatcctggaggtgaaccacgtgaatgttgagggggcgacacacaagcaggtggtggacctgattcgagcaggcgagaaggaattgatcttgacagtgttatctgtacctcctcatgaggcagataacctagatcccagtgacgactcgttgggacaatcattttatgattacacagaaaagcaagcagtgcccatatcggtccccagatacaaacatgtggagcagaatggtgagaagtttgtggtatataatgtttacatggcagggaggcagctgtgttctaagcggtaccgggagtttgctatcctacaccagaacctgaagagagagtttgccaactttacatttcctcgactcccagggaagtggccattttcattatcagaacaacaattagatgcccgacgtcggggattggaagaatatctagaaaaagtgtgttcaatacgagtaattggtgagagtgacatcatgcaggaattcctatcagaatccgatgagaactacaatggtgtgtccgacgtagagctgagagtagcattaccagatggaacaacggttacagtcagggttaaaaagaacagtactacagaccaagtatatcaggctatcgcagcaaaggttggcatggacagtacgacagtgaattactttgccttatttgaagtgatcagtcactcctttgtacgtaaattggcacctaatgagtttcctcacaaactctacattcagaattatacatcagctgtgccaggcacctgcttgaccattcgaaagtggctttttacaacagaagaagaaattctcttaaatgacaatgaccttgctgttacctacttctttcatcaggcagtcgatgatgtgaagaaaggttacatcaaagcagaagaaaagtcctatcaattacagaagctatacgaacaaagaaaaatggtcatgtacctcaacatgctaaggacttgtgagggctacaatgaaatcatctttccccactgtgcctgtgactccaggaggaaggggcacgttatcacagccatcagcatcacgcactttaaactgcatgcctgcactgaagaaggacagctggagaaccaggtaattgcatttgaatgggatgagatgcagcgatgggacacagatgaagaagggatggccttctgtttcgaatatgcacgaggagagaagaagccccgatgggttaaaatcttcacgccatatttcaattacatgcatgagtgcttcgagagggtgttctgcgagctcaagtggagaaaagaggaatattagttagagactgattatctcatgtgagccaggacattcttccagcaaggttggcctctggatggtgaacgggctgtgcaaaaaagccctgcttcttcccttgtctagagggtggacattggctacaggctcttccatctctcatgacttcatggaccctcctctgccagttttttaaatcagatcaccctccatgttgttcctgacccacaggggaagctgtcctcagttgtagccgtcttgactggatgagtcctggcagtctttctaggcgaaccaagaatgtttgtgtgagggaaggtgtttgctgttgctttactgctgtctgtatgtgccagtgctggaacagaatttggaagattctgaataattagttacttattctcaaagaaaatctttgaaagaatcaggaggtcaagtcaagaacatgaaaatttatattttagtacagtagaaagaacattgggctctgggaattttatctgggttttctcctggcttttttttccctctgtgtaattttgggtaaatcagcctccctagctttcagttttctcttctgtgaaacaggaagactgaaccacgtaattaatatccaaggtcccttccggctctaaaaggctatgattctagatgagaagttatatcaagaaagatgtggccaatcagattgagtcatccaggcatacctttttagcttctgtttgtggagttgtctccagataagaggagatgtgccttcccaataactctttttttttttcctttcagaacattttccagatggcgaggtcacagcagagagatgtggccacctagcctttccttatccccttcccttcccttcacccccatcctcttactcctttcatgtcccatttcagacagagtaaccattaacaaaaaagaagagaaaaagttaaagtcgttatattcaaaagccctaaactaaatattattaataaccccctctgaatttcatgtctctggaattgaggtggtagtgaacagcagatcggtcagcaccagaagtcaactgagttaaggcaggaaaagaaataagcccaaccaacttgccaaaggtatctttgtcctttcacctgggcctcataccaacagcctctccttgtactatatttttaaaactggaactatgaacttcatccatttgcactgttcagacatatatatgtatgtatgtaaaaattatatatacacaaattagctgcacgtatatacatatatatatttctttttaaatttcatattgatggcagtaccttttttagcttgtgtttttacacacctttcactagaatccatgacctccctcgtgctctctttcttttgaaacaaactttaaaaaggaaaaaaaagcattttacagggaaaaatacctctcctcatgaaggacttgaaaagtttacaacctgcttggatttttgcccctttttttgtattgagtatagattccggctcatgggttgccatagagtctaggaacaaggagtatagtttctttatcttccaagagggtgctggggaggagaaagaggtgtgtttctcaaggttaacaggctgtagttctgcagggagagcctgaagtcctggtatgggctcttgattctgtgacaatttttttgatccatctatttctctcactcctggctttctagccacattctgcacctccttcctgctttcctagagcctcggtatgctttccctcaaccgaccctggctcaggaggttgatgccatgggaacctgaacctgaaacacttcatggtagtaatttcctgttttccttgccttttttttttttttttttttttttttctgagacagggtcttactctgtcgcccagactggaatgtggtggcatgaacatagctcactgttaccttgaattctgggctcaggtgatccttccgcctcaccctcctgagtagctgggactacaggtgtgcaccaccacacctggctaattcttcttaaaatttttttgtagagacagggtctcactatgttgcccaggctggtctcaaactcctggcctcaggtgatcctcttgtctcagcctcccaaagtgctgggattacaggcatgagccactgtgtccttccctgccttttttgcagcagggatagtactcaggaccagagttaagctgataccttaggcacacaggttggacttacatagaggaaagaaagcaagaaatgccctatgtacatgaggttttacctcctccattcctgaccaataaccacccataactacggcattctctgtgacttccttaaacagcagtgatgggaagggatccaatagtatcttcaaggccttggggaaacttgcagtgggtcagtggtctgtgccaaccaaacgatagccccatccaagccagctgagaacctaggaaggagtagtaggaatatggttgattagattggatctcccaagttttaattgaaaggagactgaacgaaaacctttctgctttctgtccgttaaagagctcctcatctgatcttgcagctagaccctttgagacttaagagctgcatcccaggatcagaagccagggctaattggggtaggacaatattcccagcccctaagctctgtagataatgcataagaagcaccaagtcaggctcagatgcaactaaaacacatctttgagccttttctttttcccttctcccctttctaaacaaaaaccttcctaggatggcatcttttgctctaactgggagacagtcataattggttgtagtcaattctactaagcagtgttggggtggttggaaagtctcttttttgtaatttgtttttgcaaatcattgtgaggccactttttctttctttctttctttctttctttctttctttctttctttcgttctttcgttctttcgttctttctttctttctttctttctctttctttcttttgctttccttctttcatctcttttttgtaatttgttgttgcaaatcattgtgaggccacttttctttccccttccttccttcctttttttctgttttttttttttttttttcccagagtcttgctctgtcgcccaggttggagtgcagtggcacgatctcggctcactgcaccctctgcctcttgggttcaagcgattctcctgcctcagcctcccaagtagctgggattacaggcatacaccaccacgccccactaattttttgtatttttggtagggcggggtttcaccatgatggccaggttggttttgaactcctgacctcaagtaatctgcccacctcggcctcccaaagtgctaggattacaggagtgagccactgcgcctggcccacttttctttctttccttcttattttgttatgctggcagccatttgcccctgcatggtatgggatcaaagaggacagcctttcctccctcaccttctccaaatctaggtgaaatcacagagtacaaaacgtgagaatgctgaatgtgtaaagttgcagagggatccctaatttgaagactttgacacagaactaacttcttttgacttaaatgaatttaaaatgagccaaaggaccctgaaaagaagacatgttgatttcccactcctagatgctaaagagacttggcaccagctttgttcaaactgtaaaaatagcaatttgcccctactcgctcagagtgggacagtagtgaacagagctgggattccatgcgacagcttgaatgctgaccttcagacatgagacatagggatttggaggccccttagaatgggtagatggtgttatgttccctttctggcatagcattcacttggtgctttggagattaggtgagggccctataggtagttggcctgttggcagaatttatttaggaacagcccttttgaaagtgtcccagtaacaacgcacccagctgcagcaaggaggtggggaaggagggcaccccaaaggacagcgccttcttctcttccacccatgcacggccttgggtgatggaggcgggttccctgtggctgcgtggatcccataggatcaagcccttctttgcatgaagcagtgttgtgactcttctctctccccttcctctgcacttcctttctgtaatccctactgttcttcttagtcccagcttctgcccagggaggcttctacccagacttcttttgcaatttgtccctgggaagagggggtctcccagtgcccccagcttcatcccagcagaaccagcaggatcctcctggtctctcactggccttcctccacacttggtttctatcctcaggggtagaagctcagagctttttatggcccaggagaaaatgtagaccctgagaaacctgtccctgcagaaaggttcccttgggccatgctttgggccctctgctctttatatgtttattctattctccatttttccaccccgtccttaccctaggcctaaacacaggtacagatatgtgcatgctcagggcagctcctaggcctggactgagctctcaggggggaattagataaatattccaacatcctcatgcctggcccatttagtttcatcctttagttacccaggccagtagctttgggttatcccttcctgtagctccaaacccagcacttggagcagcaaaatagggcactgacaggagatgaaactctctcctatctcagaatttgccaacttctgggctgggctcctaggaggtagttttcttgaaggggactgcatcctagttgacctgaattttccagaccaggagggactgctgtgctctcccttctcgccatcatactgtttggctagattcattcagcagtagaagctgtttgatctgttgaccccagcatactgctgtttcttcaccagcttcattgtgtcacagtagcttcctttgggaggatgatgtgatagaacactcagagagagggagggagaagagagatagtgggtatgcttctctagctccccatcttccaggtccacctcttgacttcctgttcccctaaacctgagcacatcacgccaggcctctttgctgccaggacagcatcagctcactcctcagcaataatctagggtatgtgggaaggtcagggctgtggtaaggaatagaatcaaagaggggagtgatacggggtgggggcacttggccgcctgctaaacttggacattaattttatatcatgacccccttttaagccagtgagctgggcttcagtttttcccaggccatgcacatttaatttatttcagagaaactctaattgtattttcactgcagtatcttgtattttttatttgtgatttaagaaatgtgaagagaaaatacacagacacaataatggctaacattgtttctttcattccttgttctagagctaaccactctaaaattgtttggtaatgtcacttagtgtaattaattgtaacatattcttttaaataaattgatttattgatcaaacactt

SEQ ID NO: 225 - DNA, 1589 bp, Homo sapiens
tttctggaaacgacggcggcccggcgggtccaaaccacctaccatccccgctcgcgtttccaggctccctacccccgccgccgccgcctcttcttccaccactgccaccgcctcctcttcatctgcggcccaccggcggcggccgccccgaagccccgccccctccatcgcctcctgcatcatcacttccggtaaccccgccggccgccagctccaggagggagaatgggagaggggcaaggagggaacgagtggaagattgcgtcacgacgcacataaagacgtacgaagccgtcgccaaatgacaacggcaacacgacaagaagtccttggcctctaccgcagcattttcaggcttgcgaggaaatggcaggcgacatcagggcagatggaagacaccatcaaagaaaaacagtacatactaaatgaagccagaacgctgttccggaaaaacaaaaatctcacggacacagacctaattaaacagtgtatagatgaatgcacagccaggattgaaattggactgcattacaagattccttacccaaggccaattcatctgcctccaatgggccttaccccactccgaggccggggacttcgaagccaagagaaactgaggaaactttccaaaccagtatatctcagatctcatgatgaagtttcctaatctagaggaaagtttatttctgcaaatgatgagccaactagttattgaatgtaaaccagatggcaaaacacttcttgattaggggcaaaaattcaaatgtcttcttaaaacctccacaattgattctccccctgtgatgtaaacttagatatccctagagtttctcagcatctttcttcctgagtggatggcattatccctagaggtcatggaccttacatcctcactgcagtcacctttggaaacaagaccgaggcctgtagaaggaaagcggaaggatgtaagagctgttcatgggaattccattcaccacacatgccagctgatgcaaagaaatttgccagtcactggaagttactgtggctactataaaactatgtaccactctcagaatattcttaggctttttttttttcaagttatagatttgcttaaagtgaggttttttggtgtgtgcttttttgttgtcttttgacccttccagtttccagacaaacttgtcttaaaaagtgcatcattggattgaccatggtttttcatgaaattttatgagatttctgccttaacaaaatgcatatattccttatcttaaagcctgtcattacttaggatgcacttataggatctgaaaagctcactttaaactcatactacattcgttacgagtattttacgttaacataattgaaaagtacaaggtccaagctggctttcaaattatgtctaaacagaaatgggacaaatagacttgaaaatagaagggatttattccacccctgcaagggtagagtcaggtgagagtcccttggtgagtcatttgtacatcagtgtcatttcttcttaacctctgaagaagatgggcatcagaaataaagacaaagcactatcaaaaaaaaaaaaaaaaaaaaaaaaaaaaaaa

SEQ ID NO: 226 - DNA, 3083 bp, Homo sapiens
atgttgtttttcctgtacctaagttcccgctgtaggtggtacctttgcagacggtgcgatgggggaagcagagaagtttcactacatctatagttgtgacctggatatcaacgtccagcttaagataggaagcttggaagggaagagagaacaaaagagttataaagctgtcctggaagacccaatgttgaagttctcaggactatatcaagagacatgctctgatctttatgttacttgtcaagtttttgcagaagggaagcctttggccttgccagtgagaacatcctacaaagcatttagtacaagatggaactggaatgaatggctgaaactaccagtaaaataccctgacctgcccaggaatgcccaagtggccctcaccatatgggatgtgtatggtcccggaaaagcagtgcctgtaggaggaacaacggtttcgctctttggaaaatacggcatgtttcgccaagggatgcatgacttgaaagtctggcctaatgtagaagcagatggatcagaacccacaaaaactcctggcagaacaagtagcactctctcagaagatcagatgagccgtcttgccaagctcaccaaagctcatcgacaaggacacatggtgaaagtagattggctggatagattgacatttagagaaatagaaatgataaatgagagtgaaaaacgaagttctaatttcatgtacctgatggttgaatttcgatgtgtcaagtgtgatgataaggaatatggtattgtttattatgaaaaggacggtgatgaatcatctccaattttaacaagttttgaattagtgaaagttcctgacccccagatgtctatggagaatttagttgagagcaaacaccacaagcttgcccggagtttaagaagtggaccttctgaccacgatctgaaacccaatgctgccacgagagatcagttaaatattattgtgagttatccaccaaccaagcaacttacatatgaagaacaagatcttgtttggaagtttagatattatcttacgaatcaagaaaaagccttgacaaaattcttgaaatgtgttaattgggatctacctcaagaggccaaacaggccttggaacttctgggaaaatggaagccgatggatgtagaggactccttggagctgttatcctctcattacaccaacccaactgtgaggcgttatgctgttgcccggttgcgacaggccgatgatgaggatttgttgatgtacctattacaattggtccaggctctcaaatatgaaaattttgatgatataaagaatggattggaacctaccaagaaggatagtcagagttcagtgtcagaaaatgtgtcaaattctggaataaattctgcagaaatagatagctcccaaattataaccagcccccttccttcagtctcttcacctcctcctgcatcaaaaacaaaagaagttccagatggcgaaaatctggaacaagatctctgtaccttcttgatatcgagagcctgcaaaaactcaacactggctaattatttatactggtatgtgatagtggaatgtgaagatcaagatactcagcagagagatccaaagacccatgagatgtacttgaacgtaatgagaagattcagccaagcattgttgaagggtgataagtctgtcagagttatgcgttctttgctggctgcacaacagacatttgtagatcggttggtgcatctaatgaaggcagtacaacgcgaaagtggaaatcgtaagaaaaagaatgagagactacaggcattgcttggagataatgaaaagatgaatttgtcagatgtggaacttatcccgttgcctttagaaccccaagtgaaaattagaggaataattccggaaacagctacactgtttaaaagtgcccttatgcctgcacagttgttttttaagacggaagatggaggcaaatatccagttatatttaagcatggagatgatttacgtcaagatcaacttattcttcaaatcatttcactcatggacaagctgttacggaaagaaaatctggacttgaaattgacaccttataaggtgttagccaccagtacaaaacatggcttcatgcagtttatccagtcagttcctgtggctgaagttcttgatacagagggaagcattcagaacttttttagaaaatatgcaccaagtgagaatgggccaaatgggattagtgctgaggtcatggacacttacgttaaaagctgtgctggatattgcgtgatcacctatatacttggagttggagacaggcacctggataaccttttgctaacaaaaacaggcaaactcttccacatagactttggatatattttgggtcgggatccaaagcctcttcctccaccaatgaagctgaataaagaaatggtagaaggaatggggggcacacagagtgagcagtaccaagagttccgtaaacagtgttacacggctttcctccacctgcgaaggtattctaatctgattttgaacttgttttccttgatggttgatgcaaacattccagatattgcacttgaaccagataaaactgtgaaaaaggttcaggataaattccgcttagacctgtcggatgaagaggctgtgcattacatgcagagtctgattgatgagagtgtccatgctctttttgctgcagtggtggaacagattcacaagtttgcccagtactggagaaaatgaaactgggattgacccatcaagatgcttggctcaataagaaaaccacgttaggagcaacctttgtatattggagacttcagagtaaccagcaaggaagagaaatcttaatcttcaagttaccatattttccaaatattacatggtacctgagttctgcttccttggatgtcattgcttaaatatagtcttgaagggcttgttttgaaatattgtatatattttttcaaatgtatacattgttaataaattaagaaatgagaaacattcttatttatgtacatgttatgagagttctggaggaagtaatatgttgaaatagtaaaacattttagtttttgagtttaaaaaaaaaaaaaaaaaa

SEQ ID NO: 227 - DNA, 930 bp, Homo sapiens
aagttctcgcgcgactcccacttccgcccttttggctctctgaccagcaccatggcggttggcaagaacaagcgccttacgaaaggcggcaaaaagggagccaagaagaaagtggttgatccattttctaagaaagattggtatgatgtgaaagcacctgctatgttcaatataagaaatattggaaagacgctcgtcaccaggacccaaggaaccaaaattgcatctgatggtctcaagggtcgtgtgtttgaagtgagtcttgctgatttgcagaatgatgaagttgcatttagaaaattcaagctgattactgaagatgttcagggtaaaaactgcctgactaacttccatggcatggatcttacccgtgacaaaatgtgttccatggtcaaaaaatggcagacaatgattgaagctcacgttgatgtcaagactaccgatggttacttgcttcgtctgttctgtgttggttttactaaaaaacgcaacaatcagatacggaagacctcttatgctcagcaccaacaggtccgccaaatccggaagaagatgatggaaatcatgacccgagaggtgcagacaaatgacttgaaagaagtggtcaataaattgattccagacagcattggaaaagacatagaaaaggcttgccaatctatttatcctctccatgatgtcttcgttagaaaagtaaaaatgctgaagaagcccaagtttgaattgggaaagctcatggagcttcatggtgaaggcagtagttctggaaaagccactggggacgagacaggtgctaaagttgaacgagctgatggatatgaaccaccagtccaagaatctgtttaaagttcagacttcaaatagtggcaaataaaaagtgctatttgtgatggtttgcttctgaaaaaaaaaaaaaaaaaaaaaaaaaaa

SEQ ID NO: 228 - DNA, 2454 bp, Homo sapiens
ggctcactctgcaaccaaggcacgtgcattctggtcatcccacgcggggagcgcgcgcaaggcccgcccagcccccacatgccagccccaccctccagtcggtccggacgccgacgcctttttgaccctcgctgtgcccggccctcctcatctggcctgcccagggcttggtgctggcggggtccagctgctccaatccctcctcctctgctctgccctgccctgccctggcctgccccggcgccctccctcagcccgggtatcaggcgagaggcggagctggcccggcgcgccccgcccccgctgtagaaagggccgggcgagtgttactcgcggtcatcccggcctgggccttttatctcggtgctgccgggggaggcgggaggaggagacaccaggggtggccctgagcgccggcgacacctttcctggactataaattgagcacctgggatgggtagggggccaacgcagtcaccgccgtccgcagtcacagtccagccactgaccgcagcagcgcccttgcgtagcagccgcttgcagcgagaacactgaattgccaacgagcaggagagtctcaaggcgcaagaggaggccagggctcgacccacagagcaccctcagccatcgcgagtttccgggcgccaaagccaggagaagccgcccatcccgcagggccggtctgccagcgagacgagagttggcgagggcggaggagtgccgggaatcccgccacaccggctatagccaggcccccagcgcgggccttggagagcgcgtgaaggcgggcatccccttgacccggccgaccatccccgtgcccctgcgtccctgcgctccaacgtccgcgcggccaccatgatgcaaatctgcgacacctacaaccagaagcactcgctctttaacgccatgaatcgcttcattggcgccgtgaacaacatggaccagacggtgatggtgcccagcttgctgcgcgacgtgcccctggctgaccccgggttagacaacgatgttggcgtggaggtaggcggcagtggcggctgcctggaggagcgcacgcccccagtccccgactcgggaagcgccaatggcagctttttcgcgccctctcgggacatgtacagccactacgtgcttctcaagtccatccgcaacgacatcgagtggggggtcctgcaccagccgcctccaccggctgggagcgaggagggcagtgcctggaagtccaaggacatcctggtggacctgggccacttggagggtgcggacgccggcgaagaagacctggaacagcagttccactaccacctgcgcgggctgcacactgtgctctcgaaactcacgcgcaaagccaacatcctcactaacagatacaagcaggagatcggcttcggcaattggggccactgaggcgtggcgcccgtggctgcccagcaccttcttcgacccatctcaccctctctcattcctcaaagctttttttttttttcctggctggggggcgggaagggcagactgcaaactggggggctgcgtacgtgcaggaggcgcggtggggctgcgtggaggagggggccacgtgtgagagagaagaaaatggtggccggagatgggagggcccaaggaacctcctgggagggggcctgcattctatgttggtgggaatgggactgggctgacgccctgcattcagcctgtgcctttcctggggtttcttttctgttcttttcggaggagagggcccgagaaggggccataccagggcgcggcgctgggttgccacacttgggaaagcagcccggagctgggtgctggggaaggcggggcgcgtagcctcccgccgccctgcggttgggccggtggaggcccaggcgttgctaggattgcatcagttttcctgtttgcactatttctttttgtaacattggccctgtgtgaagtatttcgaatctcctccttgctctgaaacttcagcgattccattgtgataagcgcacaaacagcactgtctgtcggtaatcggtactactttattaatgattttctgttacactgtatagtagtcctatggcacccccaccccatccctttcgtgccactcccgtccccacccccaccccagtgtgtataagctggcatttcgccagcttgtacgtagcttgccactcagtgaaaataataacattattatgagaaagtggacttaaccgaaatggaaccaactgacattctatcgtgttgtacatagaatgatgaagggttccactgttgttgtatgtcttaaatttatttaaaactttttttaatccagatgtagactatattctaaaaaataaaaaagcaaatgtgtcaactaaattggacaagcgtctggtcctcattaatctgccaatgaatggtttcgtcattaaataaaaatcaatttaattgatttactagcaaaaaaaaaaaaaa

SEQ ID NO: 229 - DNA, 468 bp, Homo sapiens
accacgcttttcatctgtcccgctgcgtgttttcctcttgatcgggaactcctgcttctccttgcctcgaaatggaccccaactgctcctgctcgcctgttggctcctgtgcctgtgccggctcctgcaaatgcaaagagtgcaaatgcacctcctgcaagaagagctgctgctcctgctgccctgtgggctgtgccaagtgtgcccagggctgcatctgcaaagggacgtcagacaagtgcagctgctgtgcctgatgccaggacagctgtgctctcagatgtaaatagagcaacctatataaacctggattttttttttttttttttttgtacaaccctgacccgtttgctacatctttttttctatgaaatatgtgaatggcaataaattcatctagactaaaaaaaaaaaaaaaaaaaaaaaaaaaaaaaaaaaaaaaaaaaaaaaaaaaaaaaaaaaaaaaaa

SEQ ID NO: 230 - DNA, 1479 bp, Homo sapiens
gtgctacgccatcaagggcccccagtcccgggtgccgcggggacagtgtagggtcattagctgttgagccgccccgggcgggcccaagcctttggatctcaggtgaccggcacaggcggccgcggggtccggaactgcttgttccggcagtggaagagacgcgccggcgttggccgctgctgctagcagcttgaaccccagggtcgggaccgatgtcggcttgggctgctgccagcctaagcagggccgctgcccgatgcttgctggcacgaggccccggggtcagggcggctcctccgcgcgacccccggccctcccaccccgagccccggggctgcggtgccgctccgggcaggacgctgcactttaccgcggctgtccccgccgggcacaacaagtggtccaaagtcaggcacatcaagggtccgaaggacgtcgaaaggagtcgcatcttctccaaactctgtttgaacatccgcctggcagtgaaagaaggaggccccaaccctgagcacaacagcaacctggccaatatcttagaggtgtgtcgcagcaaacatatgcccaagtcaacgattgagacagcactgaaaatggagaaatccaaggacacttatttgctgtatgagggtcgaggccctggtggctcttctctgctcatcgaggcattatctaacagtagccacaagtgccaagcagacattagacatatcctgaataagaatggaggagtgatggctgtaggagctcgtcactcttttgacaaaaagggggtgattgtggttgaagtggaggacagagagaagaaggctgtgaacctagagcgtgccctggagatggcaatcgaagcaggagctgaggatgtcaaggaaactgaagatgaagaagaaaggaacgtttttaaatttatttgtgatgcctcttcactgcaccaagtgaggaagaagctggactccctgggcctgtgttctgtgtcctgtgcactagagttcatccccaactcaaaggtgcagctggctgagcccgacctggaacaggccgcacatctcattcaggctctcagcaaccacgaggatgtgattcacgtctatgataacattgaataaccaggctacatgtgcccccgggttccttcctagaaatgtggcagcccattccagcacacaggcttctgcagcaatctctgagggtaaagccggtgggaggctcagcaggccaggaggcccaaggacaggacttgcgaccttgaagccaaaggaatctcacttgtggggcctccttgtcagctctgctgctgtctcagagccatctggatgagtgtcccgacaccctctcggatgcagggcaggaccacccagctggtcagactctgatgttgggtagctggcctctgtggggattgtaagtgccctgaggcgctctgtactagaaactgctcttaataataacggtgattattggttgctgcaaaaaaaaaaa

SEQ ID NO: 231 - DNA, 15025 bp, Homo sapiens
cggcggcagtggcggcaccgcctcctcctcacattcccggggtggcggggttagatgagcggccccagtagcggcgagggcggcgcgggggggaggaggagaagaaggaggaggagaaggaggtcgctgtctttgtagtctccctgctgcgggagccagaggccgccgccggagccgtcgtcgttggaaaagggctgtgtgtgcgcgcgcgtgtctgcccgcccggcccgcggggacgaggcggcggcggcggcggcggcggcgaggatgatgatgtgcgcagcgactgcctcccccgccgccgcctcctcggggctcggcggggacggattctacccagccgccaccttctcttcctccccggcgccgggggcgctgttcatgccggttcccgacggctccgtggctgctgcggggctggggctggggctacccgccgcggactcccggggtcactaccagctgctgctgtcaggccgggccctggccgaccgctaccggaggatttataccgctgcgctcaatgacagggaccaggggggcggcagcgctggacacccagcctccaggaataagaaaattttaaataagaagaaattgaaaagaaaacagaagagcaaatcaaaagtgaagacaagaagcaagtctgaaaacttagagaatacagtaatcataccagatatcaaactacatagcaatccttctgctttcaatatttactgtaatgtacgccattgcgttctggaatggcagaaaaaggaaatatcattggcagccgcatctaagaactctgtgcagagtggagaatcagatagtgatgaagaagaggaatccaaagagccccctatcaagcttccaaagattattgaggttggcctttgtgaagtttttgaattgatcaaagagacacgattttctcatccatccctgtgtctcaggagtctccaagccctgctcaacgtgctgcagggccagcagccagaaggcctccagtctgagccacctgaggtcctagagtctctcttccagcttcttttggaaatcaccgttcgaagtactgggatgaatgacagcacaggacagtccttaacagcactttcctgtgcttgcctctttagtctggtggcttcttggggagaaacaggaaggacacttcaggccatctctgctatcctcaccaacaatggaagccatgcttgccaaactattcaggtgccaacaattctaaattcgctacagagaagtgtacaagcagttttggtgggaaaaattcaaattcaggactggtttagtaatggcattaagaaagcagctttaatgcacaagtggccattaaaagaaatatctgttgatgaagatgaccaatgtctacttcagaatgatggattttttctttatctattatgcaaggatggattatataaaataggctctggatacagtggaacagttaggggccatatatacaattctacatcccgtattagaaacagaaaagaaaaaaagtcttggttagggtatgctcagggttatttattatatagagatgtgaataaccacagcatgacagccataaggataagccctgaaacactggagcaagatggtactgtgatgttaccagattgccacactgaaggtcaaaatattttattcactgatggagaatatattaatcagatagctgcttcaagagatgatggctttgttgtcagaatatttgccacaagcactgaacctgttctacagcaagaattgcaacttaaactggctagaaaatgcttacatgcctgtggtatctcactattcgatctggaaaaggacttgcatattataagtacaggatttgatgaggagtcagcaattcttggtgcaggacgagagtttgcgctaatgaaaacagcaaatggaaagatatattacactggcaaataccagagtcttggaatcaaacaaggtggtccttcagcaggaaaatgggttgagctaccaattacaaaatctccaaagatagtacacttctcagttggacacgatggctctcacgcccttttagttgcagaagatgggagcatattctttacaggatctgctagtaaaggagaagatggagaatcaactaagagcagacggcaatccaaaccttataaacctaaaaagataattaagatggaaggaaagattgtggtatatacagcctgcaataatggaagtagttctgttatttctaaagatggagaactctacatgtttggaaaagatgccatttactctgatagttcaagtttggtaactgatttgaagggccattttgtaactcaggtagctatgggcaaagctcacacttgtgttttaatgaagaatggagaggtgtggacatttggtgtaaataataaaggacagtgtggacgagatactggtgccatgaaccaaggtgggaaagggtttggagttgaaaatatggcaacagcaatggatgaagacctggaagaagaactagatgaaaaagatgagaagtctatgatgtgccctccaggcatgcacaaatggaagctggagcagtgcatggtttgcactgtctgtggagactgtacaggttatggagccagctgtgtcagtagtggacggccagacagagtccccggagggatctgtggttgtggttccggagaatctggttgtgctgtgtgtggatgttgcaaggcctgtgcaagagagttagatggtcaagaggcaagacaaagaggaattcttgatgcagtgaaagaaatgatacctttagatcttcttttagctgtcccagtgcccggggttaacattgaagaacaccttcagttacgacaagaagaaaaacggcaacgtgtaatcagaaggcacagattagaggaaggaagaggcccccttgtatttgctggtcctatttttatgaaccatcgagaacaggctctagccagactcagatcccatccagcacagctaaagcataaacgggacaagcacaaagatggaagtggagaaagaggcgaaaaggatgcaagcaaaatcacaacataccctccaggctctgtgcgatttgactgtgagctccgggcagtccaagtcagctgtggatttcaccattcagtggttttaatggaaaatggagatgtctatacatttggttatgggcagcatgggcagctaggacatggagatgtcaactccaggggatgtcccactcttgttcaagcattgccaggccctagcacacaagtcactgcaggcagcaaccatacggcagtacttttaatggatggacaggtcttcacatttggaagtttttctaaaggacaactgggcagaccaattttggatgtgccatattggaatgcaaagccagctcccatgcctaacattggatcaaaatatggaagaaaagctacttggataggtgcaagtggggaccaaacttttttacgaattgatgaagcacttattaattctcatgtacttgctacatcagaaatttttgccagtaaacacataataggcttggtacctgcttctatatcagaacctcctccatttaaatgccttctgataaataaagtggatgggagttgtaaaacttttaatgactcagaacaagaggatctgcaaggatttggtgtgtgtcttgatcctgtatatgatgtaatttggaggtttcgaccaaatactagagagctgtggtgttacaatgcggtggttgctgatgccaggcttccctctgcagcagacatgcagtccagatgtagtatcctaagtcctgaacttgccttaccaacaggatcaagggccctcactacccgatctcatgcagctttgcacattttaggttgtcttgataccttggcagctatgcaggacttaaaaatgggtgttgcaagtacagaggaagagactcaagcagtaatgaaggtttattctaaagaagattatagtgtggtaaacaggtttgaaagtcatggaggaggctggggttattctgcccattcagtagaagctatacgtttcagtgccgacactgatattttacttggtggtcttggtctgtttggaggtagaggagaatatactgctaaaattaagctgtttgaattgggtcctgatggaggagatcatgaaactgatggtgaccttcttgcagagactgatgtattggcttatgactgtgctgctagagaaaaatatgcaatgatgtttgatgagcctgttctcctgcaagctgggtggtggtatgtggcatgggcccgagtgtcaggacccagcagtgactgtggatctcatggacaggcatctattaccacagatgatggggttgttttccagttcaagagttcaaagaaatcaaataatggtacagatgttaatgcgggtcagatacctcagttattatacagacttccaaccagtgatggcagtgcttcaaaaggcaaacagcaaaccagtgaacctgtacacattttaaagaggtcttttgcaagaactgtctcagtggaatgttttgagtcattgttgagtattcttcactggagctggaccaccttagtcttaggagttgaagaacttagaggattaaaaggattccagttcacagctacactcctagatttagagagactgcgctttgtgggtacctgttgtctgaggttattgcgtgtctatacctgtgaaatttacccagtgtcagctacaggaaaagcagttgtagaagaaactagcaaattagcagagtgtattggaaaaaccagaactttgttaagaaaaattttatcagaaggagttgatcactgcatggtgaaattggataatgatcctcaaggatatctcagtcaacccttgagtcttctagaagctgtccttcaggaatgtcataatactttcactgcctgctttcattctttctacccaactcctgccttacagtgggcttgcctttgtgatctgctgaattgtttggatcaggatatccaagaagcaaacttcaagacatcaagtagccgactccttgcagctgttatgtcagctctgtgtcacacgtctgttaagctgacttccatcttcccgattgcgtatgatggagaagtattactacgatcaattgttaaacaagttagtacagagaacgactcaacactagttcatcgttttccccttttggtggcacatatggaaaaactcagccagagtgaagagaatatctcagggatgacaagcttccgtgaagttctggagaaaatgctggtcattgttgtgctaccagtcaggaacagcctgaggagagaaaatgaactcttctcctcccacctcgtctctaacacctgtggattactggccagcattgtcagtgaactgacagcgtcagccctgggatctgaggttgatggacttaattctcttcactctgtaaaagctagtgctaaccgatttacaaaaacaagtcagggcagaagttggaacactgggaacgggtcccctgatgcaatctgtttttcagtagacaaacctggaatagttgtggttggtttctctgtctatggaggaggtggaattcatgaatatgaattagaggtgttggttgatgatagtgaacatgcaggagattcaactcattcccacagatggacatctctggaattagtgaaaggaacgtacacaacggatgactcacccagtgatatagctgagatcagacttgacaaagtggttcctttaaaggaaaatgttaaatatgctgtgcgcttgaggaactatggaagccgtacagccaatggagatggaggaatgaccacagttcagtgccctgatggtgtgacattcacattcagcacgtgcagcttgagcagtaacggcacaaaccaaaccagaggacagatcccacagatactctactataggagtgaatttgatggagatttacaatcccaacttctgagtaaagccaatgaagaagataaaaactgtagcagagcattgtctgttgtaagcactgtcgttcgagcctctaaggacctcctgcacagagctcttgctgtggatgctgatgacattccagaactgctgagttcttccagtctgttttccatgctgctcccccttattatagcctacataggaccagtagctgctgctattcccaaggtggctgtagaagtctttggccttgtccaacaattgcttccgtcagttgccattttgaatcagaagtatgcaccgcctgccttcaaccctaatcagtcgacagatagcaccacaggaaaccagcctgaacagggcctctctgcttgtacaacctccagtcactatgctgtcatagagagtgagcacccgtataaacctgcctgtgtgatgcattacaaggtgacattcccagaatgtgtgaggtggatgacaatcgaatttgaccctcagtgtggtactgcacagtcagaagatgtccttcgtttgttgattcctgtcagaactgttcagaattcaggatatggaccaaaattgacatctgttcatgaaaatcttaattcatggatagaattaaagaaattttcaggatcctctgggtggcctactatggttttggtgttgccaggaaatgaggcccttttttcattggagactgcatcagattatgtgaaagatgacaaagcttctttctatggttttaagtgttttgcaattggatatgaatttagccctggacctgatgagggagtcatccaattggaaaaagaattagccaatcttggtggggtttgtgcagcagctctgatgaagaaggacctagcacttcctattggtaatgaattagaagaagaccttgaaattcttgaggaggctgcattgcaggtgtgcaaaacccattctggaattcttggaaagggtctagctctttctcattcaccaactatattagaagcacttgagggaaatttaccactccaaatccaaagcaatgaacagtcttttctggatgattttattgcctgtgtcccaggatcaagtggtggaaggcttgcaaggtggcttcagccagattcatatgcggatcctcagaaaacatctttgatcctgaataaggatgatattcgttgtggttggcctaccaccataactgttcaaacaaaagaccagtatggggatgtggtacatgttcccaatatgaaggtggaagtgaaagctgtccctgtttctcagaaaaaaatgtctttacaacaagatcaagcaaagaaacctcaaaggattcctggcagtcctgcagtaacagctgcatcttctaatactgacatgacttatggagggctggcatcaccaaagctagatgtttcatatgaaccaatgatagtgaaggaagctcgatatattgccataacaatgatgaaggtttatgaaaattattcatttgaagaactacgttttgcatcaccaactcctaagagacccagtgagaatatgctgatccgtgtcaataatgatgggacttattgtgcaaattggactccaggggctattggactctacactcttcatgttaccattgatggcattgaaatcgatgctggtctggaagtaaaagtaaaagacccaccaaaagggatgataccaccaggaactcagttggtcaaaccaaagtctgaacctcagcctaataaggttcgaaaatttgtggccaaggacagtgcggggcttcgcatccgtagccacccttcccttcagagtgagcagataggcatagtgaaagtcaatggaactatcacttttattgatgagatccataatgatgatggtgtgtggctgaggctgaatgatgagacaataaagaagtatgtccctaacatgaatggttacactgaagcctggtgcctctcttttaatcaacatcttggcaagagtcttctggtccctgttgacgaatctaaaactaatactgatgactttttcaaagacataaactcctgctgcccacaggaagcaacaatgcaagaacaagatatgccattcttgcgaggagggccaggcatgtacaaggtagtgaagacgggaccttcaggtcacaacatcagaagctgccctaaccttagaggtatcccaattggaatgttagttctgggaaacaaagtcaaagcagtgggagaggtaaccaattctgaagggacatgggtgcaactggatcagaacagcatggtagagttctgtgagagtgatgaaggagaggcatggtccttagctagagacagaggcggaaaccagtacctccgacatgaagatgaacaagctcttctggatcagaattctcaaactcctcctccaagccctttctcagtgcaagcttttaataaaggggcaagttgcagtgcccaaggatttgattatggactcggaaatagcaaaggtgatcgaggaaacatctcaacatcttctaaaccagcctctacatcaggaaaatcagagctgtcctctaaacacagcagatcgcttaaacctgatggacgtatgagccggactactgctgatcagaagaagccaaggggcacagaaagtttatctgctagtgaatccctcatcttaaaatctgatgctgcaaagttgaggtcagattcccacagtaggtcattatcccccaaccataacaccttgcagacattgaaatctgatgggaggatgccttctagctccagagctgaatccccaggaccaggttctcggttgtcatctcctaagccaaagactctcccagccaataggtctagcccatcgggtgctagttctccacgctcctcctcaccacatgataaaaatctacctcaaaaaagtactgctcctgttaagacaaagcttgatcctcctcgggaacgttctaaatcagactcttacacacttgatccagataccctccgcaagaagaaaatgcccctcacagaacctttgagaggacggtcaacgtcaccaaaaccaaaatcagtaccaaaggattctacagattcccctggatctgaaaatagagctccctctccccatgtggtacaggaaaacctccacagtgaggtggtcgaagtctgcacctcaagtactttaaaaacaaatagtctaacagacagcacctgcgatgacagcagtgaatttaagagtgtggatgaaggttcaaataaagttcattttagcattggaaaagcaccactgaaagatgaacaggaaatgagagcatctcccaaaataagtcgaaaatgtgctaatagacacaccaggcccaaaaaagaaaaatcgagttttcttttcaaaggagatggatccaagcctttagagccagccaagcaagccatgtctccttctgtggccgaatgtgccagagctgtgtttgcttccttcctctggcatgaaggcatagtacatgatgcaatggcttgttcttctttcctaaagtttcatcctgaactttccaaagaacatgctcctataaggagtagtttaaatagccaacaacctacagaggaaaaagaaaccaagttaaaaaatagacattcattagaaatatcatctgcactgaatatgtttaatattgcaccccatggaccagatatatctaagatgggtagcatcaacaaaaacaaggtattgtctatgcttaaggaaccacctctgcatgaaaaatgtgaggatgggaaaaccgagaccacttttgaaatgtccatgcataacacaatgaagtctaagtctcctcttcccttaactttacaacatttagtggctttttgggaagacatctctttggctactatcaaagctgcttcccagaatatgatttttccaagtcctggttcctgtgcagttcttaaaaagaaagagtgtgagaaagagaataagaagtccaaaaaggaaaaaaagaaaaaagaaaaggcagaagttaggcccaggggtaatttgtttggagagatggcccagctggcagtaggaggaccagagaaagataccatctgtgaactgtgtggggagtcacatccatacccggtgacctatcacatgagacaagctcacccaggttgtggccgatatgctggtggacaaggttacaatagcattgggcatttttgtggaggatgggctggtaactgtggtgatggtggcataggaggaagcacttggtatctggtatgtgatcgctgtagagaaaaatacctccgcgaaaaacaggctgctgcaagggagaaggtcaaacaatctaggagaaaaccaatgcaagtcaagacccctcgtgccttgcccaccatggaagctcaccaggtgattaaagccaatgcactcttcctgctgtccctgagcagtgcagcagaaccgagcattctgtgttaccatcctgcaaagccattccaatctcagttgcccagtgtaaaagaaggcatttctgaggatcttcctgtgaaaatgccttgtctctacctgcagacattagctaggcatcatcatgaaaattttgtgggctatcaagatgacaatctattccaggatgaaatgagatatctacgttcaacatctgtacctgccccgtatatatcagtaactcctgatgcaagtcctaatgtatttgaagagccagagagcaatatgaagtctatgccaccaagtttagaaaccagtcccataactgatactgatcttgcaaagagaactgtcttccaaagatcatactcagttgttgcttccgaatatgataaacaacactccattttacctgcacgagttaaagctattcctagaagaagagttaacagtggagacactgaagttggttcttcccttttgagacatccgtctcctgagctttctcggctaatctcagcccacagctctctttctaaaggagaacgaaatttccagtggccagttttagcttttgttatacaacatcatgatctagaaggtcttgaaatagcaatgaaacaggccctaaggaaatctgcttgtcgagtttttgctatggaggctttcaactggcttctgtgtaatgtcatccaaaccacttctctccatgatattctgtggcattttgtggcatcactgactcctgcaccagtggaaccagaggaagaagaggatgaagaaaataaaacaagcaaagaaaattcagaacaagagaaagatacaagagtatgtgaacatccactctcagacatagtgattgccggggaagctgctcatcctttaccacacacctttcaccgcttgctgcagaccatctcagaccttatgatgtctctccccagcggcagttcattacagcaaatggccctgaggtgctggagtctcaaattcaagcaatctgatcaccagttccttcatcagagcaacgtctttcatcacattaacaatattttgtcaaagtcagatgatggcgatagtgaagagagttttagcatcagtatacagtctggctttgaagctatgagtcaggaattatgcatagtaatgtgcttaaaggacttaaccagcattgttgacataaaaacttcaagccgacctgccatgattggcagtttgacagacggctccacagaaaccttttgggaatcaggagatgaagataaaaacaaaactaagaacatcaccatcaactgtgtaaaaggaatcaatgcccgctatgtgtctgttcacgtggacaattcccgagatcttgggaataaagttacctcaatgaccttcttaactggcaaagcagtagaagatttgtgcagaataaagcaggttgatctggattccaggcacattggctgggtaacaagtgaacttccaggaggggataatcacatcataaaaattgaattaaaaggcccagaaaatacactgagagttcgacaagtcaaagtcctgggctggaaagatggtgaaagcacaaaaatagctggccagatttcagccagtgtggcccagcagaggaactgtgaagctgagactctgcgagtattcagactgattacgtctcaagtatttggaaagctcatctctggagatgctgaacctacaccagaacaagaggaaaaagcactattgtcatcacctgaaggagaagaaaaagtatacaatgcaacatcagatgctgacctgaaagaacatatggttggaatcatattcagcaggagtaagctgactaacttacaaaaacaggtgtgtgctcatattgtccaagctattcgcatggaagctaccagagtccgtgaagaatgggaacatgctatatcaagcaaagaaaatgccaattctcagccaaatgatgaagatgcctcctctgatgcctactgctttgagctgctctctatggttttagcactgagtggctctaacgttggccggcaatatctggctcaacagctaaccctgcttcaggatctcttctcgctgcttcacacagcctctcctagagtccagagacaggtaacctctttactaagaagagttttgcctgaagtaacccctagtcgtctggccagcatcataggagtgaaatccctccccccagcagatatcagtgatatcattcactcaacagagaaaggagactggaataagctgggtatcttggacatgtttctaggatgcattgccaaagcactcactgtacagctaaaagccaaaggaaccaccatcactggaacagctggtaccactgtgggcaaaggagttacaacagttactcttccgatgattttcaattccagttatctccgacgaggtgaaagtcattggtggatgaagggctcaacccctacccagatctcagagatcatcattaaacttatcaaggatatggcagcaggtcatctgtcagaagcttggtcccgagtgacaaaaaatgctattgcagaaaccatcattgccttgaccaagatggaagaagaatttaggtctccagtgagatgtattgcaacaactagactctggcttgctctcgcatccctatgtgttcttgatcaggaccacgtagatcgtctctcctcggggagatggatgggaaaggatggacaacaaaaacaaatgcctatgtgtgataaccatgatgatggtgaaactgcagcaatcattttatgcaatgtctgtggaaatttatgtacagactgtgacagattccttcaccttcatcgaagaaccaaaactcatcaaagacaggtcttcaaagaagaagaagaagctataaaggttgaccttcatgaaggttgtggtagaaccaaattgttctggttgatggcactggcagattctaaaacaatgaaggcaatggtggaattccgagaacacacaggcaaacccaccacgagtagctcagaagcatgtcgcttctgtggttccaggagtggaacagagttatctgctgttggcagtgtttgttctgatgcagattgccaggaatacgctaagatagcctgtagtaagacgcatccttgtggccatccatgcgggggtgttaaaaacgaagagcactgtctgccctgtctacacggctgtgacaaaagtgccacaagcctgaagcaagacgccgatgacatgtgcatgatatgtttcaccgaagcgctctcggcagcaccagccattcagctggattgtagtcacatattccacttacagtgctgtcggcgagtattagaaaatcgatggcttggcccaaggataacatttggatttatatcttgtcccatttgcaagaacaaaattaatcacatagtactaaaagacctacttgatccaataaaagaactctatgaggatgtcagaagaaaagccttaatgagattggaatatgaaggtctgcataagagtgaagctatcacaactcctggtgtgaggttttataatgacccagctggctatgcaatgaatagatatgcatattatgtgtgctacaaatgcagaaaggcatattttggtggtgaagctcgctgcgatgctgaggctggacggggagatgattatgatcccagagagctcatttgtggtgcctgttctgatgtttccagggctcagatgtgtcccaaacatggcacagactttttggaatataaatgtcgctactgctgttcagtggctgtttttttctgttttggaacaacacatttttgtaatgcttgtcatgatgattttcaaagaatgactagcattcctaaggaagaactaccacactgtcctgcaggtcccaaaggcaagcagttagaaggaactgaatgtccactccatgttgttcatccacccactggggaagagtttgctctgggatgtggagtgtgcagaaatgcccacactttttagaacacgcagatcctttgtctacagagagaaaaattgccttcatcccccaagaggatgcggtgaagtttaaactctgctcaggataaggacgggaccatttttacatccatgaaaatgaaccattcacagtgcaagaaggataccaaataccatgtacataattcttgctatgaaaagtttccccattattttggtttatcttcttttgaacaaatgacatcaaacttgtgaggtgtttgcatgtggccattaccgtcattggcctgtgaagcattggacatttatagataattgatataaaagaatcgccatgcccatggactaagaacgatgctggctttcaagcaaaaaagaaaaataatcattgtttattgtatactgcctttttgtaatcctgtacaattgcatcacgggtggggataaaaagaggaatattctggtttatttcctagactgttatttaaaaaaaaaaaaaacattgtgttaggacagcatataaatgtaataagtatcacactgtatataaacatatcaatgtttgtcctgtataagaattactaaattacaaatgcaatttcatttaaacttctaggttaagtttgagcctgaaattttaatgaagtgcaatactgagtgtgcctcattatcttgcagctgtaaacatattggaatgtacatgtcaataaaaccactgtacatttttatacagtgataaagtcta

SEQ ID NO: 232 - DNA, 1780 bp, Homo sapiens
gcagagctaccatgtcctcttggagcagacagcgaccaaaaagcccagggggcattcaaccccatgtttctagaactctgttcctgctgctgctgttggcagcctcagcctggggggtcaccctgagccccaaagactgccaggtgttccgctcagaccatggcagctccatctcctgtcaaccacctgccgaaatccccggctacctgccagccgacaccgtgcacctggccgtggaattcttcaacctgacccacctgccagccaacctcctccagggcgcctctaagctccaagaattgcacctctccagcaatgggctggaaagcctctcgcccgaattcctgcggccagtgccgcagctgagggtgctggatctaacccgaaacgccctgaccgggctgcccccgggcctcttccaggcctcagccaccctggacaccctggtattgaaagaaaaccagctggaggtcctggaggtctcgtggctacacggcctgaaagctctggggcatctggacctgtctgggaaccgcctccggaaactgccccccgggctgctggccaacttcaccctcctgcgcacccttgaccttggggagaaccagttggagaccttgccacctgacctcctgaggggtccgctgcaattagaacggctacatctagaaggcaacaaattgcaagtactgggaaaagatctcctcttgccgcagccggacctgcgctacctcttcctgaacggcaacaagctggccagggtggcagccggtgccttccagggcctgcggcagctggacatgctggacctctccaataactcactggccagcgtgcccgaggggctctgggcatccctagggcagccaaactgggacatgcgggatggcttcgacatctccggcaacccctggatctgtgaccagaacctgagcgacctctatcgttggcttcaggcccaaaaagacaagatgttttcccagaatgacacgcgctgtgctgggcctgaagccgtgaagggccagacgctcctggcagtggccaagtcccagtgagaccaggggcttgggttgagggtggggggtctggtagaacactgcaacccgcttaacaaataatcctgcctttggccgggtgcgggggctcacgcctgtaatcccagcactttgggaggcccaggtgggcggatcacgaggtcaggagatcgagaccatcttggctaacatggtgaaaccctgtctctactaaaaatataaaaaattagccaggcgtggtggtgggcacctgtagtcccagcaactcgggaggctgaggcaggagaatggcgtgaacttgggaggcggagcttgcggtgagccaagatcgtgccactgcactctagcctgggcgacagagcaagactgtctcaaaaaaattaaaattaaaattaaaaacaaataatcctgccttttacaggtgaaactcggggctgtccatagcggctgggaccccgtttcatccatccatgcttcctagaacacacgatgggctttccttacccatgcccaaggtgtgccctccgtctggaatgccgttccctgtttcccagatctcttgaactctgggttctcccagccccttgtccttccttccagctgagccctggccacactggggctgcctttctctgactctgtcttccccaagtcagggggctctctgagtgcagggtctgatgctgagtcccacttagcttggggtcagaaccaaggggtttaataaataacccttgaaaactgga

SEQ ID NO: 233 - DNA, 3230 bp, Homo sapiens
accacccctgggttccctcccgggtccgcagtggaaacactgccctctcccttcttgacccctagcccttccttccctccctccttccctcctgtcgccgtctcttctggcgccgctgctcccggaggagctcccggcacggcgatgggttctcgggcctccacgttactgcgggacgaagagctcgaggagatcaagaaggagaccggcttttcccacagtcaaatcactcgcctctacagccggttcaccagcctggacaaaggagagaatgggactctcagccgggaagatttccagaggattccagaacttgccatcaacccactgggggaccggatcatcaatgccttctttccagagggagaggaccaggtaaacttccgtggattcatgcgaactttggctcatttccgccccattgaggataatgaaaagagcaaagatgtgaatggacccgaaccactcaacagccgaagcaacaaactgcactttgcttttcgactatatgatttggataaagatgaaaagatctcccgtgatgagctgttacaggtgctacgcatgatggtcggagtaaatatctcagatgagcagctgggcagcatcgcagacaggaccattcaggaggctgatcaggatggggacagtgccatatctttcacagaatttgttaaggttttggagaaggtggatgtagaacagaaaatgagcatccgatttcttcactaaaggagaccaaactgttccttgcggtctagtatttaagaactggaacttgaaagtcctccttctaccaactccacctccaccccctcattccccttctcccaaagtactactgctgttgcatgacaaccccaaatatgttctgtcaacacaaacctgcctttggtgtataaacagggcattacagaatggtacaccctatatatttctgttcagtatccattcactagttcttcatttataaatatcatcttccccattctgctgctgaatgccacacatccatccagtctgagaaagtgagagaggcaatcatgccaagaacaagccagcaaagctctttcaccagatgtagactgtagccctgctgccttccctccagcgagtctgccagcatgcttcttcatcctttttatatgttctttgcttcctacttccctgtcttccaacatactgttcacttactctggcagtctttctgcttttcattaagcctcaaaatctcctctgttctacttggcaccacaagctatgtcctatatatgtatttctgacttggcaggatagttcaggggtctggcagtttttatttaccttcattattaaatgggcctctgggatgttgcctcttcaggagctttttggtaatcaatacttctctcagaagtatgagaccatcctctgcactctgctctgtcatcaaaggctgctgggtggagataccctttttgaaaggtggccttggtgagaggtatggagccaagtcttctaggttgcttgcccacatcactctatctctggcctctgattctcaactttgtacctgtgtggctcctcttgttagtgcaatgttgactgttgaaaaagcagcagtatgcttacaggtttgcttagtttggggacaccgttaccaccagaatggctgctctgacaatatgcctagggactttctcatggcttttatttaataaggaggctgggcaccctataaagcctcatgcattcacacctttgcagcatggtttatgcctcagtgttatgtgcactggaatgttttccacttcacatttccaagtagaaatattagtgttacggaagtgcctaatatcccagtccaaatttttttttttttttttttttttttttgagacagagtcttgctctgtcacccaggctggagtgcagtggtgcgatcgctcactgcaacctcagcctcctggatttaagtgattctcctgcctcagcctcccaagtagctgggattacaggtgtgcaccaccatgcccggctaattttttgtatttttagtggagacagggtttcaccatgttggccaggctggtctcgaactcctgacctcgtgatccgcctgcctcagcctcccaaagtgctgggattacaggtgtgagccaccacgcctggccccagtccaaaatatttaaagattgtttccttagtgtcttgaagttttgcacaaaattcttttttttgagatggagtctcactctgtcacccaggctggagtgcagtggcgtgatcttggctcactgcaacctctgcctcctgggttcaagcaattctcccacctcagcctcccaagtagctgggattacagacgtgtgccaccatacctgggtaatttttgcatttttagtggagagggagtttcaccatgttggccaggttggtcttgaactcctgacctcaggtgatcctcctgcctcggcctcccaaagtgctgggattacaggcatgagccaccgtgctcagccgcaaaattctttatgaattttacacttggcaaatgttaatgacggaagccatagtctgctcctaatacatgtccaaagcattgactgttgtgtcattagctgcctggttacattagctccctggcttcttgtttagaccactgctaatcccttaaaaacaagaggtctggcactagtagcacaacctaaggtggcattacagatctttgagcgagccacagcaacttttctgccaagtcagcttagtttagacttcagtgaatcaggctattgctatcctaatgtatgtctctatgagtgtatttagccacacatctgcccttggttgactttctgactcattgcttgcttgcttgtttccttgctttggaaaactattgaagattgctaaaaaataccactgcaaagtgatggaaaagggtggagaacaggggagtagccaggctggatggctcaaatataaatgaatgaggaattctttatgaagtatcagtcagattttatgattaagtgatgtaatataggaattatgtaaaagggaagaatgtctgatactgatctattagagaggtactttagaggcttcttgattggcataaagttcctaaggttatagattttccccccttttggctgtatagcaaagtgttttaatccacggttgtgccttattgttccattaaaattgtatcttcgatccatcaataaatacttgtggttgaaacaaaa

SEQ ID NO: 234 - DNA, 5564 bp, Homo sapiens
aatgcaaatcgggaaaagggggtgagctgggctggcttccgtcctggtagccaaggctaattctccctcgagttcttgggagatgggcatttggcgagaaggctggcgttagtgaagcgcgcccggcgtcacggaaagaagcacttgtaaggaaatatagcatccattgtgaaagtggaaaagtaaagataattcatcatgcctgctgtggcttcagttcctaaagaactctacctcagttcttcactaaaagaccttaataagaagacagaagttaaaccagagaaaataagcactaagagttatgtgcacagtgccctgaagatctttaagacagcagaagaatgcagattagatcgtgatgaggaaagggcctatgtactatatatgaaatacgtgactgtttataatcttatcaaaaaaagacctgatttcaagcaacagcaggattatttccattcaatacttggacctggaaacatcaaaaaagctgtcgaagaagctgaaagactctctgaaagccttaaattaagatatgaagaagctgaagtccggaaaaaacttgaggaaaaagacaggcaggaggaagcacagcggctacaacaaaaaaggcaggaaacaggaagagaggatggtggcacattggctaaaggctctttggagaatgttttggattccaaagacaaaacccaaaagagcaatggtgaaaagaatgaaaaatgtgagaccaaagagaaaggagcaatcacagcaaaggaactatacacaatgatgacggataaaaacatcagcttgattataatggatgctcgaagaatgcaggattatcaggattcctgtattttacattctctcagtgttcctgaagaagccatcagtccaggagtcactgctagttggattgaagcacacctgccagatgattctaaagacacatggaagaagagggggaatgtggagtatgtggtacttcttgactggtttagttctgccaaagatttacagattggaacaactctccggagtctgaaagatgcacttttcaagtgggaaagtaaaactgtcctgcgcaatgagcctttggttttagagggaggctatgaaaactggctcctttgttatccccagtatacaacaaatgctaaggtcactccacccccacgacgccagaatgaagaggtgtctatctcattggattttacttatccctcattggaagaatcaattccttctaaacctgctgcccagacgccacctgcatctatagaagtagatgaaaatatagaattgataagtggtcaaaatgagagaatgggaccactgaatatatcaactccagttgaaccagttgctgcttctaaatctgatgtttcacccataattcagccagtgcctagtataaagaatgttccacagattgatcgtactaaaaaaccagcagtcaaattgcctgaagagcatagaataaaatctgaaagtacaaaccatgagcaacaatctcctcagagtggaaaagttattcctgatcgttccaccaagccagtagttttttctccaactctcatgttaacagatgaagaaaaggctcgtattcatgcagaaactgctcttctaatggaaaaaaacaaacaagaaaaagaacttcgggaaaggcagcaagaggaacagaaagagaaactgaggaaggaagaacaagaacaaaaagccaaaaagaaacaagaagctgaagaaaatgaaattacagagaagcaacaaaaagcaaaagaagaaatggagaagaaagaaagtgaacaggccaagaaagaagataaagaaacctcagcaaagaggggcaaagaaataacaggagtaaaaagacaaagtaaaagtgaacatgaaacttctgatgccaagaaatctgtagaagatagggggaaaaggtgtccaaccccagaaatacagaaaaagtcaacaggagatgtgccccatacatctgtgacaggggattcaggttcaggcaagccatttaagattaaaggacaaccagaaagtggaattctaaggacaggaacttttagagaggatacagacgataccgaaagaaataaagctcaacgagaacctttgacaagagcacgaagtgaagaaatggggaggatcgtaccaggactgccttcaggctgggccaagtttcttgacccaatcactggaacctttcgttattatcattcacccaccaacactgttcatatgtacccaccggaaatggctccttcatctgcacctccttccacccctccaactcataaagccaagccacagattcctgctgagcgggatagggaaccttccaaactgaagcgctcctactcctccccagatataacccaggctattcaagaggaagagaagaggaagccaacagtaactccaacagttaatcgggaaaacaagccaacatgttatcctaaagctgagatctcaaggctttctgcttctcagattcggaacctcaatcctgtttttggaggttctggaccagctcttactggacttcgtaacttaggaaatacttgttatatgaactcaatattgcagtgcctatgtaacgctccacatttggctgattatttcaaccgaaactgttatcaggatgatattaacaggtcaaatttgttggggcataaaggtgaagtggcagaagaatttggtataatcatgaaagccctgtggacaggacagtatagatatatcagtccaaaggactttaaaatcaccattgggaagatcaatgaccagtttgcaggatacagtcagcaagattcacaagaattgcttctgttcctaatggatggtctccatgaagatctaaataaagctgataatcggaagagatataaagaagaaaataatgatcatctcgatgactttaaagctgcagaacatgcctggcagaaacacaagcagctcaatgagtctattattgttgcactttttcagggtcaattcaaatctacagtacagtgcctcacatgtcacaaaaagtctaggacatttgaggccttcatgtatttgtctctaccactagcatccacaagtaaatgtacattacaggattgccttagattattttccaaagaagaaaaactcacagataacaacagattttactgcagtcattgcagagctcgacgggattctctaaaaaagatagaaatctggaagttaccacctgtgcttttagtgcatctgaaacgtttttcctacgatggcaggtggaaacaaaaattacagacatctgtggacttcccgttagaaaatcttgacttgtcacagtatgttattggtccaaagaacaatttgaagaaatataatttgttttctgtttcaaatcactacggtgggctggatggaggccactacacagcctattgtaaaaatgcagcaagacaacggtggtttaagtttgatgatcatgaagtttctgatatctccgtttcttctgtgaaatcttcagcagcttatatcctcttttatacttcattgggaccacgagtaactgatgtagccacataaggagacataggttataaactagttatcttttaaaaggctcagcaacacaactcttgaaatgcttatcaggataatggtagctatagctggccatttagaggaattctaggacagtgggagctgtgttactagcactatataattccggtcagtgctgacaaataacatttaacaagtattgcagtaatcatcacttacaggtaccatttatttcaaaacaacttttttagtctgctccaaagttaaaataattaactagctaagcattattattcgactggtctaaaaactattgttatcttttttttttccttttcactgttatggccttttcacatttctaaatcccatcttgatatactatgaatactctagaatgatgtaaagcagataggaatgtatgtgtacatatttattgcatacttgcacatcaaatcgatgtacatagtttaacacgtggtccttttgtgaaacctagaactcagaggattgctttttttctttcagcctattttgagttaacttcagtgctttcttagggaaatgacagggcaaagcaatttttctgttggctttgggctgtatttgtgcactaaatctttattctaaaaaaaaaaatggaaactttaatttttttaaaacgagaatttcatttacagctacattaaaatcttaatgagaaaaataatttataaccctgtgggtgttctgtctttaatattgtattatcaaatataggacagtaaaaccatagattttatatacacacgtgctatataataacacccagagtcattctttcaagactagtattctcacatattgagaatattcattctaaatattaaagtaaaaatgccgggagtcaggcatgattgcaaagtgaactgcattataaactacatctttacagagtgatgtattaagagggttaaaggagcttataatttatttaaccgagggactcagttgctatatatatagtcagtaaaacactccatataaaaataagattctaaaagtgcttcagaaagagaccaccattagcaggctctcagggagaagatgaaaggatggggttcaaattgtgaagctgacaacttttcatgttttacaattagtctaagagaccacttcttggctaaattattatatcaaatatattcaaatcatattcttaaactcatcgagccatttgaacaaaaattatttttgtttagcttcatgagtatctttggaaaataatttgttgaatatatatgattatgagatattttctgataaacactgaattttgaaacctgaactcactatataattgcagtgttttgaaggcctgcatccattagcattgcattatattcacactgccttttttagtgaaccaagacccatcttctggacgacagatttatcttaagatgaaaggttgtataacatgcccacaaggcataaaaatgttaatgatgcaagtaagttctaagagtttaatgaccaagcaaaactctaccaccagatgctgactgcttgttttgcagtgttcaggaaacaccattttcctggctcttaacgcttttgtattggtatggaaaagggctggcagctatagaacaggagatccatagcattttgaacagaagtatctggaatctcactgactcgtgtgttatcaaagctatatcaggcctgggtgactgaattcttgcagaaagcagtgtagtggccaccatccaaatcaccaaaatggttctatgggagaaaggaatgtcaaacttagtattcacatatgaacactaactactggaacagaaatgatagggccaagagatgctttttaaattgtcccttattctaaattaaaaggaagtgataattttgttgttaaatcatgcatatagcctgactgctatattgcttctcatttcattgtaactacttatatgttgtgcccattgactatcatctgtgaataaagaaagacaatatttagcaaaaaaaaaaaaaaaaaa

SEQ ID NO: 235 - DNA, 1204 bp, Homo sapiens
gaaattcttacaaaaactgaaagtgaaatgaggaagacagattgagcaatccaatcggagggtaaatgccagcaaacctactgtacagtaggggtagagatgcagaaaggcagaaaggagaaaattcaggataactctcctgaggggtgagccaagccctgccatgtagtgcacgcaggacatcaacaaacacagataacaggaaatgatccattccctgtggtcacttattctaaaggccccaaccttcaaagttcaagtagtgatatggatgactccacagaaagggagcagtcacgccttacttcttgccttaagaaaagagaagaaatgaaactgaaggagtgtgtttccatcctcccacggaaggaaagcccctctgtccgatcctccaaagacggaaagctgctggctgcaaccttgctgctggcactgctgtcttgctgcctcacggtggtgtctttctaccaggtggccgccctgcaaggggacctggccagcctccgggcagagctgcagggccaccacgcggagaagctgccagcaggagcaggagcccccaaggccggcctggaggaagctccagctgtcaccgcgggactgaaaatctttgaaccaccagctccaggagaaggcaactccagtcagaacagcagaaataagcgtgccgttcagggtccagaagaaacagtcactcaagactgcttgcaactgattgcagacagtgaaacaccaactatacaaaaaggatcttacacatttgttccatggcttctcagctttaaaaggggaagtgccctagaagaaaaagagaataaaatattggtcaaagaaactggttacttttttatatatggtcaggttttatatactgataagacctacgccatgggacatctaattcagaggaagaaggtccatgtctttggggatgaattgagtctggtgactttgtttcgatgtattcaaaatatgcctgaaacactacccaataattcctgctattcagctggcattgcaaaactggaagaaggagatgaactccaacttgcaataccaagagaaaatgcacaaatatcactggatggagatgtcacattttttggtgcattgaaactgctgtgacctacttacaccatgtctgtagctattttcctccctttctctgtacctctaagaagaaagaatctaactgaaaatacca

SEQ ID NO: 236 - DNA, 3309 bp, Homo sapiens
gccgccgccgccgccgccgccgccgccgccgccgccgccgccgccgccacagcccgctgggccggaggaggcggagctggcgctgtcccggctctcttgcggggaagcaactgagggggcggcgcggcgggccccggcggccgaagaggctggcaggtggcgccgtggggtgggtgctcctggtgagaggagtccactccgtgcgtgcgggcggaggccggcccccgagagccgccgacatgaagaaagacgtgcggatcctgctggtgggagaacctagagttgggaagacatcactgattatgtctctggtcagtgaagaatttccagaagaggttcctccccgggcagaagaaatcaccattccagctgatgtcaccccagagagagttccaacacacattgtagattactcagaagcagaacagagtgatgaacaacttcatcaagaaatatctcaggctaatgtcatctgtatagtgtatgccgttaacaacaagcattctattgataaggtaacaagtcgatggattcctctcataaatgaaagaacagacaaagacagcaggctgcctttaatattggttgggaacaaatctgatctggtggaatatagtagtatggagaccatccttcctattatgaaccagtatacagaaatagaaacctgtgtggagtgttcagcgaaaaacctgaagaacatatcagagctcttttattacgcacagaaagctgttcttcatcctacagggcccctgtactgcccagaggagaaggagatgaaaccagcttgtataaaagcccttactcgtatatttaaaatatctgatcaagataatgatggtactctcaatgatgctgaactcaacttctttcagaggatttgtttcaacactccattagctcctcaagctctggaggatgtcaagaatgtagtcagaaaacatataagtgatggtgtggctgacagtgggttgaccctgaaaggttttctctttttacacacactttttatccagagagggagacacgaaactacttggactgtgcttcgacgatttggttatgatgatgacctggatttgacacctgaatatttgttccccctgctgaaaatacctcctgattgcactactgaattaaatcatcatgcatatttatttctccaaagcacctttgacaagcatgatttggatagagactgtgctttgtcacctgatgagcttaaagatttatttaaagttttcccttacataccttgggggccagatgtgaataacacagtttgtaccaatgaaagaggctggataacctaccagggattcctttcccagtggacgctcacgacttatttagatgtacagcggtgcctggaatatttgggctatctaggctattcaatattgactgagcaagagtctcaagcttcagctgttacagtgacaagagataaaaagatagacctgcagaaaaaacaaactcaaagaaatgtgttcagatgtaatgtaattggagtgaaaaactgtgggaaaagtggagttcttcaggctcttcttggaagaaacttaatgaggcagaagaaaattcgtgaagatcataaatcctactatgcgattaacactgtttatgtatatggacaagagaaatacttgttgttgcatgatatctcagaatcggaatttctaactgaagctgaaatcatttgtgatgttgtatgcctggtatatgatgtcagcaatcccaaatcctttgaatactgtgccaggatttttaagcaacactttatggacagcagaataccttgcttaatcgtagctgcaaagtcagacctgcatgaagttaaacaagaatacagtatttcacctactgatttctgcaggaaacacaaaatgcctccaccacaagccttcacttgcaatactgctgatgcccccagtaaggatatctttgttaaattgacaacaatggccatgtatccagaggatcattacagagacagactctcccgagacatgggccacactgatagaatagagaatttgagaaaaatctgggtctttctaaaaactgctttccatgcccggttacgctgtatgtgcacctgcaacaggtgtacattttgcatctgtcagaacttcctcaactcagacttgctgcaatctgtaaagaacaaaatcttcactgcagttcttaacaggcacgtgacacaagctgacctcaagagctccacgttttggcttcgagcaagttttggtgctactgtttttgcagttttgggctttgctatgtacaaagcattattgaaacagcgatgatataaaaagaaatactgtccctaccaaaaacaaatacttttatgtacattctgaatgctttaagttctgctagaattattgagatatttatacatgcagagttactttattaatatttgtaattcatgcataagagtattttaatgatagttataactgcagtattggctagcatatggaaagaaaacagctaacagccaaactaaaatggctaaattccagaggccaaaagggaatattttgtaaatatatgtacatattcaggcaagatatggtctcccaagctgagttctagaaatgatgtttctagacatttctaagtggtattgttagtgctcacttggctcactcttctaggtttaagttagcccagagattgtatttactcatggatcactttatttatttcacatttactcagaatgatcctttgggttctataaggacataaggtacaatttgccattgtctctccatttttaaaaacatacaagtcagtgtcagcttaccaacatgacattttttcagtcagttgtggtaggccagccttgaagccatcgcacagtctagaaacttgtgtagctgagtgtgcagctcacctttaagggtgaagttaggtaaaagcaattagcagaggcgttatctatgtgattatgttgcttccttgtcagtatgttgaattttatagccctttcaatgaaataaaaaaaaaatttgtatattaccaatgtttttagtttaaataaagagtcacccttactactgttgaatttcatcccaagtgtaaatcattctataatggctgtgtctgttatagtatattacagtaactgcatgtgtcaccaagtgttctatatcaggctaggataacctagaggcagtaattttttaaatgataaaataaatctaatgaatataaactctcatgataaacctattttttccatcatcagccttttcaagtatttaaataaataactgctgtgtactgtga

SEQ ID NO: 237 - DNA, 7858 bp, Homo sapiens
gaggagccagaagcaaacttcagctgtctcagccggatccgtggttcctacatttggaggagccgcgtgccagaaggcgtaggaccccaaggggggacaaggaggactcccgagtctcccttcgccgctctgcgaggccgaagcggtggactgagccgctcgggacagcggcaccggaggaggctcggagaagatgcggggctcggggccccggggtgcgggacgccggcggcccccaagcggcggcggcgacacccccatcaccccagcgtccctggccggctgctactctgcacctcgacgggctcccctctggacgtgccttctcctgtgcgccgcactccggaccctcctggccagccccagcaacgaagtgaatttattggattcacgcactgtcatgggggacctgggatggattgcttttccaaaaaatgggtgggaagagattggtgaagtggatgaaaattatgcccctatccacacataccaagtatgcaaagtgatggaacagaatcagaataactggcttttgaccagttggatctccaatgaaggtgcttccagaatcttcatagaactcaaatttaccctgcgggactgcaacagccttcctggaggactggggacctgtaaggaaacctttaatatgtattactttgagtcagatgatcagaatgggagaaacatcaaggaaaaccaatacatcaaaattgataccattgctgccgatgaaagctttacagaacttgatcttggtgaccgtgttatgaaactgaatacagaggtcagagatgtaggacctctaagcaaaaagggattttatcttgcttttcaagatgttggtgcttgcattgctctggtttctgtgcgtgtatactataaaaaatgcccttctgtggtacgacacttggctgtcttccctgacaccatcactggagctgattcttcccaattgctcgaagtgtcaggctcctgtgtcaaccattctgtgaccgatgaacctcccaaaatgcactgcagcgccgaaggggagtggctggtgcccatcgggaaatgcatgtgcaaggcaggatatgaagagaaaaatggcacctgtcaagtgtgcagacctgggttcttcaaagcctcacctcacatccagagctgcggcaaatgtccacctcacagttatacccatgaggaagcttcaacctcttgtgtctgtgaaaaggattatttcaggagagagtctgatccacccacaatggcatgcacaagacccccctctgctcctcggaatgccatctcaaatgttaatgaaactagtgtctttctggaatggattccgcctgctgacactggtggaaggaaagacgtgtcatattatattgcatgcaagaagtgcaactcccatgcaggtgtgtgtgaggagtgtggcggtcatgtcaggtaccttccccggcaaagcggcctgaaaaacacctctgtcatgatggtggatctactcgctcacacaaactatacctttgagattgaggcagtgaatggagtgtccgacttgagcccaggagcccggcagtatgtgtctgtaaatgtaaccacaaatcaagcagctccatctccagtcaccaatgtgaaaaaagggaaaattgcaaaaaacagcatctctttgtcttggcaagaaccagatcgtcccaatggaatcatcctagagtatgaaatcaagtattttgaaaaggaccaagagaccagctacacgattatcaaatctaaagagacaactattactgcagagggcttgaaaccagcttcagtttatgtcttccaaattcgagcacgtacagcagcaggctatggtgtcttcagtcgaagatttgagtttgaaaccaccccagtgtttgcagcatccagcgatcaaagccagattcctgtaattgctgtgtctgtgacagtgggagtcattttgttggcagtggttatcggcgtcctcctcagtggaagttgctgcgaatgtggctgtgggagggcttcttccctgtgcgctgttgcccatccaagcctaatatggcggtgtggctacagcaaagcaaaacaagatccagaagaggaaaagatgcattttcataatgggcacattaaactgccaggagtaagaacttacattgatccacatacctatgaggatcccaatcaagctgtccacgaatttgctaaggagatagaagcatcatgtatcaccattgagagagttattggagcaggtgaatttggtgaagtttgtagtggacgtttgaaactaccaggaaaaagagaattacctgtggctatcaaaacccttaaagtaggctatactgaaaagcaacgcagagatttcctaggtgaagcaagtatcatgggacagtttgatcatcctaacatcatccatttagaaggtgtggtgaccaaaagtaaaccagtgatgatcgtgacagagtatatggagaatggctctttagatacatttttgaagaaaaacgatgggcagttcactgtgattcagcttgttggcatgctgagaggtatctctgcaggaatgaagtacctttctgacatgggctatgtgcatagagatcttgctgccagaaacatcttaatcaacagtaaccttgtgtgcaaagtgtctgactttggactttcccgggtactggaagatgatcccgaggcagcctacaccacaaggggaggaaaaattccaatcagatggactgccccagaagcaatagctttccgaaagtttacttctgccagtgatgtctggagttatggaatagtaatgtgggaagttgtgtcttatggagagagaccctactgggagatgaccaatcaagatgtgattaaagcggtagaggaaggctatcgtctgccaagccccatggattgtcctgctgctctctatcagttaatgctggattgctggcagaaagagcgaaatagcaggcccaagtttgatgaaatagtcaacatgttggacaagctgatacgtaacccaagtagtctgaagacgctggttaatgcatcctgcagagtatctaatttattggcagaacatagcccactaggatctggggcctacagatcagtaggtgaatggctagaggcaatcaagatgggccggtatacagagattttcatggaaaatggatacagttcaatggacgctgtggctcaggtgaccttggaggatttgagacggcttggagtgactcttgtcggtcaccagaagaagatcatgaacagccttcaagaaatgaaggtgcagctggtaaacggaatggtgccattgtaacttcatgtaaatgtcgcttcttcaagtgaatgattctgcactttgtaaacagcactgagatttattttaacaaaaaaagggggaaaagggaaaacagtgatttctaaaccttagaaaacatttgcctcagccacagaatttgtaatcatggttttactgaagtatccagttcttagtccttagtcttcatttttcatgaagcaaacatatcttgcattaaaagggacatgaagttagacatcatcttaagttacaacaacagaatccttcccactacttctacaaaattttgtacatgaaatatataattatatagcacttttatagactgaattaaggcaacccctttcaaaacttccagggatctacttgaaaggaaatgttttatagccatttgtgagctaacaaaagctacagtttactgaagtttacttcaagtcttaattgtctacaaaagtgtattgaagagcaatatgattagattatttcttaatagatatcttcttttgtaattttaaaatgctgttacacagcgttaagttatagaaactagtgtgtaaacatgttgcttgatcaagaaaaagtacaatacagggtgtatatttattttttgtgttataaagtttacttttagttgctcttctagagattattaggtaataaatgtgtatatactgtataatttgcaatatacccaggaactgatttaagatggaattgtgtgtgtgtttgcttgcacatgtgtgtgttaccattctgcttgcatttctaatagtgtttcaattttagcaacatataggagcaagtgttccagaatgtaatatgaataggagaaatagggaagcagtaaaacaaaatttaacacaagcttgtgtctcttttcctctcatgtgtccaaaagctaatctctttattcactaaaaggaaatgtgtataagactaaatcccctttggctttttaaaaacattttgtgatatcagtgacaatgcagttcttctagccattaatcttgtacccctgtaagaaatttcacctttctgagtcctgaaaagtatcttgtcaagcaaagttgacaccgaagggcacattttcagcaggatgtagaaggatttaactgtgcaggcttctgttaatgttgttaaatccaggcacatagcacgaagcatcacccttaagtgttaatccgttgtaaccattcccattttgactcagttctagaaattttgactctaaggcagcaatggaattatgacaaatatatatatatacacatacacacacacaaatatatatatatgcttatttcccttcagaattttatttcaataattgataagttttatttttaatggatgtttattcatttgttaatttcagtttgtattcagttacatggctttgagtttattttattgaaccaatccaaggtattatgtaattaggcttattaaggaatataacatatcttctatgtatgctctatataccacacatgatgaagacttatatttgtgatacaaattatgcagtgtattagaaattgtccaaaactgagctcctgagataaccaacatttttgtattattacactttataaaaattatggaatgtcatgtgattagtcaaaatcagagcatttaaataaaatacagcctactcatgattatcaatgttaatagtacagtagatcagagaagcctggattaatgaaatttatcagaaatatagccacgttatattaatggtattcttttttccaagcacttgttttatttgaatattagcacatataagaataaacttttgggaaataactacttcctattctgcccaccctttacttaagcagtaaagtacctcttttctaaagaaccaggaaacatcaaaataaccacaacaaaaatctaaacagttttcaaataatacattcagttctcataataataagggctatataccatgggtccacacaaactgtgctgcaaacatataatctattagtttagtaaaatttccagagatgtgaatttaatattttcttgataaaatcataaaaaagcatcaccattattaaagatgcatttgttcatttcaataaacagaaattaatgaaacaaattacttttgtacaaaataaatgatgattatgtggcactttattgaattttatagaaatattccaatctaagtgataaagtaacaactgagaaacttcagaatgaaagccttattgattcaaaaggaaaattaccatatgctttagggctgatgaacttgccacaattgcttagacataacaaagatattttctacattgttttccaactttatatgctgaaagataattaggaggtccgggtggagtgtatctaaatgactagaactttaagttgcaatatagattttctctttttaacaaaggaagaatataaattaatttggatcaaatttatttgccttctttgcaatcttggtgatcattttggaaagtaaattgaaaggaaagttaaatagccacatagttttcttttgcatctcaatttggttgagaatttctaaggaaggttaatatgactttagaatgaataaagagactgtcaaacaacaagtactctccctaaaaaagaggaaagaatgccttcctaaaatatttgtttcctattgtatatgtcaccaattggaaaatgccaatctcatctgcaagtgtgagaaatggaacaaggagaggagccaactctagtaaaatgtagtgaggccataatccaaggcaaagtttaacaaatcttgattgtgtaatttcttattctgttgattcattttgtcacccaccagactaccaaaaataaagcacagacatgacaattttagtatatacaacagatttggcaaataatacataatcttattgtaattgccagtagcaatatcttaaggggcatgagtctttcacagtattggactttgaaaaattggtacagggagtaattttcaacagactgatacttgaagtcactcaattactactttgacctatcataatttgtttctaatcttgtcatttgctcatatatactattaatataaccagttgctcttttcataatgtactatttctatgtaaagatgtaaagattttgattttcctatgttttaaaattgtaatgtgcatgatcttttatttcttgtgtttcaattaccaagtcagtattctaaggttgtaagattactgtaaaaattatattccaatattttatctaaacttaagtgtggccagcattattggtttcagagttgcctaaacaacacagaatatccttaattcagtttgtaaaagagttttgaccagtgtaaaaaagtgaagacacagtttcatgtttcaagtttaaaatggaaagttaatatcatttgagcacttatgtgttttcatgtcttctacttaatctgtatgtgaaagtaaaatatttttaacaccattatttatgccatgtaaagtgggttctcagaagcacaagcacagatatttaccttctgaagacatttttggctataaaagtgcattggatggcaaacactatttgagtcaggtgttagaaatttattagatgtattatattacatagtagaataaggtccctttctcattttgtttttcctaaaaataagaaaaaaaagaagtgtgatagtaaactgtctttgctaatgtcctgccagatgtttaacttcaaattaagcaaaaagtaggtacaatatgatgatgatcctgatgatgatgatgatgatgatgatgaagaataaatggaatcaaaatgctagctttatttgacattaataagtaaaataagtcatcattttttcaactctgtagcacagctgtttacattgaataattttctctattgtgctgttaattatatagtaatgtatcaaaatagaaataggaactttcttttcatttcttattcatttatgaagaaatcttttcacacataaatgattgaatgttcttgttcagaatgaccacataatcattgcttagaagaagataccaattcttttaaaagaaaaaaagtctgtttataataatcagaatcaaatgttgtttgtttcttctaaacgttaatggagaaaattgaaggtggtaaaatgtcatgtttattcaggctgggaactgtattcacagtagaagtttcagtggtcaacatatctatgactctttaggctgctgtagttttacagtcaattatttaaaagtgagtagttacatttataagagcctgagaatacttagactcagtcatttgttagtatttttaccaaaatctcttagtttcagacatgtcagaagcagctatatagcatatcttattctatgatatacatcaggctatctcaagttcctgtctcacagttaattcaaagaaggattaggatttctgtattttttctcatttgaatctttatgtgcatttggtttgtgtacatgctttttgtagtgtaagatatgaaattttatattttttcagaaaataaaaaccctttgaatacagtta

SEQ ID NO: 238 - DNA, 546 bp, Homo sapiens
ctgaactgggttaggtgccgctgttgctgctcgtgttgaatctagaaccgtagccagacatgggactggaggacgagcaaaagatgcttaccgaatccggagatcctgaggaggaggaagaggaagaggaggaattagtggatcccctaacaacagtgagagagcaatgcgagcagttggagaaatgtgtaaaggcccgggagcggctagagctctgtgatgagcgtgtatcctctcgatcacatacagaagaggattgcacggaggagctctttgacttcttgcatgcgagggaccattgcgtggcccacaaactctttaacaacttgaaataaatgtgtggacttaattcaccccagtcttcatcatctgggcatcagaatatttccttatggttttggatgtaccatttgtttcttatttgtgtaactgtaagttcacatgaacctcatgggtttggcttaggctggtagcttctatgtaattcgcaatgattccatctaaataaaagttctatgatctgcaaaaaaaaaaaaaaaaaaaaaa

SEQ ID NO: 239 - DNA, 2041 bp, Homo sapiens
aggagggagcaggcggccggcggcgcggggggagggggcccggtccgggagtgcgggaggcagtggtagagggaggtggcggcagcggctagcggactcgagtctcaaccgggctgaggcggacacttctgtggagcgaagcagtgggagcatcgagcactagaggcggcaccgggatccccggctccggggaggggggcgccggaccgggaggaggggagggggcgatgctggaagccatggcggagcccagtcccgaagatccacctccgacccttaagccagagactcagccaccagagaaacggcggagaacaattgaggatttcaacaaattctgcagttttgttttggcatatgctggttacattccccctagcaaagaggaaagtgactggccagcctctggctccagctctccattgcgaggagagagtgcggccgacagtgatggctgggactcggccccctcagatcttcgaaccatccagacttttgttaagaaagcaaagtcatccaagagaagggcagctcaagcaggtcccacccagccaggacccccaaggtccactttctctcgtctgcaggcccccgacagtgctaccttgcttgagaagatgaagctcaaggactctctctttgatctggatgggcccaaagtggcatctcctttgtcccccacatccctgacacatacctcccggccccctgctgctcttacccccgtgcccctttcccagggggacctctcccatcctcctcgaaagaaggaccgaaagaaccgaaagttggggccaggagctggggctggctttggggtgcttcggaggcctcggccaactcctggggatggggaaaagagatctcgaatcaagaagagcaagaagcggaagttaaaaaaggcagaacggggggatagactcccacctcctgggcctccccaggcaccccccagtgatacagactctgaagaggaggaggaagaggaggaagaggaagaagaagaagagatggcaacagtggtagggggtgaagccccagtccctgtgctgccaacaccccctgaggctcctaggccccctgccacagtgcaccctgaaggagtccctcctgctgacagtgaaagcaaggaggtgggcagcactgaaacaagccaagatggagatgccagctccagtgaaggcgagatgcgggtcatggacgaggacatcatggtagaatcaggtgatgactcatgggatctgatcacatgttactgtcgaaagccctttgcagggcggcccatgattgagtgcagcctgtgtgggacgtggatccacctctcctgtgctaagattaagaagaccaacgtccccgacttcttttattgccagaaatgcaaggaactgaggccagaggcccggcggttaggggggcctcccaaatctggagagccctgatggcaccaactttagcctggaacttccaaatgacaacatgatttgggaactgagcctcagggtcctcagcctatcccctggagcttggatactgtctgcacttcaaggcaggaattctcaagggagacttgtttgaaaatgagtgtctcactttcccaccctatccttcctccccactctgtggacttgaaattgaatccattacggttggggatgggaggctgtctgtgtcccgacacataatctctgtctcttggacctgccaccatcactttctgggtcaggattggaattgggatggaatgggacagttgtctataaaactctagtgtaaatattagcactcccctccctcatcttttcttctatttcactccccatttattttcttctacaccggttgtatttttaattttggacttcccctattgggcatggcagctcaaaggtggagtactagagcctggccaagtgaggaaggaaagcagaaaggtgacgattctcactcacctcttttgtttttaataatatcggccgctgtttgtacagacagcctgcgtgttgtaaataaagcagagtgggctcttttgtgtttataaaaa

SEQ ID NO: 240 - DNA, 1648 bp, Homo sapiens
cagagaaggcttaggctcccgagtcaacagggcattcaccgcctggggcgcctgagtcatcaggacactgccaggagacacagaaccctagatgccctgcagaatccttcctgttacggtccccctccctgaaacatccttcattgcaatatttccaggaaaggaagggggctggctcggaggaagagaggtggggaggtgatcagggttcacagaggagggaactgaatgacatcccaggattacataaactgtcagaggcagccgaagagttcacaagtgtgaagcctggaagccggcgggtgccgctgtgtaggaaagaagctaaagcacttccagagcctgtccggagctcagaggttcggaagacttatcgaccatggagcgcgcgtcctgcttgttgctgctgctgctgccgctggtgcacgtctctgcgaccacgccagaaccttgtgagctggacgatgaagatttccgctgcgtctgcaacttctccgaacctcagcccgactggtccgaagccttccagtgtgtgtctgcagtagaggtggagatccatgccggcggtctcaacctagagccgtttctaaagcgcgtcgatgcggacgccgacccgcggcagtatgctgacacggtcaaggctctccgcgtgcggcggctcacagtgggagccgcacaggttcctgctcagctactggtaggcgccctgcgtgtgctagcgtactcccgcctcaaggaactgacgctcgaggacctaaagataaccggcaccatgcctccgctgcctctggaagccacaggacttgcactttccagcttgcgcctacgcaacgtgtcgtgggcgacagggcgttcttggctcgccgagctgcagcagtggctcaagccaggcctcaaggtactgagcattgcccaagcacactcgcctgccttttcctgcgaacaggttcgcgccttcccggcccttaccagcctagacctgtctgacaatcctggactgggcgaacgcggactgatggcggctctctgtccccacaagttcccggccatccagaatctagcgctgcgcaacacaggaatggagacgcccacaggcgtgtgcgccgcactggcggcggcaggtgtgcagccccacagcctagacctcagccacaactcgctgcgcgccaccgtaaaccctagcgctccgagatgcatgtggtccagcgccctgaactccctcaatctgtcgttcgctgggctggaacaggtgcctaaaggactgccagccaagctcagagtgctcgatctcagctgcaacagactgaacagggcgccgcagcctgacgagctgcccgaggtggataacctgacactggacgggaatcccttcctggtccctggaactgccctcccccacgagggctcaatgaactccggcgtggtcccagcctgtgcacgttcgaccctgtcggtgggggtgtcgggaaccctggtgctgctccaaggggcccggggctttgcctaagatccaagacagaataatgaatggactcaaactgccttggcttcaggggagtcccgtcaggacgttgaggacttttcgaccaattcaaccctttgccccacctttattaaaatcttaaacaacgggtcaaaaaaaaaaaaa

SEQ ID NO: 241 - DNA, 2897 bp, Homo sapiens
taaacccatctcctcctatgccacctgcctgggcccctcctgggactttatcactgtgccacactttttggaactactggttagaaggtgagtgtccatccccctccaagacacagaggtgcctctgtcccctactggctctgtcttgaagatgcacctctcggagcctcggttggctcctctggaacagggagtagtgagaagacgaacctcacagggttcttgtagggactcaatgatctaagacacagcaaacaaaggggtccctagagcctaaaactctggaaaatctgctgggggtgctgtgattcatgtttgttacttttctcttccccctcacttgaagcagctctcagcattctgcctcaatggcctgtatcactcactgtttggaaaaacacatagaaaccaagtctgcgatggcactggtaaaggatgtctgagattccttctggctggtctttctccttgacacagacagaagaggggtcccttggtgctgaaaaaggagccacaggcccactcagacatctggagaggctcactggggttctccaaaggttggggttcactcattcaacacatacattcaaaacacctcatttgtgcatcgctcttcttggggcttggcataatttcataaacaaagcagatgacaatcccccggccttgattctactcagagtcaggcactcacagtagacagaataaacaagtcatatctacagaatgttacaggtgagaccctcatggcctcctctacgtatggtggcatcctcccagattctgactagaatgacgcagcccagcaacaaatataaactgggtggatttagggttctgaagggccttttcacccacaaaacatgggggaaaatatgtggactctggctggggagagactaaaggagctctggggctcatacttcttataattcccacgagaaggctgacatctggggacttcccccacaagaggcaaatagtgagttctgtaaatggagacttaggtcccctgcaaagcagaggggaggctggggtcacagctggccactgagagacccatccccctcagcaccgtggcttcccagctctccctgtcctcctccccccgacatctgccccttccctcctaaccccaggaccaggggacccagatctggagctttgatgaggaagctgctcacaaatctgcctgcagctgcagtcttgagtgcccaggtgtacagtgctgtgctccagggcctttgggaagagaatgtctgtgggacgccagggcgcacgagggtctgtacagccctgctgtatggccaggtctgccccttccaggacagcactgatggcttacgcaccatcacctccattttgttcaactggccccccgaaaacacttcagtttactatcagcccccgcaacggtcatctttccggataaagctggccttcaggaacctctcctggcctggactgggcttggaggaccatcaggaaattgtcctaggccagttggtgcttccggagcccaacgaggccaagccagatgatcctgctccacgtcctgggcaacacgcattaacaatgccggccctggagccagcaccaccactgctggcggacctggggcctgctctggagccagagtcacctgcagccctgggtccaccaggatatctacattcagcaccagggccagcaccagcaccaggggaagggccccctccagggacagtgctggagccacagtcagccccagagtcctcctgtccctgtcgtgggtctgtaaagaaccaacccagtgaggagctgcctgacatgacgaccttccctcccaggctgctggcagagcagctgaccctcatggatgcggagctgttcaagaaggtggtgctccacgaatgcttgggctgcatctggggccaaggacatctgaaggggaatgagcacatggcacccacagttcgtgccaccatcgcacacttcaacaggctcaccaactgcatcaccacctcctgcctcggggaccacagcatgagggcccgggacagggccagggtggtggagcactggatcaaggtggccagggagtgcctaagcctcaacaacttctcctcggtgcacgtcatcgtctctgctctgtgcagcaacccaataggtcagctacacaagacgtgggcaggagtgtccagcaaaagcatgaaagagctaaaagaactctgcaaaaaagacactgcagtgaagagggacctactgatcaaggcggggagctttaaggtggccacccaggagaggaacccccagagagtccagatgaggctgcggaggcagaagaagggtgtggtccccttcctgggggattttctgactgagttacagaggctggattcggccatcccggacgacctggatggcaacaccaacaagaggagcaaggaggtccgagttctgcaggaaatgcagctgctccaagtggctgccatgaattacaggcttcggcctcttgagaaatttgtcacctatttcacaagaatggagcagctcagtgacaaagagagctacaagctgtcctgccagctggagcccgaaaacccgtaggctggcaacatcctgcagtggctgggaacccaccgggatgctggccagaacaccggctctgcaccatccctcacccagaccgtagacaccagggaaccacatctaggaggctggcagctcagctgcatcttgccctggatcctcatcaccaactgctcctgctggccaggatcaggccatgggacttttgtgagtcaggcgggagaccattttatgtttattttctttagtgtataagtaagggttttttcttaactttcgttaaaataaaattttaaaaaactattcaaaataaaaaaaaaaaa

SEQ ID NO: 242 - DNA, 3334 bp, Homo sapiens
gttgtgccggggaacccgcggttggtggacgcgcgagcgtccttgctgctaagtacgctagtgggggcggtgcgcgtgcgcgtgcgcggccgcaaagcggggcgggaggaaacgagtgcgttttcctcttaggcggcgccattttgtgttcagagccgctatagctgccggcggtgtgcgactgagtcggtggcgaagacgggaacgcgacgatggcggagactctgcccgggtcgggcgactcgggccctggcacggcttctctcggcccgggcgttgcggagactgggacgaggcggctcagcgagctgcgggtgatcgatctgcgggcggagctgaagaagcggaacctggacacgggcggcaacaagagcgtcctgatggagcggctcaagaaggcggttaaagaagaggggcaagatcctgatgaaattggcatcgagttagaagccaccagcaagaagtcagccaagagatgtgttaaaggactgaagatggaggaggaaggcacagaagataatggcctggaagacgattccagagacgggcaggaggacatggaagcaagtctggagaacctgcagaatatgggcatgatggacatgagtgtgctagacgaaactgaagtggcgaatagcagtgctccagattttggggaggatggcacggacggccttctcgattccttttgtgatagtaaagaatacgtggctgcacagctgagacagctcccggctcagcccccagagcatgctgtggatggggaaggatttaagaacactttggaaacttcatcgttgaacttcaaagtaactccggacattgaagaatcccttttggagccagaaaatgagaaaatactcgacattttgggggaaacttgtaaatctgagccagtaaaagaagaaagttccgagctggagcagccatttgcacaggacacaagtagcgtggggccagacagaaagcttgcggaggaagaggacctatttgacagcgcccatccggaagagggtgatttagatttggccagcgagtcaacagcacacgctcagtcgagcaaggcagacagcctgttagcggtagtgaaaagggagcccgcggagcagccaggcgatggcgagaggacggactgtgagcctgtagggctagagccggcagttgagcagagtagtgcggcctccgagctcgcggaggcctctagcgaggagctcgcagaagcacccacggaagccccaagcccagaagccagagatagcaaagaagacgggaggaagtttgattttgacgcttgtaatgaagtccctccggctcctaaagagtcctcaaccagtgagggcgctgatcagaaaatgagctcttttaaggaagaaaaagatataaagccaatcattaaagatgaaaaaggtcgggtcggcagcggttctggtcggaacctgtgggtcagcgggctgtcctccacaacacgcgctacggatctcaagaaccttttcagcaagtatgggaaggttgtcggggccaaagtggtaacgaacgcccgcagcccgggggctcgatgctatggattcgtcaccatgtcgacatctgacgaggcgaccaagtgcatcagccatctccacagaactgagctgcatggacgaatgatctccgtagagaaggccaaaaatgagcctgctgggaaaaagctttccgacagaaaagagtgcgaagtgaagaaggaaaaattatcgagtgtcgacagacatcattctgtggagatcaaaattgaaaaaactgtaattaagaaggaagagaagattgagaagaaggaggaaaaaaagcctgaagacattaagaaggaagaaaaagaccaggatgagctgaaacccggacctacaaatcggtctagagtcaccaaatcaggaagcagaggaatggagcggacggtcgtgatggataaatcgaaaggagagcccgtcattagcgtgaaaaccacaagcaggtccaaagagagaagctccaagagtcaggatcgcaagtcagaaagcaaagaaaagagagacatcttgtcgtttgataaaatcaaagaacaaagggagagagagcgccagaggcagcgggaacgggagatccgcgaaacggagaggcggcgggagcgcgagcagcgggagcgggagcaacgcctcgaggccttccatgagcggaaggagaaggcccggctacagcgggaacgcctgcagctcgagtgccagcgccagcggctggagcgggagcgcatggagcgggagcggctggagcgcgagcgcatgcgcgtggagcgtgagcgcaggaaggagcaggagcgcatccaccgcgagcgcgaggagctgcggcgccagcaggagcagctgcgttacgagcaggagcggcggcccgggcggaggccctacgacctggaccgacgagatgatgcctattggccagaaggaaagcgtgtggcaatggaggaccgatatcgtgcagactttccccggccagaccaccgctttcacgacttcgatcatcgagaccggggccagtaccaggaccacgccatcgacaggcgggagggttcgaggccaatgatgggagaccaccgggatgggcagcactatggagatgaccgccatggccacggaggacccccagagcgccacggccgggactcccgtgatggctgggggggctacggctccgacaagaggctgagtgaaggccgggggctgccccctccccccaggggtggccgtgactggggagagcacaaccagcggctagaggagcaccaggcacgcgcctggcagggtgccatggacgcaggcgcggctagccgggagcacgccaggtggcaaggtggcgagaggggcctgtctgggccctcggggccggggcacatggcaagccgcggtggagtggcggggcgaggcggctttgcacaaggtggacattcccagggccacgtggtgccaggtggcggactggaaggtggcggagtggccagccaggaccggggcagcagagtccctcacccacaccctcatccccccccgtacccccacttcacccgccgctactaagtcccactcgctgcgagttttcgggtgggcagacgcactgttgaatctggtagccagggttccctcgaacttgggggatctttttaaaagcaaagtaaatcctgccaccatgttgtagctcaatacaatgtgaactcactttttttttttttttaaataaatgtgttcttgttctgccatttttaaatcaaggtttctgttaacgaggcattccattttccattaataaagtttaccattcgcaaaaaaaaaaaaaaaaa

SEQ ID NO: 243 - DNA, 104 bp, Homo sapiens
atccttttgtagttcatgagcgtgatgattgggtgttcatacgcttgtgtgagatgtgccacccttgaaccttgttacgacgtgggcacattacccgtctgacc

SEQ ID NO: 244 - DNA, 5243 bp, Homo sapiens
agcgtgagactcgcgccctccggcacggaaaaggccaggcgacaggtgtcgcttgaaaagactgggcttgtccttgctggtgcatgcgtcgtcggcctctgggcagcaggtttacaaaggaggaaaacgacttcttctagatttttttttcagtttcttctataaatcaaaacatctcaaaatggagacctaaaatccttaaagggacttagtctaatctcgggaggtagttttgtgcatgggtaaacaaattaagtattaactggtgttttactatccaaagaatgctaattttataaacatgatcgagttatataaggtataccataatgagtttgattttgaatttgatttgtggaaataaaggaaaagtgattctagctggggcatattgttaaagcatttttttcagagttggccaggcagtctcctactggcacattctcccattatgtagaatagaaatagtacctgtgtttgggaaagattttaaaatgagtgacagttatttggaacaaagagctaataatcaatccactgcaaattaaagaaacatgcagatgaaagttttgacacattaaaatacttctacagtgacaaagaaaaatcaagaacaaagctttttgatatgtgcaacaaatttagaggaagtaaaaagataaatgtgatgattggtcaagaaattatccagttatttacaaggccactgatattttaaacgtccaaaagtttgtttaaatgggctgttaccgctgagaatgatgaggatgagaatgatggttgaaggttacattttaggaaatgaagaaacttagaaaattaatataaagacagtgatgaatacaaagaagatttttataacaatgtgtaaaatttttggccagggaaaggaatattgaagttagatacaattacttacctttgagggaaataattgttggtaatgagatgtgatgtttctcctgccacctggaaacaaagcattgaagtctgcagttgaaaagcccaacgtctgtgagatccaggaaaccatgcttgcaaaccactggtaaaaaaaaaaaaaaaaaaaaaaaaaagccacagtgacttgcttattggtcattgctagtattatcgactcagaacctctttactaatggctagtaaatcataattgagaaattctgaattttgacaaggtctctgctgttgaaatggtaaatttattattttttttgtcatgataaattctggttcaaggtatgctatccatgaaataatttctgaccaaaactaaattgatgcaatttgattatccatcttagcctacagatggcatctggtaacttttgactgttttaaaaaataaatccactatcagagtagatttgatgttggcttcagaaacatttagaaaaacaaaagttcaaaaatgttttcaggaggtgataagttgaataactctacaatgttagttctttgagggggacaaaaaatttaaaatctttgaaaggtcttattttacagccatatctaaattatcttaagaaaatttttaacaaagggaatgaaatatatatcatgattctgtttttccaaaagtaacctgaatatagcaatgaagttcagttttgttattggtagtttgggcagagtctctttttgcagcacctgttgtctaccataattacagaggacatttccatgttctagccaagtatactattagaataaaaaaacttaacattgagttgcttcaacagcatgaaactgagtccaaaagaccaaatgaacaaacacattaatctctgattatttattttaaatagaatatttaattgtgtaagatctaatagtatcattatacttaagcaatcatattcctgatgatctatgggaaataactattatttaattaatattgaaaccaggttttaagatgtgttagccagtcctgttactagtaaatctctttatttggagagaaattttagattgttttgttctccttattagaaggattgtagaaagaaaaaaatgactaattggagaaaaattggggatatatcatatttcactgaattcaaaatgtcttcagttgtaaatcttaccattattttacgtacctctaagaaataaaagtgcttctaattaaaatatgatgtcattaattatgaaatacttcttgataacagaagttttaaaatagccatcttagaatcagtgaaatatggtaatgtattattttcctcctttgagttaggtcttgtgcttttttttcctggccactaaatttcacaatttccaaaaagcaaaataaacatattctgaatatttttgctgtgaaacacttgacagcagagctttccaccatgaaaagaagcttcatgagtcacacattacatctttgggttgattgaatgccactgaaacattctagtagcctggagaagttgacctacctgtggagatgcctgccattaaatggcatcctgatggcttaatacacatcactcttctgtgaagggttttaattttcaacacagcttactctgtagcatcatgtttacattgtatgtataaagattatacaaaggtgcaattgtgtatttcttccttaaaatgtatcagtataggatttagaatctccatgttgaaactctaaatgcatagaaataaaaataataaaaaatttttcattttggcttttcagcctagtattaaaactgataaaagcaaagccatgcacaaaactacctccctagagaaaggctagtcccttttcttccccattcatttcattatgaacatagtagaaaacagcatattcttatcaaatttgatgaaaagcgccaacacgtttgaactgaaatacgacttgtcatgtgaactgtaccgaatgtctacgtattccacttttcctgctggggttcctgtctcagaaaggagtcttgctcgtgctggtttctattacactggtgtgaatgacaaggtcaaatgcttctgttgtggcctgatgctggataactggaaaagaggagacagtcctactgaaaagcataaaaagttgtatcctagctgcagattcgttcagagtctaaattccgttaacaacttggaagctacctctcagcctacttttccttcttcagtaacaaattccacacactcattacttccgggtacagaaaacagtggatatttccgtggctcttattcaaactctccatcaaatcctgtaaactccagagcaaatcaagatttttctgccttgatgagaagttcctaccactgtgcaatgaataacgaaaatgccagattacttacttttcagacatggccattgacttttctgtcgccaacagatctggcaaaagcaggcttttactacataggacctggagacagagtggcttgctttgcctgtggtggaaaattgagcaattgggaaccgaaggataatgctatgtcagaacacctgagacattttcccaaatgcccatttatagaaaatcagcttcaagacacttcaagatacacagtttctaatctgagcatgcagacacatgcagcccgctttaaaacattctttaactggccctctagtgttctagttaatcctgagcagcttgcaagtgcgggtttttattatgtgggtaacagtgatgatgtcaaatgcttttgctgtgatggtggactcaggtgttgggaatctggagatgatccatgggttcaacatgccaagtggtttccaaggtgtgagtacttgataagaattaaaggacaggagttcatccgtcaagttcaagccagttaccctcatctacttgaacagctgctatccacatcagacagcccaggagatgaaaatgcagagtcatcaattatccattttgaacctggagaagaccattcagaagatgcaatcatgatgaatactcctgtgattaatgctgccgtggaaatgggctttagtagaagcctggtaaaacagacagttcagagaaaaatcctagcaactggagagaattatagactagtcaatgatcttgtgttagacttactcaatgcagaagatgaaataagggaagaggagagagaaagagcaactgaggaaaaagaatcaaatgatttattattaatccggaagaatagaatggcactttttcaacatttgacttgtgtaattccaatcctggatagtctactaactgccggaattattaatgaacaagaacatgatgttattaaacagaagacacagacgtctttacaagcaagagaactgattgatacgattttagtaaaaggaaatattgcagccactgtattcagaaactctctgcaagaagctgaagctgtgttatatgagcatttatttgtgcaacaggacataaaatatattcccacagaagatgtttcagatctaccagtggaagaacaattgcggagactacaagaagaaagaacatgtaaagtgtgtatggacaaagaagtgtccatagtgtttattccttgtggtcatctagtagtatgcaaagattgtgctccttctttaagaaagtgtcctatttgtaggagtacaatcaagggtacagttcgtacatttctttcatgaagaagaaccaaaacatcgtctaaactttagaattaatttattaaatgtattataactttaacttttatcctaatttggtttccttaaaatttttatttatttacaactcaaaaaacattgttttgtgtaacatatttatatatgtatctaaaccatatgaacatatattttttagaaactaagagaatgataggcttttgttcttatgaacgaaaaagaggtagcactacaaacacaatattcaatcaaaatttcagcattattgaaattgtaagtgaagtaaaacttaagatatttgagttaacctttaagaattttaaatattttggcattgtactaataccgggaacatgaagccaggtgtggtggtatgtgcctgtagtcccaggctgaggcaagagaattacttgagcccaggagtttgaatccatcctgggcagcatactgagaccctgcctttaaaaacaaacagaacaaaaacaaaacaccagggacacatttctctgtcttttttgatcagtgtcctatacatcgaaggtgtgcatatatgttgaatgacattttagggacatggtgtttttataaagaattctgtgagaaaaaatttaataaagcaacaaaaattactcttaaaaaaaaaaaaaaa

SEQ ID NO: 245 - DNA, 1602 bp, Homo sapiens
gggcgggcgcggccagagcaagtgccaggcgggaacagagggactgggcgcgcctcacaactcaccacctcgcccgctggtccttcctggctcgcctggctctgaagctgcacctggaggggaaacctcagaacagtaggcgggattgcctagtaaatatctcccattcagggaggcccaggtcgtgtgacgtcgacagttgctgggtagatgaggccaacacaggttgcaagaagaggcggggtttagaggcgtgaaactccgcagtgctcagccaagcagggagcaacgctaggaagggcgggcagaaagggcacgctcttgtgggtgactacaggttaggagaccgttgaacctggaggggccctaggatggaccccgtggaaagattcagagactgcgccctctccctggcgccgccttcccctacacgcggcgggtatattctgttgcagttggcccaggacctgtttccaagactctgccccctcgcacttccgtccctcctggttttgtaaagtgatgctcataggaacccccaccccgcgtgacactactcccagctcctggctgacttctagtcttctggttgaagctgcgcctttagatgacacgaccctacccacccctgtttccagcggatgcccgggcctggagcccacagaattcttccagtccctgggtggggacggagaaaggaacgttcagattgagatggcccatggcaccaccacgctcgccttcaagttccagcatggagtgattgcagcagtggattctcgggcctcagctgggtcctacattagtgccttacgggtgaacaaggtgattgagattaacccttacctgcttggcaccatgtctggctgtgcagcagactgtcagtactgggagcgcctgctggccaaggaatgcaggctgtactatctgcgaaatggagaacgtatttcagtgtcggcagcctccaagctgctgtccaacatgatgtgccagtaccggggcatgggcctctctatgggcagtatgatctgtggctgggataagaagggtcctggactctactacgtggatgaacatgggactcggctctcaggaaatatgttctccacgggtagtgggaacacttatgcctacggggtcatggacagtggctatcggcctaatcttagccctgaagaggcctatgaccttggccgcagggctattgcttatgccactcacagagacagctattctggaggcgttgtcaatatgtaccacatgaaggaagatggttgggtgaaagtagaaagtacagatgtcagtgacctgctgcaccagtaccgggaagccaatcaataatggtggtggtggcagctgggcaggtctcctctgggaggtcttggccgactcagggacctaagccacgttaagtccaaggagaagaagaggcctagcctgagccaaagagagagtacgggctcagcagccagaggaggccggtgaagtgcatcttctgcgtgttctctatttgaacaagcatttcccccagggaagtttctgggtgccccactaagtagaataaagaaaaacggttataaataaaaaaaaaaaaaaaaaaaa

SEQ ID NO: 246 - DNA, 5415 bp, Homo sapiens
gctctgtcagtaacacatgtgtaagagccgcggagggagcgagcgagccggctagaggccagcgccgccgccgccgccgcctccgagccgggcagcaacagccccggcagcggcgcaggctccagcgcgccgggcccggccggccgcagcccccgacgcctgggtgcgcctgcctgccggcctccgcaccgtccgccgccgctcccggggctgttgtgtctgcgactgctcccggccggaggtgcagggagctcagccgagccgccgctgccatcccggagcgagcaagcgagcgagcgcgcgggagggaggaaggcggcggcggaggaggaggaggagcgggaggagcgcgggcgggggcgggggcccccgggcgggggaatatacaaagtgaagccacattgccaaacttgcagcagcgattgcagcagttgctgccgctgcgccgcgcctgaagccgcgccgcgcgggccgagggctcctgcagctgctcgcgcgcagtcggaggcggagaaggacgaagactgagactgacacttctgctcccggccgcccggcacttacgcgggggccccccaacccgccccagagcaacgcgatttaaaaaaaaaaaaaaagccgcccttagccccctcctcccctttcctgcttctgcgagaactccctccctccctccagctccgccagcccaggcgccccttccctggaagccgagcggcttcgctcgcatttcaccgccgccgcctctcgcaatattgcaatataggggaaaagcagaccatggtgaatccgggcagcagctcgcagccgcccccggtgacggccggctccctctcctggaagcggtgcgcaggctgcgggggcaagattgcggaccgctttctgctctatgccatggacagctattggcacagccggtgcctcaagtgctcctgctgccaggcgcagctgggcgacatcggcacgtcctgttacaccaaaagtggcatgatcctttgcagaaatgactacattaggttatttggaaatagcggtgcttgcagcgcttgcggacagtcgattcctgcgagtgaactcgtcatgagggcgcaaggcaatgtgtatcatcttaagtgttttacatgctctacctgccggaatcgcctggtcccgggagatcggtttcactacatcaatggcagtttattttgtgaacatgatagacctacagctctcatcaatggccatttgaattcacttcagagcaatccactactgccagaccagaaggtctgctaaaaggtcagagtaatgcagaatgcgtgccttcatctcagatttgttcatcacaggtggatcccatgtgtcttcagtagacaagtcacctttgtagctagcaccagtgccagctccatgccattgcaccttctttagtcttgattgcccttcccgcatttattggtgtattaaaatgactgaatatgaacattaaggactccatgaacctgggctaatgggagactgtagagaaaatgaaaaaagatccaccagaggacatcttggggagggggagggagctgggggggagggaaatgactaatgaagctaattaaaagaagcattcaaatctgctttctaccctcattaacaattagcagggcactggccagagtttgtaccctgtgttttaccttaacaacattctatttgctctttgtatatttaagtgttgtaaggaaacgtgtttcaatcaaaactgaccatgagataaaggaaagagatgtggcttttgtgatattctatcacaaacacttattgtatctctgtaaaatacaatgtatgtatgcatgtaagtgtttttgtcctaatgttgctactcccatggcaaagaaaaaaaaaagaatgaaaaaaagaaaaaaatttggaaaaaaaaatcaggctcatagcagctactgtgtagaaaattccccctacttctaatttgctgaatgaagaaaaaaaaaaatcttttatttgtgatattttcagagacatttgctctagtatggtgtatttaaataataaaaacttaaaagaaaaaatatttaatggtgtttgggtttaaacactgctttttctcttctgtattttgaagaaatttagtttttattgttgttgaataacaagctcactttaaatttgaaggagttgagggaggtggagtgtatatttatttagctctgggccagtaaggtattcttcaaattacttaaccacgccattattggcaggggtacaaagtagtttctaacagggtcctttctataagtcaagaatattctgttaacagcatttcgttacacttctatatcacagtaagtcttttgtgtttataaatacttgagtgtccactattttgtttattctttttctcaatagcaaacaaagccttgggtattgatgaaaagtatgtataaaaaaaaatacggcacaaccatcctgttctcttattgagtttatagcttttgaaggaagtcacaatttctaagtcatacctgtacatattttgaagctcacttagttgtagggacccagagctctttttttatggtgatctttgattggtgaagtagccatttcctggtgacccttaggctcgtgtggttggctgtaaggtgtttattttgttttgctcctacacttctttactgactgcgtttccgtatgtattttgggggaagattctgacttcatttagtcttagtcttgagatactgagttgctggttgcaggcagcagagtgtccaccacagtgcctgcactgcccgcagagctgccctccggaaagcatgcagtataacagctagtgctggaaggaggaaaaccaaataggcctggaggctgaggttgtactgccagcttccttagatgtgagcaaatttcaactacaacttccatcacaggctaataaaaccaggtgtgtgaacgctactattttaaattttcttttttaagatggcattttattttgttccagaaaagcgcctgatgtagaccctccctctgagaatagccgtggagccatgtagagaggtgtagctcagcacatctcaactaccagtcagcttccctttgagaacttctgtgctcacttcctgttttcagagattccagggcaggggaaaaaaaaaatcagttgaacttcaaacctcctagaggagattgtaaaggcatagagttgaggtgaatagttttgttagaaccttataaaaataaaatgcaagaaaataatatgaagaaatcacatatatatgtttgaattagatgtctgtttgaattagatccttggggaatttcttcaaactagttctggttcttatatttgttttttttcctttaaggaactttctgaaggaagttagactgcgatggtaaagggggaaatgggttaatgagattgcaggcattttctatattctttttggcataagcacttatgtccctgatatgtacaaattcaaaggaggtggttaataactttagtaaataatatattgtcgcatttaatgatgtggagggctaaggtcattacggactttaaataaactattatatggctggttcctcaagcactgctgcgtatttaataatgagcttctaaaagcatttcttaagttgcagacctataagattacaaatgtcactcatgttagtataatccacatgcaagtgatgaagccttctctttgatgtgctaaattggagaaggactaatggagctatgaatatacaatagaacatatttaagtagtagtcttgctttaggtaaaacactttcttgaaaccagaggcatttcaaacaataaaacccggctctaatggggatgctctgtgtggatagaaagctactaaaaacactcaggtttattctgatgtgagcagcgattgtgtgcagttcctcccccaatctcaacattgcttaggaaaaaaaaaaatctatgagtttattccacctttcatccattgcatttgtgatgttattagttagcaagatggacactgttctttagaaaggacttatttaatattaaccacgtcatagagcaagatggcccccagtccctacaagcaagtgcaattaaaaataaaagcaaatgttactgagccctgctgaactcctgataaaaaaaattatgtttatggtacatataaatgtctcaatcatgcaaattgtcactcttgttaatgaaacaattttgtaaaaagatagtcctctaaaagggtttaatgttttttacctatctaactgtctaattagatttacacatcccgcaaggcaggggagcctgaagcttttccaaaccaaatcgtttgccactagaaactattttcagctcttcatgatttattaggaaatagtttaacccggactgtagtgtcttataaaatacaaaacgagaaaactgacacaccaaaatgaagtctgtgaaattgtcatcctcttaatattacctgtatttaaattctttcttttgcccttattaacactgatatttgaaacaactaatcatctaaaaggaagctcttaaagggctttaaatgtcaatatagtaagattctaatgtgcactactatttatataaaatatttcttagggcccataaatcatataataaacagtgaacccaagagctacatatggagtctagtgaagagttcccatgtagcctaactaattgtatttaaattgaggagatccaaaaaccccatcacccttcaccccaaagaccccttcacccttcaccagggaattctatcctgggtgctgtcccacctatgaccccttcaagaggccattggaaaaaggccatttacaagttaatgttacttatagctttgttactaagactcacctattgttagtgcagccaagtcacagaagtgcttattgcagttaaatagcaatttgtttccatgaaactgcaattaaagtattactgagcagccattttagattggcagtgctctgaacgcatgttaaacagccagctactcccacttgcagagtctgagatctgactagcagcaaagtgtagcacattcgccgatgctgggtacctagttaaagaggcatttgtagccctctgctcccatcgtgaacatgctgagagcaatgacaagtcagggctgatttttggaaggtgaacttgcaacttacctcaagtgaatactgttttcagttgtgcaagaagtgctttatgctagtagatatgtgcatgtttcctagagggaatgttttcaagttcagattgattctgctgagaatggacggcaactcggaggcctcaagccaataatgtactacaggccctgacatgttacagctgtgtaaacagggccattctatttcctaaatcacaactaataaagcagaggatgaaaatcaaaaaaaaaaaa

SEQ ID NO: 247 - DNA, 4713 bp, Homo sapiens
ggaaatctggcattttttaaagtttgcgccccacaaagaggaaatattccaaaggtactcaggatgtaaaaggggagatcttcacagatgcctccgtggatggcatggcaatccatccatcaatgagaagaccatgatttcttttaattttctgtgtgtttccacattccccagtgagaattcttccacctttttttgtgccatgggaaaaacctgaagggcaggcagagctgctcccgaacttgtgaccttctctgaggttgcagcggctcttgtagaacatgactctgggacatcacttccttttgttttctttcggagctgaaccaaagaatgtgcaccctctttctctagtgctgtggtgtctgcttatttttgtatttgtgctttccatccatcttctgtgatcacaaggcattcttaaggttttctagcacgacttgcggacatccagactcgtggggggcccacccatggctcggtaagccagcagcccagggcactggcactaccatgaggcactgcattaattgctgcatacagctgttacccgacggcgcacacaagcagcaggtcaactgccaagggggcccccatcacggtcaccaggcgtgccccacgtgcaaaggagaaaacaaaattctgtttcgtgtggacagtaagcagatgaacttgcttgctgttctcgaagtgaggactgaagggaacgaaaactggggtgggtttttgcgcttcaaaaaggggaagcgatgtagcctcgtttttggactgataataatgaccttggtaatggcttcttacatcctttctggggcccaccaagagcttctgatctcatcacctttccattacggaggcttccccagcaaccccagcttgatggacagcgaaaacccaagtgacacaaaggagcatcaccaccaatcctctgtaaataatatttcatacatgaaggactatccaagcattaaattaattatcaacagcatcacaactaggattgagttcacgaccagacagctcccagacttagaagaccttaagaagcaggagttgcatatgttttcagtcatccccaacaaattccttccaaacagtaagagcccctgttggtacgaggagttctcggggcagaacaccaccgacccctacctcaccaactcctacgtgctctactccaagcgcttccgctccaccttcgacgccctgcgcaaggccttctggggccacctggcgcacgcgcacgggaagcacttccgcctgcgctgcctgccgcacttctacatcatagggcagcccaagtgcgggaccacagacctctatgaccgcctgcggctgcaccctgaggtcaagttctccgccatcaaggagccacactggtggacccggaagcgctttggaatcgtccgcctaagagatgggctgcgagaccgctatcccgtggaagattatctggacctctttgacctggccgcacaccagatccatcaaggactgcaggccagctctgcaaaggagcagagcaagatgaatacaatcattatcggggaggccagtgcctccacgatgtgggataataatgcctggacgttcttctacgacaacagcacggatggcgagccaccgtttctgacgcaggacttcatccacgcctttcagccaaatgccagactgattgtcatgctcagggaccctgtggagaggttgtactcagactatctctactttgcaagttcgaataaatccgcggacgacttccatgagaaagtgacagaagcactgcagctgtttgaaaattgcatgcttgattattcactgcgcgcctgcgtctacaacaacaccctcaacaacgccatgcctgtgaggctccaggttgggctctatgctgtgtaccttctggactggctcagcgtttttgacaagcaacagtttctcattcttcgcctggaagatcatgcatccaacgtcaagtacaccatgcacaaggtcttccagtttctgaacctagggcccttaagtgagaagcaggaggctttgatgaccaagagccccgcatccaatgcacggcgtcccgaggaccggaacctggggcccatgtggcccatcacacagaagattctgcgggatttctacaggcccttcaacgctaggctggcgcaggtcctcgcggatgaggcgtttgcgtggaagacgacgtgagagctgaattgttgctgcacgtgctgggcccgccaatgccgtcatcatcaggattttacaaatctctttgcggggaactgtttcactcatggtatggaaaaccccaggactctgccactctaggcacacatgaattataaccattttggaatttccttcgtgatgttcgagagctcagcaatggacccctcacagagctcctctatccgaggccattggagaccccagtttctcaagaattcagctctgctctgagcgtcctggagcttggggatgcagccagctggcctgcactgggtgtggagagaacacctagggaaggcagcctggccctgcccgcctccgccttctggagagcctctgggttctgagtcagcaagccagaggtcatgccacaggcctggctggaacttacacttcacgttccctttttttccccctagagatggggtctcgccgtgttgcacagactgtctgtattcaatggctatcttcacaggtgtgatcataccacattcacttctgaaacactcttgttgcgatcgctaacctcactgggacagagaaccgcagtctttcgagaatggaggctcttcattttttttttctcctttactccaaactcagccctccagtttcttcagatgtaaaccctgttaacgtcactgtttccaaaaggaaaaaaataagtcagtttttggcagcaccttcatctttctgacctcctcctattctgtccttgtggacttatgtttaacatagaaaatgaatgcgtttaaaacaaaaccactttctgcatttaaccagtcctggctctctctctgctgcctcttcatacgttttctcaagaacttcagtttataattggaagagaaatttttgctgttaatgccagaatgagcaacctcaaggaattgaacacttcttggaaaatctaggtaattcaagccctcatcaggtttacaagatcatcagagaaacagaggattttaatttttagttctggccggctacaggctccatttctctgccttcccattggaaatagtttatttccacattctccactgcgtgtggtcaaagttcctcacccagcaagggactatagatactcgtgtcccaattccaaaacacaatgcacaagctgaacttgggctgaacgtggcgtgttgagatttggaatgaggtttctaagagccgtgttcttcatggaattttccaggccacttggcagcttggtttaccgatggatgggctagagatcttgtcgtttcttggaagtcacagggaagattgaagagaacgcttgagcatccttggcaacagcccaggtgggacctggatgaagctttgcactcaagtattgtcaagggaagcttcctgtgaaccaaagttctcaggccaaggtctcgcccaccaaagccagaaagtgcaagcacccgtctacccagctctaacttgtatgtgtgagacagaccaggcttcgggggtaggaggatctgcagttgttcagccgtctttctgctggtgttgtctttctgccatcagagaagggacacacagcccgttcgaaggtgtgcagagggctctgagcgccaggatggccagggctgtttttgctactgaaggagcgtgtgtcctgaactcccacttgcagggacagtccccaccttctctatagccggcactgggagcagccgccagcagggaaatctggcctgagcacaaggatgctttagggagagatcacttcagtgtgtgtgtatatttatttgcagtacagtgcgcgcgtgtgtgtgtgtgtacgcgcacgtgtgggtgagtgcgtcttctgagtgggttctgttcagttgctaatgaggctcctccgctctggacacaacccttttatagattaatttctctgccaattaacttgtcattttcagtacatattttactattccacaccaaccataattacaacaagggatttttcttatgcactcctatgcatgtgaataacatgtggtgtaattctgcttcttacagaagtattactgaaggtattatttccaatattatttggtttattatgcggatcttttttatatatgcagtcccatcccttctgtgccactcaatgccatccagacatggtttttccctccaggggcctttctctccagagggcacttcggctgcctctgcttcctctcattcgaggcccggctcttgctgacagaataggttccgttctgggcggtggttctcgagcctgccattcaaaaccaaagcaaattggagcatttctcacaacatggtattgaagttcctttttgttctcaaaagttgtgaccgtgttaaattgtactcccttagtcctgtaaggtatgttaagtgaatcgcagttacgctgtacttttattaatatttaacataattaaagatggacccataagagtgacgcctgtggagcgcgtgctcttcctctgcagccaaaaaaaaaaaaaaaaaaaaaaaaaaaaaaaaaaa

SEQ ID NO: 248 - DNA, 3106 bp, Homo sapiens
agacagccagttcctctcccgccgcgccgggccgcgctgccgctcgctccccggccgtggcgcctccgggccagacgcgctgcagcctccagcccgcggcaagcggggcggccgcgccacccccggccccgcgccagcagcccctcgccgcgcgtccagcgttcccggccagcagcctccccatacgcaggtcctgctgggccgccccgtcgcgccccccactctgaactcaagtcaccgtggagctccgccgccccgaaactttcaccgcgagcgggaaatatgggatgtataaaatcaaaagggaaagacagcttgagtgacgatggagtagatttgaagactcaaccagtacgtaatactgaaagaactatttatgtgagagatccaacgtccaataaacagcaaaggccagttccagaatctcagcttttacctggacagaggtttcaaactaaagatccagaggaacaaggagacattgtggtagccttgtacccctatgatggcatccacccggacgacttgtctttcaagaaaggagagaagatgaaagtcctggaggagcatggagaatggtggaaagcaaagtcccttttaacaaaaaaagaaggcttcatccccagcaactatgtggccaaactcaacaccttagaaacagaagagtggtttttcaaggatataaccaggaaggacgcagaaaggcagcttttggcaccaggaaatagcgctggagctttccttattagagaaagtgaaacattaaaaggaagcttctctctgtctgtcagagactttgaccctgtgcatggtgatgttattaagcactacaaaattagaagtctggataatgggggctattacatctctccacgaatcacttttccctgtatcagcgacatgattaaacattaccaaaagcaggcagatggcttgtgcagaagattggagaaggcttgtattagtcccaagccacagaagccatgggataaagatgcctgggagatcccccgggagtccatcaagttggtgaaaaggcttggcgctgggcagtttggggaagtctggatgggttactataacaacagtaccaaggtggctgtgaaaaccctgaagccaggaactatgtctgtgcaagccttcctggaagaagccaacctcatgaagaccctgcagcatgacaagctcgtgaggctctacgctgtggtcaccagggaggagcccatttacatcatcaccgagtacatggccaagggcagtttgctggatttcctgaagagcgatgaaggtggcaaagtgctgcttccaaagctcattgacttttctgctcagattgcagagggaatggcatacatcgagcggaagaactacattcaccgggacctgcgagcagctaatgttctggtctccgagtcactcatgtgcaaaattgcagattttggccttgctagagtaattgaagataatgagtacacagcaagggaaggtgctaagttccctattaagtggacggctccagaagcaatcaactttggatgtttcactattaagtctgatgtgtggtcctttggaatcctcctatacgaaattgtcacctatgggaaaattccctacccagggagaactaatgccgacgtgatgaccgccctgtcccagggctacaggatgccccgtgtggagaactgcccagatgagctctatgacattatgaaaatgtgctggaaagaaaaggcagaagagagaccaacgtttgactacttacagagcgtcctggatgatttctacacagccacggaagggcaataccagcagcagccttagagcacagggagacccgtccatttggcaggggtggctgcctcatttagagaggaaaagtaaccatcactggttgcacttatgatttcatgtgcggggatcatctgccgtgcctggatcctgaaatagaggctaaattactcaggaagaacaccctctaaatgggaaagtattctgtactcttagatggattctccactcagttgcaacttggacttgtcctcagcagctggtaatcttgctctgcttgacaacatctgagtgcagccgtttgagaagaaaacatctattctctccaaaaatgcacccaactagctctatgtttacaaatggacataggactcaaagtttcagagaccattgcaatgaatccccaataattgcagaactaaactcatttataaagctaaaataaccggatatatacatagcatgacatttctttgtgctttggcttacttgtttaaaaaaaaaaaaaaactaatccaacctgttagattttgcaggtgaagtcagcagcttaaaaatgtctttcccagatttcaatgatttttttccccctacctcccaaaatctgagactgttaaaacatttttcttctatgaacactgctcagacctgctagacatgccataggagtggcgtgcacatctctctctcttccagcaggaggagcccgtgagcacgcacagctgccctgtctgctcacccgaaggcaccgggctcacctggacctcccaggaaagggagaagagcctcagaaactgctctgtgtttagaaggaatatttttaagagtccagctttttcatttccacaatttcctatatccagatttgttttgacaatgtagtttggaagaactaagattctaatctctgaagaaccttatagggccttctaaaacataagagtttcctttgttgcttcaaatatttgaacattatgttaaagatcaagtattaattttagttgtactctagaaagctaaagtgccacattcggggctatttttatgattcagcaatcttttctaaattgtgtagcatgtgtatgagactatttatacccaaggatatgaaggaacataagtgactacaaggctctaataagccacggtggcaggaggttcaagcggttctgttcactaaatttttctcctgtaagctttgaatggaaacttctgtatcacatgatgtgtttcacttatgctgttgtgtatatacctaatatttctatttttgattttattttaatacacctcgtccaataacaaaaaaaaaaaaaaa

SEQ ID NO: 249 - DNA, 5281 bp, Homo sapiens
gggacccagaacctcggacgagcggcgggcacccgcgagcggacggcggccgcgtagtgagcaatggcctgagcccccatggctgcccctcaggacctggacatcgctgtgtggctggccacggtgcacctggagcagtatgcagacacgttccgacggcatggcctggctacagcaggtgcagcccggggcctgggccacgaggagttgaagcagttgggcatcagcgccacagggcaccggaaacgcattctacgcctgctacagacaggcaccgaagagggctccctggatcccaaatcagatagtgccatggaaccatcccccagcccagccccgcaagcccagccccctaagcccgtgccgaagcccaggaccgtgtttggtggactcagtggccctgccaccactcagagacctgggctgagcccagccctcgggggaccaggagtgtccaggagcccagagcccagcccaaggcctcctcctctccccacttcctcctctgagcagtcttcagccctaaatactgtggagatgatgcctaattccatctacttcggcctggactcaagaggcagggcacaggcagctcaggacaaggccccagacagctcccaaatctctgcccccacccctgccctcaggcccacaacaggcacagtgcacatcatggatcctggttgcctgtactatggtgtccaacctgtggggactccaggagcccccgacagaagagagagcagaggtgtttgtcagggcagggctgaacacaggctcagcagacaggatctggaggcacgggaggatgctggctatgccagccttgagctacctggagactccaccctcttatcgcccaccctggaaacagaggagaccagtgatgacctcatttcaccctatgccagcttctccttcacggcagaccgcctcacgcccctgctcagtggctggctagacaagctctcccctcagggaaactatgtcttccagagacgctttgtgcagttcaatgggaggagtctgatgtactttggcagtgacaaggaccccttccctaagggtgtgatacctttgactgccattgagatgacccgcagcagcaaggacaacaagttccaggtcatcaccggccagagggtgttcgtgttccgcacagagagcgaggctcagcgggacatgtggtgctccacgctgcagtcctgtctgaaggagcagcgcctcctgggccacccccggcccccccaaccaccccgacccctccgcacgggcatgctggagctgcgtggacacaaggccaaggtgtttgctgccttgagccctggagagctggcactgtacaagagtgagcaggccttctctctgggcatcgggatctgcttcatcgaactgcagggctgcagcgtccgggagaccaagagtcgaagctttgacctgctcacaccccatcgctgcttcagcttcacagccgagtctgggggtgctcggcagagctgggcggccgctctgcaggaagcagtaaccgagaccctgtctgactacgaggtggctgagaagatctggtctaatcgggccaaccggcagtgtgcggactgtgggtcctcccgcccagattgggctgctgtcaatttgggggtggtcatctgcaagcagtgtgcaggtcagcaccgggccctgggttctgggatctccaaggtgcagagcctgaagctggacacgagtgtctggagtaatgagatagtacagttattcattgtcctgggaaatgatcgtgccaaccgcttctgggcagggaccctacccccaggtgagggactacatccagatgcgacccctggcccccggggagagttcatctcccgaaagtaccgtctgggtctcttccggaagccccaccctcagtacccagatcatagccagcttctccaggcactgtgtgcagctgtggcaagacccaacctgctgaagaacatgacccagctcctctgtgttgaggcctttgaaggcgaggagccctggttccccccagcccctgatggcagctgccctggcctcttgccctcagacccctcccctggtgtgtacaatgaggtggtggtgcgtgctacttacagcggcttcctgtactgcagtcccgtcagcaacaaagctggaccctcaccccctcgcaggggccgggatgctcccccgcgcctttggtgtgtgctgggagcagctctggaaatgtttgcatcggaaaacagccctgaacccctcagcctcatacagccccaggatattgtatgtctgggtgtgagccccccacccactgacccaggtgacaggttccccttttcctttgagctcatcctcgctggggggaggatccagcattttggcacagatggagctgacagtctggaggcctggactagtgctgtgggcaagtggttctccccgctgagctgccaccagctgctgggccccgggctgctgcggctgggccgcctatggctgcggtccccctcccatacagccccggcccctggtctctggctgtcagggtttggcctccttcgtggtgaccacctcttcctgtgctcagcgccgggcccaggccccccagcccctgaggacatggtgcatctgcggcggctacaggagatcagtgtggtttctgcagctgacaccccagataagaaagagcatttggtcctggtggagacaggaaggaccctgtatctgcaaggagagggccggctggacttcacggcatggaacgcagccattgggggcgcggctggtgggggcggcacagggctgcaggagcagcagatgagccggggtgacatccccatcatcgtggatgcctgcatcagttttgttacccagcatgggctccggctggaaggtgtataccggaaagggggcgctcgtgcccgcagcctgagactcctggctgagttccgtcgggatgcccggtcggtgaagctccgaccaggggagcactttgtggaggatgtcactgacacactcaaacgcttctttcgtgagctcgatgaccctgtgacctctgcacggttgctgcctcgctggagggaggctgctgagctgccccagaagaatcagcgcctggagaaatataaagatgtgattggctgcctgccgcgggtcaaccgccgcacactggccaccctcattgggcatctctatcgggtgcagaaatgtgcggctctaaaccagatgtgcacgcggaacttggctctgctgtttgcacccagcgtgttccagacggatgggcgaggggagcacgaggtgcgagtgctgcaagagctcattgatggctacatctctgtctttgatatcgattctgaccaggtagctcagattgacttggaggtcagtcttatcaccacctggaaggacgtgcagctgtctcaggctggagacctcatcatggaagtttatatagagcagcagctcccagacaactgtgtcaccctgaaggtgtccccaaccctgactgctgaggagctgactaaccaggtactggagatgcgggggacagcagctgggatggacttgtgggtgacttttgagattcgcgagcatggggagctggagcggccactgcatcccaaggaaaaggtcttagagcaggctttacaatggtgccagctcccagagccctgctcagcttccctgctcttgaaaaaagtccccctggcccaagctggctgcctcttcacaggtatccgacgtgagagcccacgggtggggctgttgcggtgtcgtgaggagccacctcgcttgctgggaagccgcttccaggagaggttctttctgctgcgtggccgctgcctgctgctgctcaaggagaagaaaagctctaaaccagaacgggagtggcctttggaaggtgccaaggtctacctgggaatccgcaagaagttaaagcccccaacaccgtggggcttcacattgatactagagaagatgcacctctacttgtcctgcactgacgaggatgaaatgtgggattggaccaccagcatccttaaagcccagcacgatgaccagcagccagtggtcttacgacgccattcctcctctgaccttgcccgtcagaagtttggcactatgcctttgctgcctatccgtggggatgacagtggagccaccctcctctctgccaatcagaccctgcggcgactacacaaccggaggaccctgtccatgttctttccaatgaagtcatcccaggggtctgtggaggagcaagaggagctggaggagcctgtgtacgaggagccagtgtatgaggaagtaggggccttccctgagttgatccaggacacttctacctccttctccaccacacgggagtggacagtgaagccagagaaccccctcaccagccagaagtcattggatcaaccctttctctccaagtcaagcacccttggccaggaggagaggccacctgagccccctccaggccccccttcaaagagcagtccccaggcacgggggtccctagaggaacagctgctccaggagctcagcagcctcatcctgaggaaaggagagaccactgcaggcctgggaagtccttcccagccatccagcccccaatcccccagccccactggccttccaacacagacacctggcttccccacccaacccccatgcacttccagtccaccctccagccagcccctcacatgaccctaggaccagcagtctgagagggtaggtaccagaagacccagaaactcttatcgtggcactgttgcagcttcctctgccctggctggaaagactccagaatccagtgtggtgctgtggaaggagcactggactaaaggcttcagtggctgcgtgtcccaggacaggtcatggcccctctctgggcccagcccatttatctataccatgaggtaactgaagtaaggagagcagtgaatgtcaaactgtgtttcttagagccataagccccacatattatccctgaacaagggcagctcctgctttatatatttgatacgtaggggttccatgagagattttgggttttaaaggaatggttttactgcattaaagaaaaaaaatgctttggaaaccagaggcctgggtgatgttaaagtctatcctgtcccacttcctacattctgggactaccgtgaagcctggagtagggagagcgagtttgggagctgggactcggggagtcaaaaatagatgagtaattgtcaataaacctgggaaccaaaagacaaaaaaaaaaaaaaaaaaa

SEQ ID NO: 250 - DNA, 3503 bp, Homo sapiens
ctcatcccggccccgggatggcgtccccacgggaattgacacagaaccccctgaagaagatctggatgccatacagcaatgggcggcccgctctgcacgcttgccagcgcggtgtgtgcatgaccaactgcccaactctcattgtcatggtgggcctgcccgccaggggcaagacctacatctccaagaagctgactcgatacctgaactggattggtgtgcccactcgggagttcaatgttggccagtatcgccgggacgtggtcaagacctacaaatcttttgaattttttctccccgacaatgaagagggcctgaaaatcaggaagcagtgtgccctggcagccctccgtgacgtccggcggttccttagtgaggaggggggacatgtggcggtttttgatgccacaaacaccacccgagaacggagagcgaccatctttaattttggagaacagaatggctacaagaccttttttgtcgagtccatctgtgtggatcctgaggtcatagctgccaacatcgtgcaagtgaaactgggcagccctgactatgtcaaccgcgacagtgatgaggctacggaggacttcatgaggcgcattgagtgctatgagaactcctacgagtcgctagatgaggacctggatagggacctgtcctatatcaagatcatggatgtgggccagagctacgtggtgaaccgtgtggctgaccacatccagagccgcatcgtatattacctcatgaacatccacgtgaccccccgctccatctacctctgccggcacggggagagcgagctcaacctcaagggccggattggcggggacccaggactgtcccctcggggcagggagtttgccaagagtctagcccagttcatcagtgaccaaaatatcaaggatctgaaggtctggacaagccagatgaagaggacaatccagacggctgaggcactgggtgtgccctatgaacagtggaaggtcctcaacgagatcgatgcgggcgtctgtgaggaaatgacctacgaggaaattcaggataattatccactggagttcgccctgcgggaccaggacaagtaccggtaccggtaccctaaaggggagtcctacgaggacctggtccagagactggagcctgtcatcatggagctggagaggcaagagaatgtgctggtcatctgccaccaggctgtgatgcgctgcctgctggcctacttcctcgacaaggcagcagaacagctgccctacctcaagtgtccgctgcacacagtcctgaagctgactcctgtggcatatggttgtaaagtggagtccatattcctgaacgtggctgctgtgaacacgcaccgggacaggcctcagaacgtggacatctcaagacctccagaggaagcccttgtcacggtgcctgctcaccagtgaccatgttcatccactgtgaccactaggcaggcactgctctctgcagagggggtcattccaggccctccagtgtgtgtgatagtcaccatgccatgcagggatattcttgaagccacacatggctggcggaacccagagcccccaccccagcccacctggctctttgttgacagtcggcgacaaggttgtgcgtggctcctgacctgctgctaagagtcacttgaccagactgcatctgcatgggctgcgcggaggttgcccagccccagtttcttccggcgcagctcttaggtgttcactctcgccagctcagttggctttgtgaagtgtgaaaccctacaatgtgaaaggaaagtgcttgctgtgatgttcctactgtggcccagctgcccagcatggacctggtgactctccacagggcctctaccatcctctctgtggccacttcctgagccagaggccaggtcttcatggggccctgagcttctgctgcctctggtgagagggagagcccttcccatccttacccaccaggaactagagccccaaccacagcagatgcttcctgggcagccactggccaggccgttgtatccatgtcacccttagttgtgggcattcatgaaagcaatgcgcttgcttcagcacattgggatgcacagaaacgtgagggcaggggggcagttgtggtcgcccctccccagttgtgcatgtacccggctacttaggtatgcttaggggagctggtggccaggggtgccccttcaggcctgctctcacagtgaaaccacttcaagacagggcaggaagttaccttcctggtgcacacaccgaagtgctcgagggagaggctgccgccccctctccccttccctggctgtggacactggcagccaatggggaggcggcctctcccctgttgctgcccgtgtccacacaggaatgtacactggtggcagaaacatgcatttgccataaataattcagaaacacttgtatggtcctgtaaaacttctctggtgtttgttgacttctgcctgtgggtctgaggaagggagaaggcagaacccataggcagtccctgggcaagggaggattttcccggccgcagcacagccttccattcatgtgcacgtgagtctggtgaaaatggccttgtgaagtccagtgtctgtcatgcccctgagttcttttggtcccagagaggcagcctgggcagtctgtttacagctggcaaacagactggctggcaagttgtggggctgggtcagaaagtgtctggacttgtaatcgggtgccctgctgtccacaggtggactctggggaagccaggcccctggatcccaagtcctttgtgtccggagcctttcctggcctgtgcctggagggtagcacatctttccagcctcccagggctttgcagcctgcagatgccacctgtccctgagagaagttagcgtccctggccctggccggtggtctctcatccttgtgtgctgctctgctaagagatgtccaaggcggagccggggcaagatccttccagactcatctgtcagagccccaagccctttagacccagagcccaaggaccatgcctttgggacattaggactgcagcctttgcttctgtgtattttggagttttggtgacttttgtcacctggacacactcatttgttagccatagtgggttcccttggtcagcaacagtgcatgtacctctggatgtcatctgaggtgagaccaccgaggccttttctctctgtgtacagaggggagttaggagttgctggactggatgcattacgaggactggggacagggtagagggacatccagggatcagggcatgagtgggggcaaccccccggcctctgccctggcatggtctccgcatgggctgaggtgtagctgattggctgccacatttcggccatgctggctggcgtgcccatgttgcagatattttcccgagttccccagaatggatggtattgaatctcagccacatgcaacactgtgtccagcattctttgcaataaatactttttaaaaaataaaaaaaaaaaaaaa

SEQ ID NO: 251 - DNA, 979 bp, Homo sapiens
gagttaggtgacgctgcggggcgggcggacagactgcgggacggacggtggacgctgggacgcgtttgtagctccggccccgccgttccgacccccgccgccgtcgccgccatgacggggctagcactgctctactccggggtcttcgtggccttctgggcctgcgcgctggccgtgggttcctgacggagacttcgcccttcatgtggtccaacctgggcattggcctagctatctccctgtctgtggttggggcagcctggggcatctatattaccggctcctccatcattggtggaggagtgaaggcccccaggatcaagaccaagaacctggtcagcatcatcttctgtgaggctgtggccatctacggcatcatcatggcaattgtcattagcaacatggctgagcctttcagtgccacagaccccaaggccatcggccatcggaactaccatgcaggctactccatgtttggggctggcctcaccgtaggcctgtctaacctcttctgtggagtctgcgtgggcatcgtgggcagtggggctgccctggccgatgctcagaaccccagcctctttgtaaagattctcatcgtggagatctttggcagcgccattggcctctttggggtcatcgtcgcaattcttcagacctccagagtgaagatgggtgactagatgatatgtgtgggtggggccgtgcctcacttttatttattgctggttttcctgggacagctggagctgtgtcccttagcctttcagaggcttggtgttcagggccctccctgcactcccctcttgctgcgtgttgatttggaggcactgcagtccaggccgagtcctcagtgcggggagcaggctgctgctgctgactctgtgcagctgcgcacctgtgtcccccacctccaccctcaacccatcttcctagtgtttgtgaaataaacttggtatttgtctgggtcagtgcaaaaaaa

SEQ ID NO: 252 - DNA, 1875 bp, Homo sapiens
ggcgactacaactcccagcaggtcgagcagctccgcccgcgctgattctccattggccttccgggggtggggattagatgggaggtggccgtggggctgcggccgggatttgtcccctcttcggcttccgtagaggaagtggcgcggaccttcatttggggtttcggttcccccccttccccttccccggggtctgggggtgacattgcaccgcgcccctcgtggggtcgcgttgccaccccacgcggactccccagctggcgcgcccctcccatttgcctgtcctggtcaggcccccaccccccttcccacctgaccagccatgggggctgcggtgtttttcggctgcactttcgtcgcgttcggcccggccttcgcgcttttcttgatcactgtggctggggacccgcttcgcgttatcatcctggtcgcaggggcatttttctggctggtctccctgctcctggcctctgtggtctggttcatcttggtccatgtgaccgaccggtcagatgcccggctccagtacggcctcctgatttttggtgctgctgtctctgtccttctacaggaggtgttccgctttgcctactacaagctgcttaagaaggcagatgaggggttagcatcgctgagtgaggacggaagatcacccatctccatccgccagatggcctatgtttctggtctctccttcggtatcatcagtggtgtcttctctgttatcaatattttggctgatgcacttgggccaggtgtggttgggatccatggagactcaccctattacttcctgacttcagcctttctgacagcagccattatcctgctccataccttttggggagttgtgttctttgatgcctgtgagaggagacggtactgggctttgggcctggtggttgggagtcacctactgacatcgggactgacattcctgaacccctggtatgaggccagcctgctgcccatctatgcagtcactgtttccatggggctctgggccttcatcacagctggagggtccctccgaagtattcagcgcagcctcttgtgccgacggcaggaggacagtcgggtgatggtgtattctgccctgcgcatcccacccgaggactgagggaacctaggggggacccctgggcctggggtgccctcctgatgtcctcgccctgtatttctccatctccagttctggacagtgcaggttgccaagaaaagggacctagtttagccattgccctggagatgaaattaatggaggctcaaggatagatgagctctgagtttctcagtactccctcaagactggacatcttggtctttttctcaggcctgagggggaaccatttttggtgtgataaataccctaaactgcctttttttcttttttgaggtggggggagggaggaggtatattggaactcttctaacctccttgggctatattttctctcctcgagttgctcctcatggctgggctcatttcggtccctttctccttggtcccagaccttgggggaaaggaaggaagtgcatgtttgggaactggcattactggaactaatggttttaacctccttaaccaccagcatccctcctctccccaaggtgaagtggagggtgctgtggtgagctggccactccagagctgcagtgccactggaggagtcagactaccatgacatcgtagggaaggaggggagatttttttgtagtttttaattggggtgtgggaggggcggggaggttttctataaactgtatcattttctgctgagggtggagtgtcccatccttttaatcaaggtgattgtgattttgactaataaaaaagaatttgtaattgtgaaaaaaaaaaaaaaaaaaaaaaaa

SEQ ID NO: 253 - DNA, 1420 bp, Homo sapiens
tttctactttgcccgcccacagatgtagttttctctgcgcgtgtgcgttttccctcctccccgccctcagggtccacggccaccatggcgtattaggggcagcagtgcctgcggcagcattggcctttgcagcggcggcagcagcaccaggctctgcagcggcaacccccagcggcttaagccatggcgcttctcacggcattcagcagcagcgttgctgtaaccgacaaagacaccttcgaattaagcacattcctcgattccagcaaagcaccgcaacatgaccgaaatgagcttcctgagcagcgaggtgttggtgggggacttgatgtcccccttcgaccagtcgggtttgggggctgaagaaagcctaggtctcttagatgattacctggaggtggccaagcacttcaaacctcatgggttctccagcgacaaggctaaggcgggctcctccgaatggctggctgtggatgggttggtcagtccctccaacaacagcaaggaggatgccttctccgggacagattggatgttggagaaaatggatttgaaggagttcgacttggatgccctgttgggtatagatgacctggaaaccatgccagatgaccttctgaccacgttggatgacacttgtgatctctttgcccccctagtccaggagactaataagcagcccccccagacggtgaacccaattggccatctcccagaaagtttaacaaaacccgaccaggttgcccccttcaccttcttacaacctcttcccctttccccaggggtcctgtcctccactccagatcattcctttagtttagagctgggcagtgaagtggatatcactgaaggagataggaagccagactacactgcttacgttgccatgatccctcagtgcataaaggaggaagacaccccttcagataatgatagtggcatctgtatgagcccagagtcctatctggggtctcctcagcacagcccctctaccaggggctctccaaataggagcctcccatctccaggtgttctctgtgggtctgcccgtcccaaaccttacgatcctcctggagagaagatggtagcagcaaaagtaaagggtgagaaactggataagaagctgaaaaaaatggagcaaaacaagacagcagccactaggtaccgccagaagaagagggcggagcaggaggctcttactggtgagtgcaaagagctggaaaagaagaacgaggctctaaaagagagggcggattccctggccaaggagatccagtacctgaaagatttgatagaagaggtccgcaaggcaagggggaagaaaagggtcccctagttgaggatagtcaggagcgtcaatgtgcttgtacatagagtgctgtagctgtgtgttccaataaattattttgtagggaaagta

SEQ ID NO: 254 - DNA, 1527 bp, Homo sapiens
ggggatgtggcccgtggcctagctcgtcaagttgccgtggcgcggagaactctgcaaaacaagaggctgaggattgcgttagagataaaccagttcacgccggagccccgtgagggaagcgtctccgttgggtccggccgctctgcgggactctgaggaaaagctcgcaccaggtggacgcggatctgtcaacatgggtaaaggagaccccaacaagccgcggggcaaaatgtcctcgtacgccttcttcgtgcagacctgccgggaagagcacaagaagaaacacccggactcttccgtcaatttcgcggaattctccaagaagtgttcggagagatggaagaccatgtctgcaaaggagaagtcgaagtttgaagatatggcaaaaagtgacaaagctcgctatgacagggagatgaaaaattacgttcctcccaaaggtgataagaaggggaagaaaaaggaccccaatgctcctaaaaggccaccatctgccttcttcctgttttgctctgaacatcgcccaaagatcaaaagtgaacaccctggcctatccattggggatactgcaaagaaattgggtgaaatgtggtctgagcagtcagccaaagataaacaaccatatgaacagaaagcagctaagctaaaggagaaatatgaaaaggatattgctgcatatcgtgccaagggcaaaagtgaagcaggaaagaagggccctggcaggccaacaggctcaaagaagaagaacgaaccagaagatgaggaggaggaggaggaagaagaagatgaagatgaggaggaagaggatgaagatgaagaataaatggctatcctttaatgatgcgtgtggaatgtgtgtgtgtgctcaggcaattattttgctaagaatgtgaattcaagtgcagctcaatactagcttcagtataaaaactgtacagatttttgtatagctgataagattctctgtagagaaaatacttttaaaaaatgcaggttgtagctttttgatgggctactcatacagttagattttacagcttctgatgttgaatgttcctaaatatttaatggtttttttaatttcttgtgtatggtagcacagcaaacttgtaggaattagtatcaatagtaaattttgggttttttaggatgttgcatttcgtttttttaaaaaaaattttgtaataaaattatgtatattatttctattgtctttgtcttaatatgctaagttaattttcactttaaaaaagccatttgaagaccagagctatgttgatttttttcggtatttctgcctagtagttcttagacacagttgacctagtaaaatgtttgagaattaaaaccaaacatgctcatatttgcaaaatgttctttaaaagttacatgttgaactcagtgaactttataagaatttatgcagttttacagaacgttaagttttgtacttgacgtttctgtttattagctaaattgttcctcaggtgtgtgtatatatatatacatatatatatatatatatat

SEQ ID NO: 255 - DNA, 4304 bp, Homo sapiens
atggagccatctcagtgtgtggaggagctggaggatgatgtgttccaaccagaggatggggagccggtgacccaacccgggagcttgctctctgctgacctgtttgcccagagcctactggactgccccctcagccgacttcagctcttccctctcacccactgctgtggccctggccttcgacccaccagccaggaagacaaagctacccagactctcagcccagcctcccccagccaaggtgtcatgctgccttgtggggtgactgaggaaccccagcgactcttttatgcaccagcagaaccaaaatcgtgtgtggtggcagatcctcctcttcctgcacaaccttgctttgaatggagaagagaacaggaacggggcaggccctaggtgagggtgggctgccctcttcacatggggcaccaggaacaccgtctggaacaggaaggacatcgggcaggactgacactgtgtcttgtgaaattgtttttttgttgttattttgtgttttaattttttttaatttctctctgagtgtacatacaacatactcaagcgggaccttctttctctgtcaggcccttgacctggaatgggggcctttgtcaaacactgttgaaggagaggctgatgtgtctgtgatggtgagaattcccaagggctctgacaagtagattcttcgactgaggaatctaccagttgtcgaagatgatccgttagtgatgttctctgggaagtggactgtggtttttccagaggaactcagttaagaaatcgagagtggattagactcccagttccaccaaacctatgagccttccactgtggatgggggccgtgatcctgatggtcacattgctttaacccagcagggcttcggccaggggctttccacttgaggatagcagcttcactaggctggccggccagctccacatctgactgggttcttacttctcagccagtacctgccccatgggctcaaggattcctggccagctcctgccacctccagcagacctcagggagggttgggtttctctaaggacccctcaaacatgtcgcaaaatgaaccaaacttctggctaggcctcaaaactgacttggtcccacttggaggccccaggattggtcctgaggtacagagccactgccaccactggcggcctgggaccagctgggtgtcagccacggatgagccgaatagccagtcagcatgttgctgctggcagcctgtgcctttgtcagctcttctttcaaaagaccccaccgacagaccgcattccacccccaacatcggcactgagggacatcgggggcaagtttgcagtggggccggaaaatatggtggccaccctaccatgagagtcagccgtaggggaccccagaccccttggtttccttggaaacaacatacctcttcccccttatccccagtcctttttcatacctagtgggatacagaagaagccaggacagtggctttgccagctaagtgacttttagagtaacagataacgattagagtggggaaccgtcaaagctgggtacacatttcctatcttcctccagcttccagctaggccagaagggcatgctctggaacccagcaggatcacagctgcctgtgcacgtcttcccttctctccctgctgcggcacttatggagaggatctaaagcagccggtgtggcagctccgatagcaggcacagggaatctgttaaccagacgctagaaactaaattataacttttgcatatgtgagaaaagacaacattggtgctaacagtgaagtaaggcccaaaggaaagacggcttccctggacaaagaagacctcagggctacccaaggaaataggaggagtctagagtagactcacaaatctgaacaagcccaagtcttccagttctgaggagaggaggtcttcagtactattgaaggagacattgatcttctggatgtacagttgtgcaggttgttcactgcacaagggcacctgcagctaatggaggctggaattcagcttgtgttctgctcactaagctgtgtgcgtgccctggtgtggggctacttctcccaagaagaaggggtgcctttcctaatttgcaaaggtgccatatgggctcacagcaccctggaggagaagggcctcaaactgtgcatgtaagcctttgttttgttctgctcagatattctggatattacctcttcttggtcagaattctattctcagggtgtgtaccatgatttgtctgctaagaagacgggttcctgctttgcagagaaggagccggggaccagcttgaagactggctctgggacacactgaccattgtgaaattcagccttccctgtgggtctccataccattttatgatgtgtatgggacatacgttgttctcccctctctggatcaaggtggtgacaggcagcctgctgccgtatgcttcagtggcacacaccaaaaaaccgggattatttacagcagccactattcaccccttttggcagactctccacctgagttcagtgagagagaaaatgatttagatcttggtgctggggcaaggccatcagcttcagagaccttgccaggcccaggctgggtgccctgtggcctgagaactgagcccagactttgacaaacccacctcaacatcaagcctggggcaggtggaaggtggtctgactgcactgtctccatcttatgcaaagccaggaactcactcactgtcttaagtgagccagggcaaaatttacacccctcacgtttccctctcccttcttccccaccaacaaaacccaggaggtagctggcagagtagctgtcaggaaggagaaaggttctttctggctggttgtttttaattggcttagtgatctaaactggccccttcctcctctgcctggtgagttggcctaaacattcctcaagtctagcctcaggagacctgcccctcccccccgacctccaccccctcagactccatcccccacccccaggagcctggctgtctctagcgaggggtggagaatcagatttagagggagggagagtctgacctggatcctgacctgtaaccagctgaagacggtggaggctttgtggcttgctgagggtgggggttgggagagggactggaaaccttcctcctcgggaaagaaatgcctgggaggaagggaagcctgatattcagggtcaaaacagcccttctaattcacaaccccaaagcaggggtttctagaagttggtcaacagatctggtgagggaagtccccaggccagacgctggactcctgcaatgagggtggaggactcagcctggcctctgcctggcctgtttcaaagtctgggccactggcagccttctcttgctcaatccgaggtggaaaaagatcacctcccagtgacctccctcagcccccaggggagtaggtctgtgtccaaagctatgtggcaggcttgtttgaaggacccagaggggcccagctgacctgtctcactgctcctggcagcccagccccatcggcaggtggcccctgcctgggggttattcgggatggttcagccagggcctcccaggaagagtgctgtggagccacggtgactgtcctggacagcaaggagcatgctaccccagtgagcacttctttttgagggacttgatggggaggtggggtaggcagaagggacgtggcagaagcgggaagactttggtcaccatggctctgcaggccttctgcaaatcagtgctggcctgggctggaaacagctctgtgtgtgaaggtgaggactcttggaagcaggccatcctggccagacaccctagcaggaaggggctcacctgtcacccttaggcagcctgagggctggtggggacttttgagtcttgaggggatagcggaaaaagctgagctcataggtgcccagccagcctcccagctaaaggtgctcagagccccactgccccctctctctgtgcaggtggccagtgcccctccctgctctgggagcattgctagccttctaccccatccctggatccacaggggctatcgaggagacccagtgagaatgtagcattttgttcatccccagggtagctgccctggggtctgggcactctgcctctgggagagaggaagaagaaaggggccccattttttaaaaaactgtacagagcctttggctttatgtgtttatgttcttcacatgcatatgtgtgtatgtgtgtatatctttccccccatcaattggtacaatttttaataaaatcatttaaagcaaaaaaaaaaaaaaaa

SEQ ID NO: 256 - DNA, 817 bp, Homo sapiens
atataatgagcaatacggagcagtgcgtacgccttacaccatgagctatggggattcattgtattacaacaacgcgtacggagcgctcgatgcctactacaagcgctgccgtgctgcccggtcctatgaggcagtggcagctgcagctgcctccgtgtataattacgcagagcagaccctgtcccagctgccacaagtccagaatacagccatggccagtcacctcacctccacctctctcgatccctacgatagacacctgttgccgacctcaggagctgctgccacagctgctgctgcagcagcagccgctgctgctgttactgcagcttccacttcatattacgggcgggatcggagccccctgcgtcgcgctacagccccagtccccactgttggagagggctacggttacgggcatgagagtgagttgtcccaagcttcagcagccgcgcggaattctctgtacgacatggcccggtatgagcgggagcagtatgccgatcgggcgcggtactcagccttttaaagcttgaggtgggatgtgtgtgggctgaaattccgagctgcggttgtgcatgagaatacacccttcgtggtaccccatctccgggacgttctcggctctgcctcattgtgtgcagaaactgtggtgggggctgtgctgtctcctccctgcctcctgcctcctgcggctgttggatttgggaatgaccttggtgagagtctcactgctccagggtctctttttggtccaaaggctagacctatagagttggatcactttttttctttccggtgaaataaatggtttttc

SEQ ID NO: 257 - DNA, 967 bp, Homo sapiens
tttcttgaaagaggcatttaccgagcgcccaatgtatgcctggcactgggctgggtgctgccacctaagcgagcacgaccaatgcagtctatcagggaggcccagatcgccaagcagcggacccctgcggtccgccatgccactcccggctcctagagcgccgctcagcacaccgtgagcgcccaataactgttgggcttcaatgacgccgcggaggcggccccgtccccgcgctcccgcccctcccgccagggcagcccgggaggccagacgttgacgctgcagggagagggtggtgggcgcagccgctagggggcgcggcggggcggagcgcacctttccgcgggccgcggggatggcggcgcagggcgtagggcctgggccggggtcggcggcgcccccggggctggaggcggcccggcagaagctggcgctgcggcggaagaaggtgctgagcaccgaggagatggagctgtacgagctggcgcaggcggcgggcggcgctatcgaccccgacgtgttcaagatcctggtggacctgctgaagctgaacgtggcccccctcgccgtcttccagatgctcaagtccatgtgtgccgggcagaggctagcgagcgagccccaggaccctgcggccgtgtctctgcccacgtcgagcgtgcccgagacccgagggagaaacaaaggcagcgctgccctcgggggagcattggccctggcggaacgcagcagccgcgaaggatccagccagaggatgccacgccagcccagcgctaccaggctgcccaaggggggcgggcctgggaagagccctacacggggcagcacctaggatggggcagagacttgttgcatctttgtccccagcaaaggctacatgttacctccttcaattgataataaacctttctgagatgcagagggtccaggtcaaaaaaaaaaaaaaaaaaaaaaaaaaaaaaaaaaa

SEQ ID NO: 258 - DNA, 292 bp, Homo sapiens
taagttataaaaatacagtagaaacagttgctacatggcatgattaaggtggggattctggaacaatcatcttagggggtgtgccatgctgttcctgtgaaaaataattaacttgatgattattagaaacaataagactagtttgccttaatttttttatacatggagaatcttaaaaacggaggctttctgcttaggtactctccagattggcactccaattttgccaaatgctcctagtatctgttactctgactgaaataaatataccatgaataaaaaaaaaaaaaaa

SEQ ID NO: 259 - DNA, 443 bp, Homo sapiens
ctctcttcggtccgtacctccaagatgacaaagaaaagaaggaacaacggtcacaccaaaaagggccgcggccacgtgcagcctattcgctgcactaactgtgcccgatgcatgcccaaggacaaggccattaagaaattcatcattcgaaacatagtggaggccgcagcaatcagggacatttctgaagcgagcgtcttcgatgccaatgagcttcccaagctgtatgtgaagctaccttactgtgtgagttgtgcaattcccagcaaagtagtcaggaatcgatctcatgaagcccgcaaggaccgaacacccccaccttgatttagacctgtgggtgctgccccacgtcccccaccaaagcccatgtaaggagctgagttcttaaagactgaagatagactattctctggagaaaaataaaatggaaattgtacttaaaa

SEQ ID NO: 260 - DNA, 2774 bp, Homo sapiens
aattccaggaccagagatctggccctggcctattttctcttgctgtgtacacacacgcacacatgctgggtggcaggatctcgcccgctggagggtggtggagcccagtagaattggggtgactgggcataaacctgctgagactgcttccttccctggttgtgagtgatgtgaatgcctgccttccccggtcagcacttagaagcccttgataggcagcatttggcgacttgtggggcaggtgtttgggataaatcctaccttcatcctaggacttatttctgcatcagccttttaactcaggcacttcaggtaacgtgatctatgtgtgttttgactgaatctcatctcctgtgtttccctgtgcagtctagggaagcatgtctccagtctttgtccctgtcttgtcccaaccattaattctcatgtcacagcttctcactgcatgtgacaagagccaggcctatctgctagggccctgcggctgaggtctgacctggaccctcatgcccgagtcggaagacccctctccagaagccattctgcatccttgtctgctctgcgtcacccgagaacacaggcttcgcagcctcgctttctgaaatggtgtgtgccgagtcagattgccgctcagagaaaatacaagcccgttttccctagctgtgccatttggtgctctgccaggctgccgtgcaagggaataccgacgagacgagctgcactgtctctgatttggagccctcaccggagcttgtctttaaaaatgagcaggaagctcatgtatgtttgcatttcagtgagccgggtcctgacctgccgccacccatcacggtcagcgtggtgcatcttaccgaggaggcgcaggcctggattcttttgagtggtgctactgcctaggaagtaacacgtggagaatttccatcttgggaccatgcacacagtgccttggggagtagattttgccctaatagcgatgaagaattttatcagtcagtggagttcctttttcagatcagggatgggaaagagccaaactgggtacctcccacgtgtgccccgtgaacagccctttgcagctgggctgtggggcttggctgctgccctgtcccatctggcagttaacgccttctccctgctctgccccccactccccaaaaccagttgcagcctcaacccacatggggatgtagaaagccgtaaagtccacgctactgttgaaaatgtttacatctccgctctcaacctgccttgggttcgtgttaaatggtgttaaattctgcaaatggaggggaaaaaaatcaaattctaaatttcaaagtagaatttaaagcaaatttgtaaaaaaattatcctaccaccccttttggtccacttaagatatgccacgctgaagcaaggtatttcctactggattttgctttcactggtgtttagaaaataaacttgatttctctaggagcactcctttggttagagggatgcaagaaggagaggtgaaggtggcgtgtggtggctcatgcctgtaatcccagcactttggggaggccgaggcaggcggatcacttgaggccagcagtttgagaccagcctggccaacatgatgaaaccccatctctactaaaaatacaaaaaattagctgggcatggtggcaggcacctgtaatcccagttacttgggaggctgaggcaggagaattgcttgaacccaggaggtggaggttgcagtgagctgagattgtgccactgcacttcagcctgggcgacagagtgactctgtcaaaaaggaaaggcaaaaaccggaccctggagctctgtgggccctgattgcaggcccctccctgtgtgatgagggatgagtcagcttggggagccacttggccagcctgcatgcctggtcatcaggaggttgagaaaagccttgaaagttgtgaagcactgagcagatacaagtgtttgttaattttgtagaaattaactttcccatctggcctttatctccaaagttggtattgttgctccacgcagactgcagtccggtttcttattgtgactttgacaatgcaaagtgcaaaataggaagaggcctccccaccccactatcccaccctggtgaccaattcagtgtaacctttgcacgtactcagtcattggtgtctttggagtgacatctgcagccagttagtgccacctgagtacagcactcgtacttttacatgatgtgtgtgtgagtagctcttctgtccaaaccatgatttgaggttcaactacctgtagatcaaagctttattttagaacgataaactgattttttccaaatgggtgaaatcttctccccatgactatgttttcttaactttgcattgaatctatttactgggttacattctatgtgtagtttgctttcttcatttttttttcttttaaaatgctcatgtcttattccaagcaccttcctccaaagtccccataaagctgcatctccaacacattgttatgccaataaggttttatttaactttatttaaggatgattgtgtctttgaatgacaaatgtactgctgcttcctacctgcaagacgaacaatgtatgtttcaagggtgagcaagtgttatttcttaaatttctcaaatgcctgtagtaactattgtttctgcctctcaattgttgccagctctttgaagaaggggagaattgtgtgtttttgtgtggggatgtttctgatatgctgctacagttgcaaaacactggagctagagaaaataaagtactgatc

SEQ ID NO: 261 - DNA, 893 bp, Homo sapiens
aagaaataagacacggagacaaagtacagagaaagaacagcgggcccaggagaccggcactcagcatacggaggaccagcactggcaccggcctctgagttccctcagtttattgattaccattttcagtgtctcagcaagaggaatgcggtaggagagcagggtgtcagcaagaaaacctgtgagcctttcctttcgctgctgcggccgcagccatgagcatgctcgggcctcagaagaggctcgcctctagtgtcctccgctgtggcaagaagaaggtctggttagaccccagtgagaccaatgaaatcgccaatgccaactcccgtcagcagatccggaagctcatcaaagacgggctgatcatccgcaagcctgtgacggtccattcccgggctcgatgccggaaaaacaccttggcccgccggaagggcaggcacgtggccataggtgagcagaagggtacagccaatgcccgaatgccagagaaggtcacatggatgaggagaatgacgattttgcgccggctgctcagaagataccgtgaatctaagaagatcgatcgccacacgtatcacagcctgtacctgaaggtgaaggggaatgtgttcaaagacaagcggattctcatggaacacatccacaagctgaaggcagacaaggcccgcaagaagctcctggctgaccaggctgaggcccgcaggtctaagaccaaggaagcaggcaagtgccctgaagagcgcctccaggccaagaaggaggagttcatcaagactttatccaaggaggaagagaccaagaaataaaagctccccctttgtctgtacatactggcctctgtgattacatagatcagccatgaaaataaaacaagccttaaaaaaaaaaaacat

SEQ ID NO: 262 - DNA, 392 bp, Homo sapiens
tttgcatataaatataatttttaataaaggaagggactcacaaagacaaagtgcttagagcccagcaaagtcagaatgagatgagtggaaaggatggggtggaatacagttgtgggctattggtaaggtcccagtttttgtggtggacagtatctcgtaggtgttacattatcaaaaatatatagctaattacatacatgaacacatgaataaaagagggttatgcattgaccaaagatgatagtgcaatgagccaaaaattatgttgtgcactggaggtgaaggagtgaggggaagagagaaagaaaggctcagaccctgaggcgcatcaactgagtgtggggaaaagctacagatcataatggaagagaagaagacagtgttttaatttt

SEQ ID NO: 263 - DNA, 1939 bp, Homo sapiens
ccttgccttctcattgcagctgaccagacacaaaccctcgcatgtgcaatacagaagactcccccactggaaaaaaaaagaaaaaagaaagaaagaaagaaagaaaaaaaagatggagggaggaaggctttaattttgaataatttccaaggacacagagaaaaatgaagtatctgtgatttacactaaagctcacaggcaactttctctctccctctgtttcttcccccacagaagcagtcacgtacaaaacattaaaatataaacagagctgcagttgctgaagccagaacccttgtctgattttttttaaactccgtgtcatgctaaaaaaaaaaaaaaaagaaaaaaaaaaagaaaaaccaacaccgtatctgaaaagcttagcacaatataactattaaaaaaatcttttggttggcttggttagtagtgtgagaatgaagaaacgtaaagacttccacgtctcaggaatatttcagataaaaaataatcttttgcggctccctgcccgggctcccagcagcctcttcccctttgtgtctgggctctgtcccctctgcagggccccagcagacccccaccaggcctgatgtggacagctgttcccaagccctgccagttaatcgcttctgggtttgcacccttgagctgtgtgcaccaggacacccccacctactggaagtactcagggacgcagcctggttcactgacacagcccccagctgcctgaggagtcggtgaagctctggcctttccacctcttctgctgcaagaggccttgcagcctgcttccctggtgggaaaaggaaagcagaaactctaggccttcctgctggatctacactactgggagagccccgatagtgcaaatttaattggcagggattctattaaatatgtgactttatttggggttgctaatgaaatcaaaggcttgttgtatgacttacagtgtggacattaatttttaagaatgatgggttagaaagttagaacggaagagtttttctacctaaagaaatgagaatctagaatttgtgaaagggctgaatgttcctatcttgctgcttctgggacaaacttttccctgacatgtaaaacgcctgcaactgccatgaacaggaaagaaatggaaatggtactgattcactcatcaactccaggcaactttgtgtgtgtgtgtgtgtgtgtgtgtgtgtgtgtgtgtgtgtgtttattttgaaataactttattcgcagcctaacactttgcactgcattcagcatgacttagaatttacttttggtgttgtccagctgctgccaaaaattgggtagaatcagattggtattctttgttggtgcctggaatcgtagccagtggtacaaaggtgatgttgttccttgctgagacttcgtggaagaaggcaaaactttgatcatctgcccttgcacttgggcagtgttgaaggtgattggagtacaagtgccaatttgcaggaacaattgtaaacacctttgatacaaatgccatcatcccatttttactgattagaaaaactttgctattaataggtgcaaagtccatttcaggtataattggtaaggaactgagtgcactcatgggaagaaaccttgttttgttttttgttcgcttttcttcttatccccttttctcagttttatggctggagacatgatttattgcagccatccatcttgggggctcatccatcacacccgggttgctaggagattgtggcagcagctgtttgctctgaatcagacagaaaagttgtcaatcatcaaaggcaggtgaatagcattagaaacacgctattgtcagacggaataattaatcaaagagagaaaagataattaaaaagatatgacccttgcaagtacttgctctgggttgcctgtaaaaaaaaaaaaaatagaaaaaaaaaaaaaaaaa

SEQ ID NO: 264 - DNA, 204 bp, Homo sapiens
atgtggagtagcagaaagcacctaagtgacaaaatcaggtgttacaagaacatgtccatacacctgtccaccttcttcagggacgtccagattggccacatcgtaacagtgggtgagtgccggcccctgagcaagacagtacgcttcaacgtgctcaaggtcaccaaggccgctggcaccaagaagcagttccagaagttctga

SEQ ID NO: 265 - DNA, 469 bp, Homo sapiens
acaccccaagaacgctgtcatttcctgggccaagttgggacccggacggcctcaccatgatgaaacgggcagctgctgctgcagtgggaggagccctggcagtgggggctgtgcccgtggtgctcagtgccatgggcttcactggggcaggaatcgccgcgtcctccatagcagccaagatgatgtccgcagcagccattgccaacgggggtggtgtttctgcggggagcctggtggctactctgcagtccgtgggggcagctggactctccacatcatccaacatcctcctggcctctgttgggtcagtgttgggggcctgcttggggaattcaccttcttcttctctcccagctgaacccgaggctaaagaagatgaggcaagagaaaatgtaccccaaggtgaacctccaaaacccccactcaagtcagagaaacatgaggaataaaggtcacatgcagatgcaaa

SEQ ID NO: 266 - DNA, 3408 bp, Homo sapiens
attacgctgctggctggcagcggccgggccggtcggggctgggccctacgcactttgcgtagcgaggggggttaccaaaggcctagtgcttggcctcgagcaagcctggcctatcccctgtagggggtgggtgaggggcgaggctgaggaagaagagaaggggaattggggcgcttgaggggattataatttctttaaaaagaggggaggggagaggccatggccgtcccagccaagaaaaggaagatgaacttctcagagcgggaggtggagatcatcgtggaggagctggagctgaagaagcacctgctggtgaaccacttcaacgccggggtacccctggccgccaagagtgcggcctggcacggcatcctgagaagggtcaacgccgtggccacctgccgcagagagctgcctgaggtcaagaagaagtggtctgacctcaagaccgaggtccgtcgcaaggttgcccaggtccgggccgccgtggagggtggtgaggcgccggggcccactgaggaggacggagctggggggcctgggacaggcggtggcagtggcggcggtggcccagctgtagccccagtgctgctgacccccatgcaacaacgtatctgcaacctgctgggcgaggccaccatcatcagcctgcccagcaccacagagatccaccctgtggccctcggaccctcggccaccgcagccgcagccacggtcaccctgacacagatccccacagagaccacctatcacacgctggaggagggcgtggtggagtactgcacggctgaggcgcccccacctctgccaccagagacccctgtggacatgatggcccagcatgcagacacgtcggtcaagccgcaagcgctcaagagccgcattgctctcaactccgccaagctgatacaggagcagcgggtcaccaacctgcatgtgaaggagatcgcacagcacctggaacagcagaacgacctactgcagatgatccgccgctcccaggaagtgcaggcctgtgcccaggagcgccaggcccaggccatggagggcacacaggctgccctgagcgtcctcatccaggtcctccggcctatgatcaaagatttccgccgctacctgcagagcaacacagctaacccggcccccgcctctgaccctgggcaggtggcccagaatgggcagccagacagcatcatccagtgagggcaggggtcaggccagccttctgccatgatgggatgaaaactccatggacttgtaagtgggtcctgtgattggccttggccttagaccggccacgtgcacagctccctctttaataaacgcttaggggttgcactgtttttgagaagaggaatttgttgggctcctgggacccaaactcatactccccctacttgagctgccttgctaagatccagaagattggttagcagggggtcacgtgtgcatgtgatgggacatgtgttgtcatgaccccgggcttgtgacatgacccagccttggtcttggacaactgtaaggaacaacacaacgggctgtcactgggggccgtcacccagcctgggtctctactgagctgcccaaccccaggtgccatcctttcgagtagggtaatgtcactgatgctggcagttgagcaataatatcttcctcctttgggaggtagtgtgactgaggaggaaaccccacccttttctcctcactgtgcctcagttctcaggggactccaatgactgttgtgctctcccccgaccccaccccaggcacagcgcaggcccttgttaggtagtgtgctgggacgcctccgtaatacatgcagtgtgcagccagtctggctcaggaatgctgtgtatggtggggacggtttggccactctctggttttcaacagcatctctgggcagccctttggtggtttgtccctagagcttttgactcaggtcaagctttggatgctgtaaatttttgagaaagccaactagtgtggaagcttgctgccccactgcagtgggtctgagtgacctgttggctttgtgcggaggcttgcatccagccagttgtatttattctgtgtgtgaacccctcctaggaaggcctccaggaaggctgccctgtggccacacccatcctcctttcctctctgctgactccacatttccaaaattcagtgcaaaaaaagccctgctgagcatcacatgctggactcttcccctgccacaccgctcagtgccttctgttctcttgagactccctctgagtagctgagtgaatccaaagccataattgaccctgaacgtaggaggaggaaaaggcgaagctgacctaagaagtgggaccctggccgggcgaggtggctcaagtctgtaatcccagcgctttgggaggccgaggcgggtggatcacgaggtcaagagatcaagaccatcctggccaacatgatgaaaccccgtctctactaaaaacacaaaaattagctgggcgtggtggcacacgcctgtagtcccagctacccgggaggctgaggcaggagaatcgcttgaacccaggaggcggagattgcagtgagccgagattgcaccgctgcactccagcctggcgacagagcgagactctgtctcaaaaaaaaaacaaagaaaaaaccaaaaaaacaaatgggaccctttggattctatgctcagggaagagcaggcagagccttggagtgctgaaggaggtgctgttccctgttccatctttacactttctcttctgagatgtctgtaaggattttacccagatgccatttgtctgtttcattttcagactcaccatcaattaccaaggcccttgcatctccccagatcgtttcccaagtttggcgatttgctgtcggtgcctcagccacatatgaccaatggttacaactcagggctccagacctcagctaaaaagagaagacgctgccctcctgggcacgaacgtttagaatgctcaactcctctattgtgaccacaggaaggtggccctgaagatgcaccgaagacagctgggaggtgactgctgtactgtcagcctctctgtggaggcattcgtgcagtgccagctaaaagggaggtgaagggggatatcggacccagcgagggagttgctggtagaaggaaagctcttctcagtgtggctggattaagagcagcctagcagcttgggcacctccactctgtgcggtctgatggccccagcaaggtcgctgcagggacttcctgaggacttggtttggtttttttctggggttggaaatctgagccaatattgtgtctgttccatttgggtatgaagaggaagtctggatcacttaaactgactagttatttccgggtcataattttaaattaaagacatatcacttttttatacacaaaaaaaaaaa

SEQ ID NO: 267 - DNA, 7653 bp, Homo sapiens
agtatcgcaaaataggccaagtcgctgccctctactcaactcgcagggcgggaggatggagacagagggatgcggcgggagggcgggacagcccagtcgccgccaaggaggcgaagcggggtcggggtagctcacccgccccccgcagtccccgccccccgcagtccccgccccgcgcggcgccgcgcacgcctgaagtcattgcccgaggccccgccccctcgcggccccagccccggctctggctctgccggcggagggggcggagagaacccgcagctgcaacttcgcctggagcctttgagcctgggctcagccggggatctagcagccgtcaccgccgagtcgccgcttccccggcgcgggcctcagcccagccggcttggccatggcaggcgccggcagtgcggcgaatctggcccctgcgctccccgcccgtagctgagcagccgttaaccagccatcccgcctttcctcctgcccgtgtcgccgaggcccacgctccgcgcaagtttccgccgccgaagaagcaggaggacggacgtgaggagtcgggcgtccctggcccacccggccctctcgcccgcgatgtgggggcgcttcctggctccggaggccagcggccgggatagccccggcggagcccgcagcttccctgccggcccagattattcatcagcatggctacctgctaatgaatcattgtggcaggccacaactgttccatctaaccatcgaaataaccatatcaggagacacagtatagcttctgacagtggagacactggcattggaacttcctgttctgatagcgtggaagatcattcaacttcaagtggcacattatcttttaagcctagtcaatcattgattactcttcctactgcccatgtgatgccgtctaattccagcgcttcaatttccaaacttagggaatcattgacaccagatggctcaaaatggagtacaagcctcatgcaaacattgggaaaccacagtaggggggagcaggactcttccctagacatgaaggacttccggccacttcggaaatggtcatctttatccaaactcactgccccggataactgtggccagggtggcactgtatgcagagaagagtcaaggaatggtttggagaagatagggaaggctaaggctttaacatcacaactgaggacaattgggcctagctgtttacatgatagtatggagatgcttaggttagaggacaaggaaataaataaaaaacggtcatcaactctggactgcaagtataaatttgagagctgtagcaaggaggactttagagcctcttcctctactcttaggagacagcctgtagacatgacatatagtgccttacctgaaagcaagcccattatgacaagctcagaggcttttgaacctccaaaatatttaatgcttggtcaacaggcagtaggtggagttcccattcagccttccgtaaggactcagatgtggcttacagagcagctgcggacaaatcctttggaaggtagaaatacagaggattcttacagtttagctccttggcaacagcagcaaattgaagactttcgacaaggaagtgaaacaccaatgcaggttttgactggatcatctcgtcaaagttattcacctggctatcaggatttcagtaagtgggaatcaatgttgaaaataaaagaaggacttctaaggcagaaagaaattgtaatcgatcggcagaagcaacaaattacccacctgcatgagaggataagggataatgaattacgggctcaacatgccatgttaggacattatgtaaattgtgaggattcttatgtggctagtttgcagccacaatatgagaacacttcactccagacaccattttcagaggaatcagtttcccattcccaacaaggggaatttgagcaaaagcttgcatctactgagaaagaagttttacagcttaatgagtttctcaaacaaagactaagcctatttagtgaagagaagaagaaactagaggaaaaacttaaaactagagatcgatacatcagtagtctgaaaaagaaatgccagaaggaatctgaacaaaacaaagaaaagcagagaagaattgagaccttggaaaagtatctggctgatcttccaactctagatgatgtacagagtcagagtctacagctgcagattctggaagaaaaaaataagaatttacaagaggctttgatagatacagaaaaaaaacttgaagagatcaaaaagcagtgtcaagataaagagacacagttaatatgccagaaaaagaaagaaaaggagttagtaactaccgttcagagtttgcaacaaaaagtagaaagatgccttgaagatggaatccgccttcccatgttagatgcaaaacagcttcagaatgaaaatgataatctcagacaacaaaatgagactgctagtaagataatagacagccaacaagatgagattgacagaatgattttagaaattcagtctatgcaaggaaagctttctaaagagaaactgaccactcaaaagatgatggaagagctggaaaagaaagaaagaaatgtacagagattaacaaaagcattgcttgaaaaccaaagacaaacagatgagacatgctctttattggatcagggccaggaacctgaccaatctaggcagcagacagttctttccaaacggccactatttgatttgactgtgattgatcagctgttcaaggaaatgtcctgttgtttgtttgacttgaaagcattgtgtagtattcttaatcagcgtgctcagggcaaggagcctaatctttcattattactgggaataagatcaatgaactgttcagctgaagagactgagaatgaccacagcacagaaacactcactaaaaagctgtcagatgtgtgccagttacgaagagacattgatgaattaaggactacaatatcagaccgctatgctcaggacatgggagacaactgcattactcagtgatcaagtgttagtcccacagcaataatgacctgttgtttaaatgctgctgtgttatggagccataatggaaggttgcaagtgacatgacttgcacttagggattttttttctgtggatttgttttgttgaaggggagaagggaagtgaagagattttgaaggggcttatctaatcaggcaaaaagaaaaaaaatcaaattacctttggaaaatatgataaaatctacaaggaaaaaaatgtctatattctcaaactactgattgtaggaccaagctgtgaagagtacccttcacatgaaggagtaggattccttttaatcctatagctttgtgtgtttgtgtgtgcatgtatgtgtgttgttgtgtgtgtgtgcacgtgctttattcacaaatttataagggtttctagggtcagagcagagcttctgagaaaggcacacgctgtttattcttatatttctttcatatagaagcttgtgttgtactttgggattttcagtggctggctgaacaagagttcaaacagcaggcaagtgttgtcatggtagtacaggaggcaaaaccatttatattttgaacacttactgcactgataggatgtttgtggttgagctgattttagtactgtagataggtcagctgtttttccagagtgattgtggatttcccaagaggtgtgaaattttgacgtgatgctctttttccttagcattgtaatgtatgtgttacaagaaaggttaacataacttgaactaattttaacatgttccttactatttacaattttttatttatatgttttatatatatacatatataaatgtaaacaaagccatatataattaataaaggcattggatcattattataaaaggaagattaacaaagttaccctggaacaatagcttacttatccaaatctcaacatttacattttaacagttttgtatgtttcaaagttgaaactactgtaagagaaagccaatactatttatatctgaatcaacagtagcataaacattttttaattgagattgtattttaatcccttttgttaaagtacattaacaacagtttttcacaggatatgaacttggcgaaattagttcttaatctgaattacagggtattactatgaaatgcagttgattttgcagtagacgtacagtcatttaaacttccaaatgagtgttgtccatgtttctgttggtattttggaaggattatacattttattgccttcagcattgattatgttcttttgaatatacttagttttggcgaaagccttgtcctttgtaagttggtttgatcttgtgatgcaaccaagtctcatttaggtcaagactaaataagagatggaggggtagagggtgtgactcaagcaggataatattgatttgataaagagcatatcacatgcctgttttcttgccagataaagggcatagcacatgcctgttttcttatatactagaataaaggctctcctaggaaagatttttcttaaatatttaaaagtgaaaatgtgagacaaggccttcaaggagactacccaggaagatacacagtttaaaatgttggctatacagctctcaatagattattttatagttatagttgaataatcagttataatacactgtaaagaaatcagattttccttctgtttggtgtctgagtccttcctgctcttcttacttctgagaatctgggcactaagaaatcagtaagtacattgtagtgctcctgcatcccagagtccttaacctaaggagggtcttagtcactggtaagaacttggctttctaattatattcacttggtttttaacattagtagcttgacgataatcagggtatagtaaatttccaccaaaaatgtgatgcgaagaattctgccttggtcctttatggtaaaacagataataacgtctaaaatagatcagccacaagtgcagcaaatatttttacactctctttgaatagaatcccaaccaccctcccccatgattttagaaataaaggcttcctaaaataatagaacaaattggcaaacaatcactaattggaccagtaggttcttacttaaatatctctcctagatttttagtgtatgttttgggattttatgggtttatttatttttttttttttaagcagacgttacagtttgttttaatctactatagatacgtttttgttttttggcttagttggggataaaataatttatttgtaagttagctttctaaaacttagagaaagtaatttaattcacgtatcttaaaaataaaattccaaagttaaaaaatttctgacttagtaggaagttaacaaaactactgctgatgcatttcagtttccaaaatctgtaccctccccccataaaaaagggagttaagatgtgctagtttaagtagttagctgaattatagattgatcctcttaaaatctggagtttgtaaaggggcctacataaacagtagatagacttggagggattttgtgggggaattgaaactaatagtattctatctagtttgtcagtatttactttttgatttttatttttcagaaaattttcctttcccaggacaccctcttgtattagaatatcctcttctgtatcacattaaaaacagattttactgttagaccaaataagatgggcaaatagcaacactagagcatctcacccagtttgaactaggatgttcgtggaagttatgacaccaatatattcctgaaatgaaaattaacctaaattttaaagtgaatctatttgaaaatttacttagataatgaaacctcgttttaattgtgctttttgtgaatccaacacttgtttgcttagaaagtatcttatccagtattaatattttgttcttttgggttttaaagttgagcttattcagcctcaatcacattacagcaagcataaagtaacagttgactcaatgaaagacccaaattgcctgtacagataaaattcactgaatcaaaggcacaatagctatcttttcacttgagctcagaaaagtaaaatggcttaatttgaactattaattttcagtggcctctaattaaacaaaaacaaaaaaccacaaatactggctaggtaagatattcctgaggtcattttaaaagaagtgtggcacctaggattcaatatttaatgctaacagtattatattttagtgaaatttattttggtggtgacagtttattaaacctaattagacttctttcaatagcttgttgtagagacaatctcaagggctggaaagtgttgctaaaatgaatgtcatacatttctgatatactaaggagcttataaagtaattctttcatagtgcaagaattattaatttcttagaggatgtttttaaaggagctacttaattgggaaaatgttctttaaatatcagtaatagttcattaagtaacatagtagctaagaacatggactatattttcacagcatagttcagcttaggcacacctttagtttggattattggcattctcttacgtaggaattatatcattgtagatatgtaattatggtaataagcaattttcataaccatgctcactcagactatatcatttgaaactgccatgtttccatttttgacaattcatgttcacaaaacaacaggaacaatttcctatttggtataaagagcaaaatttccaactttgccccaaaatgccatgggtggcatattgccatatgattatatcatatatttaatcatgtatgggaaagattttggattttttttcttatttaaaaaagtgctaaatataagaatatagttttaaatcagcaagtctaataacactattgcagctgtacacagagagaaccttttgtgcctttttgcctgcagtaagcatttatttctattttacatgagttctaagaatgttgatgattattgcaccttgttcttctgtatataaacttgattaaggaatttttttttttaaagcaaggagccgttttttgttactaggtggataccttagtaaacatgaggggaattatcagatagatgtctttggagcccagccttccctgtgtagtgagctggaaactcctttagattgtattcattggtgtgtatgtatatgtacatatatgtataaatagttaaatacataaacataaaacttaacatcgcattgttgtgatgacaagaagtagtaaggtgctaggtggttacattaaaaagcacagcacagtgtataatcagtcactatgactggtggttttgtaagctgggttcagtttttgaaccacccagaatacctcatgtgtaaatacagtgttcatgacttaattgaaatacagttattgtttaaaaaaaaaaaaaaagaatgtgaagccactggttggcttatgccttctgatctatcattcttgcctctttttttgtaaaggggttttcttcttgttgttctgttttttaatagggtttacagctagaattttgaatgccaaagttctatttattaaattaagaaaaaagttttcaatgttaatggctagtatttttccactggactattgtttgttgatgttggaatttgtatttacagagaaataaattttttataaaaagaaaaaaaaaaaaaaa

SEQ ID NO: 268 - DNA, 1219 bp, Homo sapiens
cgccgccaaagaagcatagttaaagtctctcttcttcctgctgtcatgtctaagtcagagtctcctaaagagcccgaacagctgaggaaactcttcattggagggttgagctttgaaacaaccgatgagagcctgaggagccattttgagcaatgggggaacactcacagactgtgtggtaatgagagatccaaacaccaagtgctccacgggctttggttttgtcatatatgacactgtggaggagggggatgcagccatgaatgccaggccacacaaggtggatggaagagtcatggaaccaaagagagctgtctcaagagaagattctcagagaccaggtgcccacttaactgtgaaaaagatatttgttggtggcattaaagaagacactgaagaacatcacctaagagattattttgagcagtgtagaaaaattgaagtgactgaaatcatgactgacagagtcagtggcaacaaaaggggctttgcctttgtaatctttgacaaccatgactctgtggataagattgtcattcagaaataccacactgtgaatggccacaactgtgaagttaggaaagccctgtgaaagcaagagatggctaatgcttcgtccagccaaagaggtcgaagttgttctggaaactttggtcgtggtcgtggaggtggttttggtgggaatgacaactttggtcatggaggaaacttcagtggtcgtggtggctttggtggcagccatggtggtggtggatatggtggcagtggggatggctataatggatttggtaatgatggaagcaattttggaagtggtggaagctacaatgactttggcaattacaacagtcttcaaattttggacccatgaagggaggattggaggcagaacctctggcccctatggtggtggagaccaatacttagccaaaccatgaaaccaaggtggctatggctgttccagtagcagcagtagctatggcagtggcagaagcttagcaggataggagagccagagaagtgacagggaagctacaagttacaacagatttgtgaacccagcaaaacacagtggtggcatggcctagctgctacaaagaagacatgttttagacaagtactcatgtgtatgggcaaaaagctcgaggactgtatttgtgactaattgtataacaggttattttagtttctgttctgtggaaagtgtaaagcattccaa

SEQ ID NO: 269 - DNA, 300 bp, Homo sapiens
atgtggactgccctacatttggcctgtgccactggccaaccggaaatggtacatctcctggtgtccagaagatgtgagcttaacctctgcgaccgtgaagacaggacacctctgatcaaggctgtacaactgaggcaggaggcttgtgcaactcttctgctgcaaaatggcgccaatccaaatattacggatttctttggaaggactgctctgcactacgctgtgtataatgaagatacatccatgatagaaaaacttctttcacatggtacaaatattgaagaatgcagcaaggtatag

SEQ ID NO: 270 - DNA, 1650 bp, Homo sapiens
agtctgagcccagagagccgcggggaccatggagccggtgccgctgcaggacttcgtgcgcgccttggaccccgcctccctcccgcgcgtgctgcgggtctgctcgggggtctacttcgagggctccatctatgagatctctgggaatgagtgctgcctctccacgggggacctgatcaaggtcacccaggtccgcctccagaaggtggtctgtgagaacccgaagaccagccagaccatggagctcgcccccaacttccagggctacttcacccccctcaacaccccacagagctatgaaaccctggaggagctggtctctgccacaactcagagctccaagcagctgcccacttgcttcatgtcgacccacaggattgtcacagagggcagggtggtgactgaggaccagctcctcatgcttgaggctgtggtgatgcacctcgggatccgctctgcccgctgtgtcctgggcatggagggtcagcaggtcatcctgcacctgcccctatcccagaaggggcccttctggacatgggagcctagtgcccctcgaactctgctccaggtcctacaggatccagccctgaaagacctcgtcctcacctgccccaccctgccctggcattccctgatcctgcggccccagtatgagatccaagccatcatgcacatcttctcaagtcttaggattgcagcaacacgctcggctgcccaaacccaaggcgaagaccttgccagagttcatcaaggatggctccagtacgtacagcaagattcctgcccacaggaagggccacaggcccgctaagccccaaaggcaggatctagatgatgatgaacatgattatgaagaaatacttgagcaatttcagaaaaccatctaagtgctggaggaaccacgcttcctaactgctgcttctcagggaatccgacaccagccaaccattttaagcctctaaaagacctcgggcaagtctcacagaaactgagctgcagacggggagtagctttgtggaaactgatttgatggacactgcaccagcttccttcaggttctagattcttgctacttagggcgggctggtttggacctaacatctcgcacgtgactccctcagcctcagagccttgggatgcagagcagctggcagggttcctctcaatcctgcaaccccagctgtcccaccggtggatgcagaggggaatccgaggccatcaaccttggtgacagcagcgcagtgccaatgctgatcacactgcatgggagattttgttaacgtctgccacccccactctcacccccaagctctaagcccccgggaggcctggactgtcttcctcatctctgtagcaccaagcctgatagatctgtatatggtaaacaggggtttaaccacatgtggttaacatggattaatgtgggaacttggcttcaagaacacaaccttaggaccttgggccccaaaagctggtggtgaaatgaggaggagccaatttaagaagacccttatggagacctgaggctgcagaaactggtaggtttcatcaggtggttaaagtcgtcaaagttgtaagtgactaaccaagattatttcattttaaaaccatagaataaaaatgacacctgagcttctctatgaatgaaaa

SEQ ID NO: 271 - DNA, 1092 bp, Homo sapiens
aggtgggaggaaaccgcctggagccgccgggagtggacgccgccgaggcccggagtcgcgcctgcagacacagcatctactcagcgtgggtcacctctgtgaacatcactgactgcaagcctccctcaatttctggtgcagcccatcagggacccacagcgcctgggaggatggtgcggatcttggccaatggggaaatcgtgcaggatgacgacccccgagtgaggaccactacccagccaccaagaggtagcattcctcgacagagcttcttcaacaggggccatggtgctcccccagggggtcctggcccccgccagcagcaggcaggtgccaggctgggtgctgctcagtcccccttcaatgacctcaaccggcagctggtgaacatgggctttccgcagtggcatcttggcaaccatgctgtggagccggtgacctccatcctgctcctcttcctgctcatgatgcttggtgttcgtggcctcctcctggttggccttgtctacctggtgtcccacctgagtcagcggtgacctctgagggctgataggggtgggtttgttgagagggacttgctgggccttggtgtgagagcaggcatatttggaggggatctggtggtgccttgaaggtatgatcagagaggggaccacaggtgtgtgtttcccctttgtgttaagcgtgaggcagagggagacgttagtccagcatttccaaagtgtgggtgggtccgttggttcccaagatacttttaggtggtatggggcctgcattaagtggcacaaaatcagagcaagaaagcgatgcccttcccaattctctcaatccttttatgccgagaagatctcagctggatgccaacatgttccgatgcctgtggaagacatgccgacgtctcctctgcctagggagcaggacttgggcttagggcaggtggaaaaaattccagacttttttagcactgtttttgttttaatggtatatttttattggctactttattgtttaggacaagtggtagtggcattctatttattgtgaccttttcaataaatagatttaagtaaaaatgaaaaaaaaaaaaaaaaa

SEQ ID NO: 272 - DNA, 1572 bp, Homo sapiens
ggctggtttggatccgggtcagtcgggtgccgagatttgggagagacgctctgaactgactgccccgcatcaccggagcgtcccagctgcgaggagtgtaaacaggaacatcgataagtagtgtaaaaacttgcacaatgaaatccgaagccaaggatggagaggaggagagtctacagactgctttcaaaaaattaagagtggatgcatcagggtctgtagcatctctgtctgttggagaaggcacaggtgtcagagcaccagtcagaacagcaacagatgataccaaacctaaaaccacatgtgcatctaaagacagttggcacgggtctacaaggaagtcttcacgaggagcagtgagaactcagcgtcgtcgacgttctaagtctcctgtccttcatcctccaaagtttatacattgcagtacaatagcgtcttcttccagcagtcaactcaagcacaaaagccagactgactcacctgatggcagcagtgggctgggaatttcatcccctaaagagttcagtgcaggagaaagctctacttctctcgatgctaatcacacaggggcagtcgttgagcctttgagaacttctgttccaaggctcccatcagagagtaagaaggaagactcctctgacgctacccaagtcccccaagcaagtctcaaagccagtgatctctctgactttcaatcagtttccaagctaaaccagggcaagccatgcacatgcataggcaaggaatgccagtgtaagagatggcatgatatggaagtgtattccttttcaggcctgcagagtgtccctcccttggctccagaacgaagatccacacttgaggactactctcagtcgctgcacgccagaactctgtctggctctccccgatcctgttctgagcaagctcgagtcttcgtggatgatgtgaccattgaggacctgtcaggctacatggagtattacttgtatattcccaagaaaatgtcccacatggcagaaatgatgtacacctgatagcaagaagctaattcatatgctttaaaccaatgaaggcttgtcaaagagatttagttaatggcagaccttgtggccactttgtgtgagaagacatctctttctgctcactgtgcttgcaataaaaacttttcttggcatctcagttaatcttcattctttcaacttactctcttgagttcttacatacacttcaaggcgagcagatcaaagaaaaatcccccttatttagaaatgttcctgggggatgaagaaaccataattacttgagactggcagcagtgggtatatggtaaaagcctttgtaaaacagtgcatttttcagatttgtttaaggtttgctagccaaggaaagtaaaatgtgattttgtaactgcactaaacatttgtcatgctgtagttgccagcccagaatattagaagttacaagactgatttaaaccgtctctgatttaatgcaagatatattgtgtctataaaggtttctcttgttattgttaagccagagatctaaggtttagattcaatttgaataaactagctggcctgccctcta

SEQ ID NO: 273 - DNA, 1592 bp, Homo sapiens
tgcccgtggacgccgccgaagaagcatcgttaaagtctctcttcaccctgccgtcatgtctaagtcagagtctcctaaagagcccgaacagctgaggaagctcttcattggagggttgagctttgaaacaactgatgagagcctgaggagccattttgagcaatggggaacgctcacggactgtgtgattctcaaagaccaggtgcccacttaactgtgaaaaagatatttgttggtggcattaaagaagacactgaagaacatcacctaagagattattttgaacagtatggaaaaattgaagtgattgaaatcatgactgaccgaggcagtggcaagaaaaggggctttgcctttgtaacctttgacgaccatgactccgtggataagattgtcattcagaaataccatactgtgaatggccacaactgtgaagttagaaaagccctgtcaaagcaagagatggctagtgcttcatccagccaaagaggtcgaagtggttctggaaactttggtggtggtcgtggaggtggtttcggtgggaatgacaacttcggtcatggaggaaacttcagtggtcgtggtggctttggtggcagccgtgctggtggtagatatggtggcagtggggatggctctaatggatttggtaatgatggaagcaattttggaggtggtggaagctacaatgattttggcaattacaacaatcagtcttcaaattttggacccatgaagggaggaaattttggaggcagaaactctggcccctatggcggtggaggccagtactttgcaaaaccacgaaaccaaggtggctatggcggttccagcagcagcagtagctgtgtcagtggcagaagattttaattaggaaacaaagcttagcaggagaggagagccagagaagtgacagggaagccacaggttacaacagatttgtgaactcagccaagcacagtggtggcagggcctagctgctacaaagaagacatgttttagacaaatactcatgtgtatgggcaaaaaactcgaggactgtgtttgtgactaattgtataacaggttattttagtttctgttctgtggaaagtgtaaagcattccaacaaagcgttttaatgtagattttttttttttgcacccatgctgttgattgctaaatgtaatagtctgatcgtgacgctgaataaatgtctttttttttttaatgtgctgtgtaaagttagtctactctgaagccatcttggtaaatttccccaacagtgtgaagttagaattccttcagggtgatgccaggttctatttggaatttatatacaacctgcttgggtggagaagccattgtcttcggaaaccttggtgtagttgaactgatagttactgttgtgacctgaagttcaccattaaaagggattacccaaacaaagtcatggaatggttataaaagtgattgttggcacatcctatgcaatatatctaaattgaataatggtaccagataaaattatagatgggaatgaagcttgtgtatcatccattatcatgtgtaatcaataaacaatttaattctcttgaatgaaaaaaaaaaga

SEQ ID NO: 274 - DNA, 3615 bp, Homo sapiens
agaggcccaggaggctgggtgaggcgctgagacggtttggcggtgagtcctgggccaggcgcagctgaaaggcccgcaacccgggaaacgtcaaaacaaacagaaggacttgggattccggagcagtcgcccctatcgctgctcctgcagttgcggacgccaccgaccccgccgccggaggactgggcactgaaaggcctctaggcctaggcgcggcccgcggagccagacgtgttgctgccgtgagtaaaacgagcgccctctccgcactcgtttacaaattaaaatggaggaaatttcgttggccaacctggatactaacaagctagaggccatcgctcaggagatttacgtagacctgatagaggattcttgtttgggattctgctttgaggtgcaccgggcagtcaagtgtggctacttctacctggagttcgcagagactggtagcgtgaaggattttggcattcagccagtggaagacaaaggagcgtgccgcctcccgctttgctcccttcccagagaacctgggaatgggcctgatcagcagctccagcgctcacctccggaattccagtagctgcaaaatgagagtctgaaagtggccaggacaataacatagactggtcctgtggcttcgaggagtaagctaagtagaaaaaagtaggaaaatcagacaaaagttttaattcccccttgaagatcctagcatttaaaaactcaaagtggataatttaggaatcctttttttaaagtgtattacctggagcaagctctgaagccctgggcaggaggagctgcacagcctgcgggccatgcagtgcctgttgatctctaaacacaccaggatgtgcgcaagatcctgtagtgcccccagtgcacaggtgagcagttgtgtgcccagcatataaaatttttggttcctcagcctttctgtctgcctggtgtcaagggcttcctggacagtttggacgttacagttcgtcaggccgtgatcagtggcctgcagtgggactgctcctttgatatctgaacccctgttatgggcttctctgagacaagtaaatgtcaggtgcaagatctggatactaacagtttcagtttgggaaatccaagaaaaagaattatcaagtttgatagggaagctctgtagccttgactccagcaagaagaaaaggtcaaaaccacgtgtttcccaaaagtccagactacaatgattcagctgacttgaggacaaggcctagcatttggctgagcagagccctcttccttgccctccaacctggtggcataggcttggcaaatggacaacttggttgtccagacaggttgaggattcggttatgatcccctggggaggtagcagggacctctgcaactatgcatgatttctcaaacttcaagattcatgtctggatgtattatgctgtggatataagtttagtagggcggtcatttcctactctgagttactggttacctagccagtccatgggtgtgacttggtccttaagtcaggtcactatctgcctcccaccctgggggcaggactgaagtatagaagagcatcatggctgtgcaggaggctgtggtttgaaaactgagcccagagggcactttcagctgccctcaataatgtgaatggattagtgctaggagccaaggagcaggactggattatctcatctgactgtgtgcagaatcctgttgaatgtccctgttttctttggttgggcagtcagagctctgctatggtgaacatccagactgtcaccactttctgtctgccgctcgaaagggatagtcctttccactcggtcccctttggatcttcttgacaacaggagcagtccttttattgttagaagtcagagaaagacctccagaatctcctgactttagggaatggtataggggaagatgggaagtaagagtcacatatcaaaactaccctccactttattccctgagcgagggtttatgaagtataaaggggtgggagccccgaggtgagcgggaacggtgctgctttatttgaaatgttttcttacctcattctgtgccccagtagggggtccagcctcatctgtctggcttggccctgtgttcctcctgtcccctgctccactgcctatctggtgccccaggtgctgcttgctactccagctgtcacattgaacagtttcaattcagctcttaatgctcctgcttccgaagcctgcccaatttctttttcttggcctctgtttttttttttctttctttttcccttgtttttgtagaagactcagaggagaatctttcttatggctccctctgttgagattggaattggaagagaacttaattttttgtatttaaatgcagtgtcatgcctataagcatttctcctatataggactgctttgctagtgtgccctcttgctgtgtcttacttcataaggagttgtatcttcccacctccatttcaatactgccggttaggacctaagtagaagagcagtaaaggctgattgacacacagggggatggagttggtccttgtccattctctcacccttgctgtgcatgtatcaatccttatcccagaaggtactatttagactgtatagactgatttagattacatactttagaggattaaggaaaccatagagtttgggccttggaactgttactgccttgtcctagagttgtcctgatcaggcttggggcctagttacagattagtcttaaagaattgcattaacttaaaaaaaaatcaaaccttggcaagagctaaaataatttggagatatctttgcccttgacttgtagacgacatctaagaggatgaagaaaggagagtctaagtgagactctggcctacttcctaacaatgtcttggaagtgggatgatggtaaaggagaaaggccacagtccaatccctctgccttcagatagggaactcaaatcctgaaattactgttttctttctggccttttctcctggttagaggaggaagcggaaagtagttttgagtaatactttgttcatattaccccccttttgttttttgtttctggcccctctaccaatagggcagtagcctcctgccctggatgggtataaggtgggcttggtccaacaggtgcccagagggtacatactcctttctggggagagaatgctccctaccatatagttgacagtggttaggaactctccctttccctacctaccttccttttaatagcagaattcctatttttcccttgattatgtgtattgatcaccctgcaatcctattatgtatctgagtgtgtgtatgtgtgtgttatgggggaaggggggggttctttaaaatttctgtggtttgtggctttttcttccatacattagttcccaccatcgcatgcccagggaccactgcctggcattatcgcatgctgggatcatcgggggagggtagtgaagctcaccactgtcctttgttttggagatttttatttttgcataagtagtccatcctatacagatagctgattaactgtattcccctttcccctatggctgctggtgtaaataaactgcatctccccattggtaaacagtaataaaattttaaaaaatg

SEQ ID NO: 275 - DNA, 438 bp, Homo sapiens
ctcagctgccgccaagctgctcggtccttccgaggaagctaaggccgcgttggggtaaggccctcacttcatcctgcgactagcaccgcgtccggcagcgcctgccctacactcgcccgtgccatggcctccgtctccaagctcgcctgcatctactcggccctcattctgcacgacgatgaggtgacagtcacggccctggccaacgtcaacattgggagcctcatctgcaatgtaggggctggtggacctgctccagcagctggtgctgcaccagcaggacgtcctgccccctccactgctgctgctccagctgaggagaagaaagtggaagcaaagaaagaagaatccaaggagtctgatgatgacatgggccttggtctttttgactaaacctcttttataacgtgttcaataaaaagctgaacttaaaaaaaa

SEQ ID NO: 276 - DNA, 3487 bp, Homo sapiens
ttgggtgggatgggtgtccctgtccccagcccaccatggcttggggtgggtcatctgtggccgttagggtgcgtccccctgctcccccgcccagggccagggaccactcgtctcccactgggggaaaaagggggtcccgggtgggcgactagtacgtgtgaagctgagctcagggccggacctggggagcgggggactccgctcgggcaggaggcagcggccagggctgggccagggcgagagtcggtcctcccggtgctgggctccccgtctgccttgaggggtgtgcatggatggagggtgcctgaggctgcaggcaggggatgaccgggacaggcctgggctggggcagttggaggtatgggcactggtaggggacagagggttagggatcatgttggggggccagggacagtggaggaagggcccatggaagatggggctgtttggtttgaggctggagtgcttcctttgaaatttaattactgttttttaagtggtagggctcacagactgtgtgaagtcctgtgtgaagtgctggtgtggccacctacccaggtgtccctcccttttgttttggaggcctgtgtccttgtccaggggcagccctccttcccaggtgtggccagaagaaccccccatcccaagacttgaaatgtctgttgctcacctctgtccctccagaactcggcttccccatcttcacttgcaaaacaagtgcagccctgcgcccatcagcaccccctccggtgtgcacacaggccagtgagcggtggccaaccagcgcaccccactcccccaacctccacaacccatcaagcggaggccgcctccgctaggggaggaccatgggctgcaccctggcctggggacctacagggtgtgggttagacgcattcccactgggcggctcctttctgccccgaagcccacccctgtggcgaggccctaggagacctcccgtggggccgcctctacagacagcactcagcctcctgggctgcctccagccaggcccagcacatgcctgccctccagaaaaatacgttgctttccagaaggaggtggggggccatgggcaggcactgtggacgctaacctcggcccctccacccgttcctcagggcccacgtccagggggaccaagacctgcattcctagggccgcaggtggctcagtggtgcagaggcatccagaccttctgctgaactaagaaccacccagcctagagggagcctttctctgcctcttcctcccctgtcttgggcacaggtggggttggagcccccatggggcccgctgggaacctggaccaagccttcctcggagatgggaggaagccgcggggtggagcaggggcaggtaggtgaggttgagctgcacttgagttccctctggagtttccttcatctgccccacacccaaatttgcactttaatttgaccatccctgggggcctggctgctgacagaagggctctctctgccctccactccaaagtgggtgcccccccacccttggccaggacagggagggagccgctggctgctgccggaggtggtggctgcacagaggacgcctgactgctgttcaggcccgcacaatgtcccgtgccccttcctcactcgtttgtaatcgccgtctgttttgttctgggtaaggaaggcaagagctatagataaaacttaaataataataatttaatgtgaatgggttctgagctctccctgcgccccgggcgggccaggccgagcattttgcactaatgtgtcccacggtgggcgtgagtcgggagtgtctgtggacgtgcgtggctgctgagcggacctgctgtgtgctccctccacgtcctgaatgtaccgtggggcgggggcggcggcccgggctcagaggggccttccagagtgccttagcatcctttgatcatttttcccaaggaaaccaattaagaaagccggacccttcccccctttgtttacaagatgactaattctagaatccggggttgtcctgtcctgtgagtgtgaccctgactcatccagaccctgtagagagagacgagccactcagtatttatgagatgtctgcacctttatccctaagcctgactattagcaatacgcatatcctatatagaatctattacagagctacgttatctccacaccttttgaggaggacagaagggactggaccgtgttggagctgccgcctggcaggtggtgggcctgggatctagccgcctctcctgccctgccttcctcttccccaaggggatgggcccaggaggcagctgggttgcatggagaggtccaggagggaccggaggtgtgacagatactgtgagcccggcgggccgcgcctggctgggtgcctcggtacttgaattctgtcttgttttccgcattgtgtctgtccacccgagttctctgtcgtcacttaactttgcattggatttggttgttgtactttgcccctgaatgtggacaaagctgtgggcaagaggtcagcaggacccgcctgggggtgccggcgttggtgactgcgggtcggggctcctagaacataggagccggctgcctggcctcctttctcctccaggaagagtcattctttggcatttgtgtttagagccaggaggaaggcggaaggtagggagggagggctggtccccctctgagggggctctagtgcctgaccctgacctgtcctcattcgacagctgaaactgttaagcgctggcccagtccccccaccccacccagccgtgtactgcctgggctcccctcaaagggaaatttttacggaaacatcttggcagcaagtggaaaaagatctatggcccatgaaccaactgaaaactccaagaaccctctgtctgcctctgccagcagcgagtcctaagcgcagaatccagagctcgtagctgtcctcagctgtaactactgtttcagaatgttgctgctgcatacatttgtcatgtcagccagccagctccgtgggtgagagtgtgcgtgtgcgcgtgtctgtgtgtgtgtgcgtgtctgtgtgtgtgcacgtctgtgcgtgcgcgtctgtgcatgtgtgtgtctgtgcgtgtgtgcgtctgtgtgtgtgcgtctgtgtgcgcgtgtgtgtgcgcgtctgtatgtgtgcacgcgcgtctgtgtgtgcacgtgcgtgtctctgcacgcgtgtctgtgtatgtgtgcacgcgtgtgtctgtgtgtgtgcacgcgcgtgcacgtcaccaccggagcatttagggtttggtacaagatggttctaaaatggcaaaggtttttcgtgtttgtttgttttgtttctttggaaaaagaaaaggaaaggaaaatcatgcagaatcgcaagcattcagactggacgaccggctcgtattccgatcagtcgcttccattgttagcatcgtacacgattgtgatttttatgtcaaaagaagccaaaacttgcaatactatttttagcagac

SEQ ID NO: 277 - DNA, 4854 bp, Homo sapiens
gtttttaaaagctttgtatctcttaaaaccatgcagcagtcagtttccaagttttgctttgcaatcagtagttttcaagggagcttttaaagctgaactgaaatgtttgaaatgtggaacactcttgaccatgaaatatgttctacttacatgcctcagcctttaaaagttctttgcattagagtcaaggattacattcttcctggagccaagcatggggccagctgtaaacaagccgcatttctccttggggagactgataatttaaaaggtttgttgtgtcagaaacattcccagcttcatcaccaaccctttccttccacctctgcccactggagaccacttatatcccgaagcggacgcggcagctgaagtcaggaaaccatgcatcacattagcaggagccaactgcagactttaaactccgttcaacatgtggatgcggcagagaaatgacctgtccagacaagccggggcagctcataaactggttcatctgctccctgtgcgtcccgcgggtgcgtaagctctggagcagccggcgtccaaggacccggagaaaccttctgctgggcactgcgtgtgccatctacttgggcttcctggtgagccaggtggggagggcctctctccagcatggacaggcggctgagaaggggccacatcgcagccgcgacaccgccgagccatccttccctgagatacccctggatggtaccctggcccctccagagtcccagggcaatgggtccactctgcagcccaatgtggtgtacattaccctacgctccaagcgcagcaagccggccaatatccgtggcaccgtgaagcccaagcgcaggaaaaagcatgcagtggcatcggctgccccagggcaggaggctttggtcggaccatcccttcagccgcaggaagcggcaagggaagctgatgctgtagcacctgggtacgctcagggagcaaacctggttaagattggagagcgaccctggaggttggtgcggggtccgggagtgcgagccgggggcccagacttcctgcagcccagctccagggagagcaacattaggatctacagcgagagcgccccctcctggctgagcaaagatgacatccgaagaatgcgactcttggcggacagcgcagtggcagggctccggcctgtgtcctctaggagcggagcccgtttgctggtgctggaggggggcgcacctggcgctgtgctccgctgtggccctagcccctgtgggcttctcaagcagcccttggacatgagtgaggtgtttgccttccacctagacaggatcctggggctcaacaggaccctgccgtctgtgagcaggaaagcagagttcatccaagatggccgcccatgccccatcattctttgggatgcatctttatcttcagcaagtaatgacacccattcttctgttaagctcacctggggaacttatcagcagttgctgaaacagaaatgctggcagaatggccgagtacccaagcctgaatcgggttgtactgaaatacatcatcatgagtggtccaagatggcactctttgattttttgttacagatttataatcgcttagatacaaattgctgtggattcagacctcgcaaggaagatgcctgtgtacagaatggattgaggccaaaatgtgatgaccaaggttctgcggctctagcacacattatccagcgaaagcatgacccaaggcatttggtttttatagacaacaagggtttctttgacaggagtgaagataacttaaacttcaaattgttagaaggcatcaaagagtttccagcttctgcagtttctgttttgaagagccagcacttacggcagaaacttcttcagtctctgtttcttgataaagtgtattgggaaagtcaaggaggtagacaaggaattgaaaagcttatcgatgtaatagaacacagagccaaaattcttatcacctatatcaatgcacacggggtcaaagtattacctatgaatgaatgacaaaagaatcttctggctagggtgttagatatatttatgcatttttggttttgtttttaaatcaagcacatcaacctcaagcccgtttagcaatgaggcagtgtagatgaatacgtaaaataaatgactttaaccaagtagctataatgggacttagcactgtatgcatacttaaaaaggttttgaaaaacaaactacttgagaaatatttgtttatatttttctctaacatcatgctatgtgtcagtctgaacatctgacaacagaaatttcagttattattctagctaagttttgaaaacatttgtcatgctgtttaatagaaaactgcaaaccagagacactgactccattaataaaccatattttgtgccgttttgactgttctgaccaaatactaatgggaacaattcttgacgtttttctgttgctgattgttaacatagagcagtctctacactaccctgaggcaactctacattggaacactgaggcttacagcctgcaagagcatcagagctgaccatacatttaaacagaaatgctggtttatttgcaaaatcaccagtatattttctattgtgtctataaaaaatcagtcatttaagtacaagaatcatattttccattcctttttagaaatttattttgttgtccctatggaaatcattcacatctgacaatttatatgttaaagagttttactctctctattttggtccaatttgtatctagtggctgagaaattaaataattctaaagtatgaagttacctatctgaaaatgtacttacagagtatcattttaaaatggatgtctctttaaaaattttgttacttttaccaacaatgtaatataatttatgtatattttattaataatagtgaattccttaaaatttgttctatgtacttatatttaatttgatttaatggttactgcccagatattgagaattggttcaaatattgagtgtgtttcaatatattatctggcttatttcaacatgagtaatatgagcaaaataagttaaaacctgcgtctgatcaattttcctcatgactagaactaaaacagtaaatttggacaatattaagcctcaaataatcatctccaaactccttctaacactttttaaatcagattggaagacatggacaaatcaggttcatgtgttgcatctttatgtcctttgccaatatccaagatcatcacatatggtagatattcacatggagtttcaaattcagaatagattaccattaccttcctgcccttacacatcctactccttatttaaaagttctatttgtgacttttcatttcctgaaagtttaaaaatacaatttgagaatgtttataatacattctctcctgtcttttcacggttacgtctgttattgctgaaatacaccacattttctttgttctggtcaaggttaactcaatatctgtgtgaaagagaactactaacaacgttacaatagaggctagatttgaaaaaaaaaatctatagatctaattgatacaattgtagaacaaaatgtcaaaataatgttttaagtataagagaagatggaccaaggagagagagatcatttgaaaatctaattgtagcttttctaggctcacattcatgtactacttttagcacccttatgggctgtgctcgccccctggacagttgagctttggattatcttcctcttcaattttccctctattgacccgagtgtctccctctgcttctacagatttatagtactccttggctcttttgagtctccacttttactcactgtctctgggatttttaagatccttttcttctcttataaatcatcctcttaatgaaaattagcctaacaaaagtttggagactggaatcctactttgagccactgacttgaaataactcttttggcaagttgcctgacatcctgtcttaccaaggtggcatatttgcatttttactgcttaaaacatttttttttttttaccatctttatccaaatttatcatattgatggtaggactaacaggctttttagaagctggctttaactttgagtctcaagctacaatgctgttgggcagcctggtcttcccacgtgagggtttaactttgtttatttgcctccagttattccaaaatgcttattaaatgaaagtcccaggaacatgtttattttagtcacctttgctttttaacaattttgttttgtaatcaatgagtaattcatgatgaattatttttgactaatggatagccgaaggccaggcttttaattctaataggtaatgttcttcttttgtcttattgaaacaatgagaatactctgtgcatttcaaatgcactccgattatgctgtggttttattcacataagcacaatatgtgttttatttataacttcataacaaacttataatataataatttaccttagcagacatgcaaaagcttattcttgtgtgacttactttctttaagctaataatataaaaataaatatgtatcttaaaaatctataataaaacattagaaattaaagatatgtgctttttattttgcagatgagttcatttgcttttgtagatgtgttttcagagctaggtacagaggaatgtttgctacctttagcggtgaaaaaagaaagagagtcaagaattttgttggattgtgtttgtgtgtgcatatatttgatatcatcattatatttgtaatctttggacttgtaatcatagcctgtttattctactgtgccattaaatatactttaccttatacataacgaataaaatacctagaagtagatttatttacaaaaaaaaaaaaaaaa

SEQ ID NO: 278 - DNA, 1913 bp, Homo sapiens
atgagcgacatccgccactcgctgctgcgccgcgatgcgctgagcgccgccaaggaggtgttgtaccacctggacatctacttcagcagccagctgcagagcgcgccgctgcccatcgtggacaagggccccgtggagctgctggaggagttcgtgttccaggtgcccaaggagcgcagcgcgcagcccaagagactgaattcccttcaggagcttcaacttcttgaaatcatgtgcaattatttccaggagcaaaccaaggactctgttcggcagattattttttcatcccttttcagccctcaagggaacaaagccgatgacagccggatgagcttgttgggaaaactggtctccatggcggtggctgtgtgtcgaatcccggtgttggagtgtgctgcctcctggcttcagcggacgcccgtggtttactgtgtgaggttagccaaggcccttgtagatgactactgctgtttggtgccgggatccattcagacgctgaagcagatattcagtgccagcccgagattctgctgccagttcatcacctccgttaccgcgctctatgacctgtcatcagatgacctcattccacctatggacttgcttgaaatgattgtcacctggatttttgaggacccaaggttgattctcatcacttttttaaatactccgattgcggccaatctgccaataggattcttagagctcaccccgctcgttggattgatccgctggtgcgtgaaggcacccctggcttataaaaggaaaaagaagccccccttatccaatggccatgtcagcaacaaggtcacaaaggacccgggcgtggggatggacagagactcccacctcttgtactcaaaactccacctcagcgtcctgcaagtgctcatgacgctgcagctgcacctgaccgagaagaatctgtatgggcgcctggggctgatcctcttcgaccacatggtcccgctggtagaggagatcaacaggttggcggatgaactgaaccccctcaacgcctcccaggagattgagctctcgctggaccggctggcgcaggctctgcaggtggccatggcctcaggagctctgctgtgcacgagagatgacctgagaaccttgtgctccaggctgccccataataacctcctccagctggtgatctcgggtcccgtgcagcagtcgcctcacgccgcgctccccccggggttctacccccacatccacacgcccccgctgggctacggggctgtcccggcccaccccgccgcccaccccgccctgcccacgcaccccggccacaccttcatctccggcgtgacctttcccttcaggcccatccgctaggctggcccgtgtgtgccttctgcgctctcgctggacgaagcctttcgagatggaaggggtggccggactcccagaagagaacctcggggaaggggtcgggcagcccctccccgccggcagaaccgtcttggtgtcacggagtccaggtgcttcccacccggtcgcattctttgacatgcagattggatggtggagggaagagtccagcctctgccgagagcctgctgcgtgcatttttaaaagatgccgatcctgggagcctctgttctctgcgcatttcagacacagcctgtgtggcgaggagtgtgacggcaggagccacgggtgcaagcccgtgtgtctggcctctttcctcgtgaagacgatgtgtccccgccagaaaaagtgggcaccttctgcagccccgtgagctgagcccaggctgcgtagtgaccacaagcttatgtgcagcactgctcagggaggctgtcaggaattcccctcacctcggaaaggaacttctcagttttattgggggtgtctaaatttcctttcatatgttcaaataaatttttctaaacagt

SEQ ID NO: 279 - DNA, 2096 bp, Homo sapiens
attctggcaactgaacgttggcagtaaacgcagcttagttgtctcagaggactcacaatgggatgtgcttatagttgttgcctcgaagtgtgttgtggcgaggatgaaatagtgtatcctaggatgccaggggaatccaccgtctgccaccgcgagcgtgagaagccaatcacctatcactggtatcactggcatcccggccatatataccctagagttgcatcaatggaagattacgatgaggacctggtgcaggaagcttcatctgaagatgtcctgggcgttcatatggtggacaaagacacagagagagacattgagatgaaacggcaactacggcgactacgggagctccacctatacagcacatggaagaagtaccaagaggcgatgaagacatccttgggagttccacaatgtgagcgtgacgaaggctccttgggcaagccattgtgtccacccgagatactctcggagacgttgccaggctctgtgaagaaaagggtatgctttccatcagaagatcatctagaggagtttatagcagaacatctccctgaagcatccaatcagagtctcctcactgttgcccatgcagacacaggcatccaaaccaacggtgacctggaagacctggaggagcatgggccagggcagacagtctctgaggaagccacagaagttcacatgatggagggggacccagacacactggccgaacttctgatcagggatgtacttcaggagctgtccagttacaacggcgaggaggaggacccagaggaggtgaagacatccttgggagttccacaacgtggtgacctggaagacctggaggagcatgtgccagggcagacagtctctgaggaagccacaggggttcacatgatgcaggtggacccagccacgccggcaaagagtgacctggaagacctggaggagcatgtgccagggcagacagtctctgaggaagccacaggggttcacatgatgcaggtggacccagccacactggcaaagcaattggaagactccaccattacaggcagccaccagcagatgtcagcaagtccttcctctgcacctgcagaagaagcaacagaaaagaccaaagtggaagaggaagtgaaaaccagaaagcccaagaagaaaaccaggaagcccagcaagaaaagccggtggaatgtcctgaaatgttgggacatttttaatatattttagagacctctgaagattcctcgaccaccaggaagggccccgacgtggggatgtcaacatggctcagacttgatgtggatcgtgatcatttcgggaaatgtgttactccaaaaacttttataatctttgcttaatttgtttttaaatactttcctggctgggcgtggtggcttatgcctgtaatcccagcactttgggaggccgaggcgggtggatcacctgaggtcaggagttaaagaccagcctggccaacaaggtgaaaccccgtctctactaaaaatacaaaaattagctaggcgtggtggcgcactcttgtagtcccagctatttgggaggctgaggcaggagaatcacttgacctcaggaggcggaggttgcagtgagccgagatcatgccactgcaccccagcacctggctacagagtgagactttgtctcaaaaaaaaaaaaaaaagaacaaaaaaattctgactttaacctctgtttttcagagggcacaaattgttcttgtattgtttccattttacatttttttcttgaagttattttccaattgttttcattctttctgaagttttgtttactcggttttaagtttttgtaattttgatagacttttgtgctttcattttcttaatgacttttacctcatttttaaaacaaatccatagtatggtaagttacatcaatatggagtatttttatgttttgtggtgatttacattctgtatgtattttacatatataaatgttaatggcctggtgcaggggctaccacctgtaatctcagcagtttgggagaccaaagcaggacaattgcttgatcccaggagtttaagaccagccggggcaacatagtgagacctcatccctacaaa

SEQ ID NO: 280 - DNA, 685 bp, Homo sapiens
cttcctaagccggcgctcggcaagttctcccaggagaaggccatgttcagtacgagcgccaagatcgtgaagcctaatggcgagaagccggacgagttcgagtcccgcatctcccaggctcttctggagctggagatgaacttggacctcaaggctcagctcagggagctgaatattatggcagccaaggaaattgaggttggtggtggtcagaaagctatcataatctttgttcccgttcctcaactgaaatctttccagaaaatccaagtccggctagtatgtgaattggagaaaaagttcagtgggaagcatgttgtctttatcgcttaaaggagaatcctgcctaagccaacttggaaaagctgtacaaaatataagcaaaagcatcccaggagccatactctgacagctgtgcacgatgccatccttgaggacttggtcttcacaagcaaaattgtgggcaagagaatccgcgtgaaactagatggcagccggctcatgaaggttcatttggacaaagcacagcagaacaatgtggaacacaaggttgaaactttttctggtgtctataagaagctcatgggcaaggatgttaattttgaattcccagagtttcaattgtaaacaaaaatgactaaataaaaaatatatattcacagtaaaaaaaaaaaaaaaaaaaaaa

SEQ ID NO: 281 - DNA, 1411 bp, Homo sapiens
gctgcggcggtggcgatgcaggaggccggccggggcgcggagggaccgacggacgcacgggcaggcggccaggcgccatggagtgcggccctggggcccaggggcgcgggccggggtgggcttcccacggcgtgacatggagacctgtggttgcgaggctccctggggctcggcttggaccgcgatggggctgggccctggcctcctaacggggctgccgtctggggccgtagctgggggggcgccctcccccctgcccgcgactcggagcacccccacccctcccctgccgggccaggccgggcggcgttgttggctggggccccggtgggggcctggcccgggcggcgcccgccatgaacgggctgtcgctgagtgagctctgctgcctcttctgctgcccgccctgccccggccgcatcgctgccaagctcgccttcctgccgccggaggccacctattccttggtgactgagcccgagccggggcctggtggggccggggccgcccccttggggaccctgcgggcctcctcgggcgcacccgggcgctggaagctgcacctgacggagcgcgccgacttccagtacagccagcgcgagctggacaccattgaggtcttccccaccaagagcgcccgccgcaaccgcgtctcctgcatgtatgttcgctgcgtgactggtgccagcttctacattggcctgggctcccgcctccattgcaacatcttctcctacgactactccggctacggtgccagctcgggtaggccttccgagaggaacctctatgccgacatcgacgccgcctggcaggccctgcgcaccagagcatcggcacggtgcccaccgtggacctggcctcgcgctacgagtgtgccgcggtggtgctgcattcgccgctcacctcgggcatgcgcgtcgccttccccgacaccaagaagacctactgcttcgacgccttccctaacatcgagaaggtgtccaagatcacgtcgcccgtgctcatcatccacggcacggaggacgaggtgatcgacttctcgcacgggctggcgctctacgagcgctgccccaaggcggtggagccgctgtgggtggagggcaccaggcacaacgacatcgagctctacagccagtacctggagggcctgcgtcgcttcatctcccaggagctgccagccagctcgcctagcggcggcaccaaccggccagacctcagcaataaggcagcccccggacctcaccccgcgccggccccccaggggctgcatgtggacccccgggcggcccaggggaccccgctccaacccaggggctgtggacgatgtacaggcaacagagctacgcactcctttccttttggaagcaagaagaaaatacgtgaaaacagaaattaaagatttaaaatt

SEQ ID NO: 282 - DNA, 339 bp, Homo sapiens
ctccagccttaccgcggcttgaaatggaccccaactgctcctgcaccactggtggctcctgcacgtgcgccggctcctgcaagtgcaaagagtgcaaatgcacctcctgcaagaagagctgctgctcctgctgccccatgggctgtgccaagtgtgcccagggctgtgtctgcaaaggggcgtgcagctgctgtgtctgatgtggggacagctcttctcccagatgttaatagaacaacctgcacaacctggttttttttccttaatacaaccctgagccatttgctgcatttcttttcatattaaatatgtgaatgacaataaaacaattttgacttg

SEQ ID NO: 283 - DNA, 525 bp, Homo sapiens
atgccatggttgccagagaatcctaggtacgcccggaccctcgccgtcccccctccgacacacgtgtgggtccccaacgcttaccagagagctgttgcaaacctagggagcacagagtcttggactgggctcgccctaaaggccaacccttttggaggtgcttatcatgcaaaaggaatcgtgctggaaaaagtaggagttgaagccaaacagccaaattctgccattaggaagtgtgtaagggtccagctgatcaagaatggcaagaaaatcacagcctttgtacccaacgacggttgcttaaactttattgaggaaaatgatgaagttctggttgctggatttggtcgcaaaggtcatgctgttggtgatattcctggagtccgctttaaggttgtcaaagtagccaatgtttctcttttggccctatacaaaggcaagaaggaaagaccaagatcataaatattaatggtgaaaaccctgtagtaataaattttcatatgccaaaaaaaaaaaaaaaagaag

SEQ ID NO: 284 - DNA, 2893 bp, Homo sapiens
agcctgcgcttcggaagcatggatgtgcgcctgcgctgcgctagggcgcggcgggcggtttgaattttgcttacagagtcccgtctcaccatcctgggcttccaacggagactgcggtatccgcagctggagacccagcggcgagtagccttttgctcccggacggacttgagaggcttaaaggatggcctcgtcagatctggaacaattatgctctcatgttaatgaaaagattggcaatattaagaaaaccttatcattaagaaactgtggccaggaacctaccttgaaaactgtattaaataaaataggagatgagatcattgtaataaatgaacttctaaataaattggaattggaaattcagtatcaagaacaaaccaacaattcactcaaggaactctgtgaatctcttgaagaagattacaaagacatagaacatcttaaagaaaacgttccttcccatttgcctcaagtaacagtaacccagagctgtgttaagggatcagatcttgatcctgaagaaccaatcaaagttgaagaacctgaacccgtaaagaagcctcccaaagagcaaagaagtattaaggaaatgccatttataacttgtgatgagttcaatggtgttccttcgtacatgaaatcccgcttaacctataatcaaattaatgatgttattaaagaaatcaacaaggcagtaattagtaaatataaaatcctacatcagccaaaaaagtctatgaattctgtgaccagaaatctctatcacagatttattgatgaagaaacgaaggataccaaaggtcgttattttatagtggaagctgacataaaggagttcacaactttgaaagctgacaagaagtttcacgtgttactgaatattttacgacactgccggaggctatcagaggtccgagggggaggacttactcgttatgttataacctgagtcccttgtgaacttttgaacataccaacagggtatagagtatagaggctatttctataattttcttatatataatttttttaacttttaatcttttttgtttccttttttttttttttgagacaggatcttgctttgtcacccaggggcttgctttgtcacgcaggctagagtgcagtggcgcaaacatggctcactgcagcctcaacctcccaggctcaagtgatcctcccacctcagccccctgaatggctgggactacaagcgtgcgccaccatgcctggctaatttttgtattttttggagagatggggtttcaccatgttgcctaggctggtcttgagctcctgagctcaaacaatccaccctcctcagcctcccaaagtgctgggattacaggcttgagccaccacacctgacctattcttgtttcttataaaaataaaacttttttggataaagcttatttcttgtttttttctttttctttttttttttttttgagacagtctcgctctttcacccaggccggactgcagcggcgctatctcggctcactgcaaactctgcctcccaggttcacgccatcctcctgcctcagcctcctgagtagctgggactacaggcacctgccaccacgcccagctaattttttgtatttttagtagagatggggtttcaccgtgttagccaggatggtctcgatctcctgacctcatgatccgcccacctcggcctcccaaagtgctgggattacaggcgtgagccaccgcgcccggccaacttatatattttcaagattcacctcctctcaccaaatatttaactacctgctgaatacgcctctgtactaggcacataatggaactaaaaaatgctcatgtccagtttttgtgttgagtgaacaatgctgcagaccctaataagattgggtacagatcggcatgcgcctgtagtcccagctactcaggagaattgcttgaacctaggaggtggaggttgcagtgagccgagatcgtgccactgcactccagtctgggcaacagagcgagactccatctcagaaaaaaagaaaaaaagactgggtacagatgtgatattggaagaaaaagatcaagctgatgaggttaggatacccaggccctttggacttaaagatcactagtgtctaaattccatcgatggcatttcagtctataggtaaacttcctggaagctggatttggagacagtttatcatctgattattgggctttcgtataggtccttagggagcagcttacctgaaatgcatttagtgtacaccagtctgtaaacttcaacctgtaatgaaagtgtaataaatgtacattgagttgatgtgataatgtgatataataagaaatatatatttgatcttcctatctagttccttgttcagagctcctaaaacccttgtaatttccaaagtgatggagtacatcttttgttctagtatttggtctttgaccccagttcctgacacaaagctcctaaattcctttaaatttcccagtgataggagaattttttgttctaatgaggtcactcttgatgggcacctggataactcaggatgggggctgctcacaaagaccacatcatgattggaagtttcaaactttcagtctcccacctccagagaggggagaggggctggagatttgtgtcaataatccatcaggcctatgtcaacaagacataatccgttaactatggagttcagggagcttcagggttggcaaacattttgatgtgccaggaaggtgacgcactccagctttatgaagtcagcaagtcctgtgctcaggatgcttctggaccttgccccaggtaccccttcatgtggctgttgttcatctgtatcctttgtagtagccttaaaataaactgttaaacacaaaaaaaaaaaaaaaaaaaaaa

SEQ ID NO: 285 - DNA, 2852 bp, Homo sapiens
aagcccctcggctcggccgagaccgccgtgcccattgctcgcctcggttgccgccgctttagccgcagccgctgctgccgccgccgggggagaggcagcctattgtctttctccgcggcgaaggagatggaggaggacatctggacagtgagcaggaggcgcttcggcccatgccgaacatcccaggggacctggagagccgggaggccatggtggcatttttcaactccgctggagccaatgcccaggaggaacaaagggtgtgctgccagcccctggctcacccagtggcctcgtcccagaaaaagccagaggtagcggccccagccccagagagtgggggtgagtctgtgtttggggagacccaccgggccctgcagggggccatggagaagctgcagcgactttatggaaggagaaggtggacctgaaggagcgggtagagaaactagagcttcaattcatccacctctcaggacagacagacaccatagggagaaagtacatcagccagggggcagtgtcagagacgcagcactgggagaggaggacatcgtcaggctggcccaggaccaggaggagatgaaggtgaacctgcaggagctgcggggcaggtgttgcagcttgtgggagaccacaaggaggggcatggcaaattctgaccattgcccagaaccctgctgatgagcccactctaggagccccaatagcccaggagcttgggtgtgctgacgagcagggtgatcaccactggattgctgacagatagaggacgtgggaccgtgactatcacccctaatctgcagtggatttggctctcggcactcccaggctgggagctggatacctgccctggcagcatgactcagactgcatgacagtggccggacaccccctgggatggctcaaaggagtcaggacttggaagtggggacatcagggtagctgaaggaaatccacacacccagagcatctcggagttcagactctcagacctgaagtaggcgcccccgggactgggctaggagttggacggaatggaggatggaggacagcgagaagaaaggaagagaaatgcaacgtgtgggcagccgccaagagtgaaaatagagggaagtgtcatgcaagtgctggacagaaggcggcaggtgggacgagccccacagccccctcctcaaaaacgaccacctccaggactcagtgatccctggggggcaggctctgccagccctcggccacacgtggctccggcacccatggtcccagtgccttggatggagacggccagttctggcggccagatgtggtgctctggaatccagtcccatttccttcctggccacgcctgtccagcggcctcttcagccgcattcagcccctacttacctggggaccccggctggggcacgagagcaccaggggggtagggcccaaagggatcaggggaagcctctggcctggagggtatggggcacgcttccccaagggcggacccggcaggaggaagcccaggagctgggtcctgccgcccaggagctgggccctgccacccaggccgggctagggacatggcagggcctgggcatcctgacgctggacttgggcgacctgggaggcacagggaggggagagatgggcgaccccgccccagcgcagtgccggccacaccccaaggcggttgccagagcttaagccccgcccccagcagcgagaacatcccagctccacacaccccccccccccccggcagccagtgctccttgtcaagctccccccgtcactccaggtgggagccaccccggtgagggggtgtgccacttgcccccagggcactcctctgggcatcccgggtgggggattttggggccgtggggggcagtctttggtacctgtgttcgtcagggatgctctgacaaccaggtgtcgtccacgggcgggggcatgggcatggtgacagtggtcctgttgatgtcaccgatgatgctgagcgcctccttcagcgcgtggtgcatgtgcagcatctcgtcatgctgctgtgcctgctctgccaactcctccatcagtgtgttctggttcccacatgagtacatattggccagcggctccgagatgatgaactccggggtctgagagtgggcaaacagggaagaaggttgggacctggtgcctgtgccgccctggctgccttgctgggcccttctgggactgtgcgctggacttggagccccttggagtatggcttttcacatgggcttctataccgcttcgactggaagatccacctccccactgccttttctcactcagatggggacaccgaggtccagaggaaaagacacctgtcaaatgtcacagatctgggaggggacttaagacttatcatgccaagaggacacctgtctactcagtttttttttggtggggcggggggcggtgatagggtctcgctctgtcaccaggctggagtacagtgatgactgctcactgcagcctccacctcctgggctcaaagtgatcctccaacgtcagcctctcgagtagctaggactacaggcacatgccaccaccaagcccagctatttttaaaatttttgtgtggagacaaggtctcactatgtggcccaggctggtctcgaactcctgggctcaagtgatcctcctgcctcggcctccaggagtgggagttggagttgatgcctggatacaggagctctgtgggtgggagtgagacaaaacacagggtcctgagctctggggaccaagcaatgtcctctggtgaaaaaaatcctggacttgctggcagaagatttgcctcttactcgccatgtgctctgaatacatttacctgccct

SEQ ID NO: 286 - DNA, 2480 bp, Homo sapiens
ggctggtgtttgtcctaagtgggtacttgcttgggttgagaaatcacattttggctattccccgacttgaaccaggggatagaaatcgtagtcaccggctgggcgcagcggctcatgctgtaatcctggcagtttgggaggccgaggcgggcagattattgaggttaggagttcgagaccagcctggtcaatatgatgaaacaccgcctctagtaaaaatacaaaaattatccgggcgtggtggcgagcgcctgtaatcccagctactcaggaggctgaggcagtagaatcccttgaacctggggtgcggaggttgcagtgagccaagatcgcgccactgcactccaggctgggcgacacggcgagactctgtctcaaaacaaaacaaaaggaaaagaagagaaaagaaaaagaaacgcaggcaccctgaaatcgaaacttgttaggaccaacaagccaacgacagacgaatctgcggggtcctgcgacagacacgccagccccgccgccacagcacagggttctggaggtcgagctgttctgcgggttctgcggcggcgctgggaagagacggcgcccgggcagctcccctgtcaccggcttggaggagcggcgggctcccctagcccagcgccgccgccgccgcccgggaacgccaggctcaccccagctggggaagctccgaatccctcagatcggcgacctgagtgctgtcgccccgagaaaatggaggcatcgagcaacgagctgtgctgagaccgagagacctcagttctgcgaaatgtcggtgcctggagcttgcgaatgactgcggccggcgggttgtcaaggacaacattccttatggcgcaaccaacagcgctgtcaccaagaaactggactctgagaaaaaagagggtttcggccaccgagaaactccgtgccacatgtgccgtgacagcaaaaccgcccgctccgcgccgctggtgaaagagctaacgaacgccaggtgctgcgacagtgacaccgggactagaaggcctcggatggagaatgggacgcccagagcaagcaggaaaacgttttgtttggctcaactagcgctgtcgcaaccggaaaactgtcaggccagtgctgctgcggatgtgagaaaccggtgatccgaaggcggagtggcgctgggcgctggactcgctggtgtgaaaatctggctgctctaggacccggcaagcgcgggcaccaggcgaacgccagcgactttgccagacaaatgcatgtcttttttggtcgccattcaaagatgcagccggcagtcagccccggctctgagaaacaagtggaggtgtcagccataaaccctccgttcagggaaaagagagtcgctgcgacggatcgactggccgttgggtggaactttctttggtggcctagtgactagaaaataaaaacgaaaacgaaataaaaaactgctactgacattactcccacgctccctcctcaagtcagtggcttcaggcttaagaaaacctgtatttttcttggctgatccgtgatccctaattactgagggccccgcgacccaccaagtgcgattcgcagagggaaaggagctggaataaggatccagaatgggacggatttggctcctccaggaagaaagcaaaacaaatgcaggtcgcgaacactttacattgcaggaagctgctcttccagtggccgcggctgggtccttccacaccacctctctgtcctaggccttcgtcccggttcagccctcacggattctaggctagcggtcaacaaccgcatccctccggaacctggaaactctaggtccgagatctcggtgaagaatgaaaggcacagcgccgctcaacccaggcttcaggcctgccccgctggtcccgtcccttccctgtgggatggaactctgtgggaatcgctccttattctgatggttcactcattcagatgtccttgatatttggggatatttctaaaacagctggggagaaaaatggactgcgaggctccggtgttggacgtgaaattggcagtgagacatccgcctctaagcccagggaaaagcttaaattgtggttctctgtctctagcaccgtgatctttgaaatgcgttattgattttcttctttcttctgggaaatgcaatgcagtactatccttttctgggggatcctaggcagaagcgatggcaggacaaaggcagagaaggcactgccaggtcctgcatgccagtaaaactactcatgtcagctgttctgcaggatcccatgagaaggtgagtcaccagaaaatgcagtttccacatcctgatgatttcatctccctaccccaactgatcaatttctccaattttccagcctctcaccctccacaatccccttaaaaactgtagcccagaactctctggaatgatgaatttgaaggtttgctcctgtctcctcactcagaagcctgtaatcattaaactctttctctga

SEQ ID NO: 287 - DNA, 635 bp, Homo sapiens
gaactacagaacatggccaagtccaagaaccacaccacacacaaccagtcccgaaaatggcacagaaatggtatcaagaaaccccgatcacaaagatacgaatctcttaagggggtggaccccaagttcctgaggaacatgcgctttgccaagaagcacaacaaaaagggcctaaagaagatgcaggccaacaatgccaaggccatgagtgcacgtgccgaggctatcaaggccctcgtaaagcccaaggaggttaagcccaagatcccaaagggagtcagctgcaagctcgatcgacatgcctacgttgcccaccccaagcttgggaagcgtgctcttgcccgtattgccaaggggctcaggctgtgccggccaaaggccaaggccaaggccaaggatcaaaccaaggcccaggctgcagctccagcttcagttccagctcaggctcccaaaggtacccaggcccctacaaaggcttcagagtagatatctctgccaacatgaggacagaaggactggtgcgaccccccacccccacccctgggctatcatctgcatggggctggggtcctcctgtgctatttgtacaaataaacctgaggcaggaaaaaaaaaaaaaagaaatacctaaaatc

SEQ ID NO: 288 - DNA, 2004 bp, Homo sapiens
gccccggattgagccctccccgcccgggctcccgacgcgccgaggtctcggggaggcccggacgcgccggtcgcaggcccggccggcgagcggcgggcgggcggcggggagggggctgcgcggggcgggcggcgggcccggcgctattccggccaggaggcgggaggcggttgccggctgcgcgccgaagcctgcgcgccagtcctccggccactgctatcgcccacggccgcaccatggccctaaaggccgagggcgccgcactcgactgcttcgaggtgacgctgaaatgcgaggaaggggaggacgaggaggaggccatggtggtggccgtaattccgcggcccgagccgatgctcagagtgacccaacaggagaagaccccaccgcctagacccagcccgctagaggcaggcagtgatggctgtgaggagccgaagcagcaggtgtcttgggagcaggagttcctggtgggcagcagcccaggaggcagcgggcgggcactgtgcatggtgtgtggcgctgagatccgggcaccctcggccgacacagctcgctcgcacatcttggagcagcaccctcacaccttggacctgagcccttctgagaagagcaatatcctggaggcctggagtgaaggggtggccctcttgcaagacgtgagagctgagcagccgtccccacccaactcagactcgggccaggatgcccacccagacccagacgccaacccagacgctgccagaatgccagccgaaatcgtcgttctccttgactctgaggataacccatccctccctaaaaggagcaggcccaggggactccgccccctcgagcttcctgctgtccctgccacagagccaggaaataagaagccccgtggtcagagatggaaggaacccccaggggaagagccagtcagaaagaaaagaggcagacctatgaccaaaaacctggaccctgacccagagcccccatcgccagactcgcccacggagactttcgcagcaccagccgaggtccgacacttcactgacggcagcttccccgccggcttcgtcttgcagctcttctcccacacccagctcaggggcccagacagcaaggactcacccaaagacagggaagtggcagaaggaggccttccccgggcggagagcccctctccagctccccctccggggctccgcgggacactggatctccaggttatccgcgtgcggatggaggagcccccagcggtcagcctcctgcaagactggtccaggcacccccagggcaccaagcgtgtgggagcaggtgacacctcagactggcccacagttctgtcagaatccagcaccactgtggcagggaagccggaaaaagggaatggagtgtaaattcttgctttcctggggagggagggagggatgaggcagcgtcccccagtggcttataactcagagctgcctggctcacccacctggtggagagagtagaaacaggtgccagggcaggagggggctggggcagcatccactgttatttcggggcactggaaagtgtctgttcctggccaggcctgaggtcggcgagggtggctgaggctgttgtgcagtagggcactgggcctgtggagaacacctaccccagtccttcgctgacccccacctctgtttgtcccccatgacctcctcccaccctccccctgctccccaccattctcccttggcacagtgccttacacaagagtggtcataagggggtttgaactgagtcccactacctcgggggacacctctcctccccacttgttcaggcttctaaaccaggaggcctccattacctcttcctgtcccaaccctgcagaggcctgaagctgggcctgggcaccccattcactcccgttctcatttacatctgttttcctgttgtatatatcacctttgttgacaataaattatttttttttattaagaaaaaaaaaaaaaaaaaaaaaaaaaaaaaaaaaaaaaaaaaaaa

SEQ ID NO: 289 - DNA, 636 bp, Homo sapiens
gaactacagaacatggccaagtccaagaaccacaccacacacaaccagtcccgaaaatggcacagaaatggtatcaagaaaccccgatcacaaagatacgaatctcttaagggggtggaccccaagttcctgaggaacatgcgctttgccaagaagcacaacaaaaagggcctaaagaagatgcaggccaacaatgccaaggccatgagtgcacgtgccgaggctatcaaggccctcgtaaagcccaaggaggttaagcccaagatcccaaagggagtcagctgcaagctcgatcgacatgcctacgttgcccaccccaagcttgggaagcgtgctcttgcccgtattgccaaggggctcaggctgtgccggccaaaggccaaggccaaggccaaggatcaaaccaaggcccaggctgcagctccagcttcagttccagctcaggctcccaaaggtacccaggcccctacaaaggcttcagagtagatatctctgccaacatgaggacagaaggactggtgcgaccccccacccccacccctgggctaccatctgcatggggctggggtcctcctgtgctatttgtacaaataaacctgaggcaggaaaaaaaaaaaaaaagaaatacctaaaatc

SEQ ID NO: 290 - DNA, 531 bp, Homo sapiens
ggcagtctcgcgataactgcgcaggcgcggaccaaagcgatctcttctgaggatccggcaagatggcagaagtagagcagaagaagaagcggaccttccgcaagttcacctaccgcggcgtggacctcgaccagctgctggacatgtcctacgagcagctgatgcagctgtacagtgcgcgccagcggcggcggctgaaccggggcctgcggcggaagcagcactccctgctgaagcgcctgcgcaaggccaagaaggaggcgccgcccatggagaagccggaagtggtgaagacgcacctgcgggacatgatcatcctacccgagatggtgggcagcatggtgggcgtctacaacggcaagaccttcaaccaggtggagatcaagcccgagatgatcggccactacctgggcgagttctccatcacctacaagcccgtaaagcatggccggcccggcatcggggccacccactcctcccgcttcatccctctcaagtaatggctcagctaataaaggcgcacatgactcc

SEQ ID NO: 291 - DNA, 2769 bp, Homo sapiens
ggtgttttagacatgaagtccttgcccatgcctatgtcctgaatggtattgcctaggttttcttctagggtttttatggttttaggtctaacatttaagtctttaatccattttgaattaatttttgtataaggtgtaaggaagggatcaagtttcagctttgtacatacggctagccagttttcccagcaccatttgttaaatagggaatcctttccccatttcttgtttttgtcaggtttgtcaaagatcaaatagttgtagatatgtggtattatttctgagggctctgttctgttccattggtctatataagaaataattctctctttgacatgggctttctttttaagaacccaaggcattgttttgtagagagtctctaaatttagacttgcataatttttttcctttattatattcaggttaaatgtttttgacacatatactacataggacatgttgatcttagtgggtcacatcaagaaccacattatgtcagtttatctcacagtaataatgctaaatttgaccacttagataaggtggtatagataccatcaagtttctccactataaagatattttttcccgttgaagttaatcagtggggtgacatttggagactgtgtttcctaaaaacctttcacctaattattttagcatgcatgtttttggtggttgcaaaataaattgaggctttgttgaataataggagatagccaaacaaatagagcaagggtatagcattctaattataaagacaaagtcttggaacagcaaaaaatacattatgctccaggacttgcatgtagtctggtatggctggactatatagcaaagatggaagagtgactgaatgtatctccaggttcatcaggcatgaaaacctttggttcctccgcggtcttctgagcggtcacgtgaacggcttcctgcaggctggccatggcgcttcaagttcccaaggctccgggcttcgcccagatgctcaaggagggagcgaaacacttttcagaattagaagaggctgtgtatagaaacatacaagcttgcaaggagcttgcccaaaccactcgtacagcatatggacgaaatggaatgaaaaaaatggttatcaactacttggagaagttgtttgtgacaaatgatgcagcgactattttaagagaactagaagtacagcatcctgctgcaaaaatgactgtaatggcttctcatatgcaagagcaagaagttggagatggcacaaacattgttctggtatttgctggagctctcctggaattagctgaagaacttctgaggattggcctgtcagtttcagaggtcatagaaggttatgaaatagcttgcagaaaagctcatgagattcttcctaatttggtacgttgttctgcaaaaaaccttcgagatgttgatgaagtctcatctctacttcgtacctctgtaatgtgtaaacaatatggtaatgaagtatttctggccaagcttattgttcaggcatgcgtatctatttttcctgattctggccatttcaaagttgataacatcagagtttgtaaaattctgggctgtggtatcacttcctcttcagtattgcatggcatggtttttaagaaggaaacagaaggtgatgtacatctgtcaaagatgcaaaaatagcagtgtactcttgtccttttgatggcatgataacagaaactaagggaacagtgttgataaagactgatgaagaattgatgaatttaagtaagggagaagaaaatctcatggatgcataagtcaaagctattgctgatactggtgcaaatgttgtagtaacaggtggcaaagtggcagacatggctcttcattatgcaaacaaatataatatgatgttagtgaagctaaactcaaaatgggatgtccgaagactctgtaaaacagttggtgctacagctcttcctagattgacacctcctgtccttgaagaaatgggacactgagacagtgtttacctctcagaagttggagatactcaggtggtggtttttaagcatgaaaaggaagatggcatcatttctaccatagtacttcggggctctacagacaatctgatggatgacatagaaagggcagtagatgatggtgttaatactttcaaagttcttacaagggataaacgtcttgtacccagaggtggagcaacagaaattgaattagccaaacagatcacatcatatggagagacatgtcctggacttgaacagtacgctattaagaagtttgctgaggcgtttgaagctattccccgtgcactggcagaaatactctggagaaaactctggagttaaggccaatgaagtaatctctaaactttatgcagtacctcaagaaggaaataaaaatgttggattagatactgaggctgtagtccctgctgtaacggacatgttggaagctggtgttctagatacttacctgggaaaacactggtctatcaaactcgctgctaatgctgcagtcactgtacttagagtgggtcaggtaatcatggcaaaaccagatggtgggcccaagcctccaagtgggaagaaagactgggatgatgaccaaaatgattgaaattggcttaatttttactgtaggtgaaggctgtatttgtagtagtattctaagaatcgcgtgatgttttcttattctccttacattaagaggtattttgtgtttgtattcttggctggatgttataataaacatattgttactgtcaaaaaaaaaaaaaaa

SEQ ID NO: 292 - DNA, 1823 bp, Homo sapiens
gcaatttaagtaaaacaagatgaagcaggaaccgactctcaccatccccactcccacctccatgaattccatcggacagttgtgcgaaagcgggctggctttcgcacaaccattggtggactgtctgtcctgtaagccccccaggggctgatgccctcccagtctgcctgccctgttcttagcacagcccctggcaccccgtgtgatctcaggaaacacttgctaaacatggtatcggaggagaaacggagcccacagcttagtgcaaagacctggcggcgtggactgaggctgcagaaacgcagaaacgcgcttttcctgccagaaggggacatctgcgtggtcgggagtacctctggggcacgtgccctaattccagaaacatctaagctggagcgcagtggcactgtaatagcttactgcaaccttgaactcctggcttcaagtgatcctcccgtctgggcctcccaaagcactgggatgacaggtatgagctaccgctctcagccacaactgggttttaagagcactcctccagcccactccagtgtcttccatcattctgtgaaagcaccaaaagaggaccaagcccaggaagccgccagcaggcctctcaccagccaagatggctggaatcctaatatcaagaaatgaaactccagcaggccatggaaatgctaaggggttggcatttctgctctagagagagccaaagagaaagctctatttatatctccttgcgtttggtcgcagcctcatcaaccaaaagaaccttccgccccactcaacacatcaatcaaattggggagggggtgtgaacagcagcagcgggtgttacagaggagtctcaagggtatcttagagggtgcctctctgaacagtcgtcccctccaaatcccccccaagagaattactaggacattctccttcccccgcaagcaacggcacccccagatgattaaacgcgctggcgtcggaaagagctgggatcctggagaaactacttgtaaactgtgtgggttggtgagttatttaacttttctgagccttcgtttccttaactgtaaaatgaagacaacaccactcagctcctacagttgtccagctgaaatcacctaggtaagaacgaccagttctttggggagtaatgtcccgatggtaccattcaattgtcaagaacaccaaggcaccgtcaggcacccgggcggtatcccactctcctggaagagagcagggggttagcccttggtttcaaagtccctagggagcagtaaaccttcccctccgagagccctgagagaggaataattgccccttcccactccaacccacggcacacccgcccacatccacgtgcggctgtgcccagcatctcagaggtaggacttctcaggaatcggcgggaagaagcccccttgatggagtctggtggggttcaagatctgcaggtcccaccttccagggaacacctgcacaagtgagacctgcccgatcagccccgcgctccatccgcaaactgggcagatcccaagggtgccacgcgaggaccctgcaccttggccgctccagggcgccccccacccgcgaccccggaaatctcgcccctacctgcttcaccctcgccccacccacagcgcacttttcgggacctcccagcggcccttccccggttctctggacccccgtctccccgccctgcaacgcccccatcctggtgcccacgaaaggttcccagttcccctcttctctacctcaaaggaggaggtgcaaatgaggaagcctaaataaaaacaggaaactcgatttttttaaaaagcctcacg

SEQ ID NO: 293 - DNA, 333 bp, Homo sapiens
aaaagggcttctgtcgtgagtggcacacgtagggcaactcgattgctctgcgtgcggaatcgacatcaagagatttcggaagcataattttttggtatttgggcagctggtgatcgttggtcccggcgccctttctttactgttatatgttaggcgaaatattacgcgtttggagtaagtggtgctttttgtaactgaaaagagattctgtgtgtgtttttttttttttttttaaaggctgcatagttatttgtatgaaccgcaggggacctaattagcagggtaattcaaacctgtatcctaccacttaaaaaggggaagggggataaccct

SEQ ID NO: 294 - DNA, 395 bp, Homo sapiens
tttcttgccgtgccgatagcgctcacgcaagcatggttaacgtccctaaaacccaccggactttctgtaagaagtgtggcaagcaccaaccccacaaagtgacacagtacaagaagggcaaggattctctgtatgcccagggaaagtggcgttataacaggaagcagagtggctatggtgggcagactaagccgattttccagaaaaaggctaaaactacaaagaatactgtgctaaggcttgagtgcgttgagcccaactgcagatccaagagaatgctggctattaaaagatgcaagcattttgaactgggaggagataagaagagaaagggccaagtgatcccgttctaagtgtcatcttttattatgaagacaataaaaatctcaaggaga

SEQ ID NO: 295 - DNA, 4933 bp, Homo sapiens
cgcagtcggggggaggcggcggcagcggcagcggctgcgggcagcgcgcggggcgcagggcgcggggcgatcaccgtcggggctcgggaggcgggcagtgggcacaggctccccggtgcccgcccctccgctgcggaggggggccgcgagcgggcggccggggaggggccggcaccgccgccacaaaatgagcctgctgtcggccatcgacacgagcgccgcctcggtgtaccagcccgcccagctgctcaactgggtctacctgtcgctgcaggacacgcaccaggctagcgccttcgatgccttccggcccgagccgaccgccggcgccgcacccccggagctggccttcggcaagggccgccccgagcagctgggctcgcccctgcactccagctatctcaacagcttcttccagctgcagcgcggagaggcgctgagcaacagtgtgtacaagggcgcctcaccctatggctccctcaacaacatcgccgatggcctcagctccctcaccgagcacttctcagacctgaccctcacctccgaggctcgcaagcccagcaagcggcccccacccaactacctgtgccacctgtgcttcaacaaaggacactacatcaaggactgcccccaggcacgccccaaaggcgagggcctgactccataccagggcaaaaagcgctgcttcggcgagtacaagtgtcccaagtgcaagagaaaatggatgagcgggaactcctgggccaacatggggcaggagtgcatcaagtgccacatcaacgtgtatccacacaagcagagacccctggagaagcccgacggcctggacgtgtccgaccagagcaaggagcacccgcagcacctctgcgagaagtgcaaggtcctgggctactactgccgtcgcgtgcagtgacgggctgcccgcccgcacccagagccaccccccgccagcccgaggagacgctgcttccctgtgctactccgaggggctgcgtgtcgccctgtgcatggggtgccctcgcaggcctgcggggctgggccgggggctcttagcgtccttgtcttgtgtgtgttgacaaacagtgttactgacattgctgccccccacaggccagggaaagcagggagtctggggctttttgcaggcgggcctggggtctcagtggaggggacaaaggcaagcaaaagcccatgtccaggagccctgggtgtccccacaggctcgcctctgagagcctctttggggtgagcagccttgtattggccacaggtgcactaaattgactgtgaatcccaaacctccccagaccagccaggccgcctgcccccacccagaaccttccggtttgccctgtatggaaagccactctcagaaatccctctttcctgagtcagcaatcgtggcaaggggacatgtgttccaacagcggctggggagtggacctctctgtcccttgcccaccttaagccccaaatccagaccccctctgacatcactggcattgcacctgggtgtgcccccctccccacgctatggacccagataggaggggttaggcatgggggaggcacagaatgctggagagatgcgtcctggtgaacgtggggcagcccctcccacgacccccaccagactgccttaggttttgtcagccccactccctttccttcccctctgcctcccacccactctgggggtccacatcaagatagctgggcccagtgtggaagcccagcgtgtctgttccagcagaaaggacacaagcctggtgttctggagacctcggctcaagtctttgccctgctgccgacgcattgtgtcaccttgggcaaggacttcgcatctccaggcctcagtttccccattagttaaatgacagcataacactagagagcagagggcccatttcagctctgttgttctgggattcaggctggccggtgctgtgtcctggagctttatttggggagtttcacccagaatggtgggagaaacctcccaggtgccaggtaccccgcatcgtgacccttcacttggtgtcttaggaagtcaagctgagggatgctgagtcctcccctgctggcccctgcagccccagccctgcttttcatcccccacccctgcaaacatggaggagccccctccttctcacctcggtctcctagcccctgacatggagaaccctgagacaagccacagaacccctcttttctaaaatggagacaataatttcctacctcccaagggagcagagaggcctcgtggcacgtccgtggccagggagcccactgtcctggctggcggcgggatcgtgcgctcctctgtctcccggatgagaagccccgtttccatggtcttgacccttcctttctcccggctgtcagaactgggtctcttgattttgcccctacattatgcctctgtgggaaaaaaaaaaaatcagaccaagaaatgagcctgaaattcagtgtttaccatggctcaaggatgcccatctggtgtccagttgccttttgtattcaaatgaaaatgctttgtacaactgaggagttacagtgaagtgttaaccaggggtccagggagcgagttgaaaagatggagtgagtgtatttgcagccagggagctgcagggtggatttgaggggccataccctctgagcacttaaaaaaggtatttgctccaggccaggcagcaggctgtggacacccttgccaccactggggactgccactgaggactccccgagcacgttgttccccgtcttctccaaggtgttgaggtgagctggggttggccccggcccaggcttctgtcccaaggagaagctgccactgacagtcatcctaccgcactgctaaagagaatgttcgcagtggtgggcggcgtgcctgtgccaacccttccagggacccggccatgggggaccttggcccaaggatgcctggggcctgccagctgtgctgcaaaggtggggggcccacaccctaaaactaacccaggccccagaccactggaggccagggcttccctgcacgggctaaggggagttgggatatcaccccaaagtgaccttgccagtgagctgttcagcaggtagccactgccctgccatctgtgcagagccagccaccttgggggctggggttcccgctttgaggcccaccttccatactccccttgactcggctctggctgaactggggaactctcttgtggtcagcaaagcccctgccatgcaggccaggtgccattgagaattaagtgctcagagggccaggagcccaggggatgggaaagtgtgtggttttagtacgttcaaaagggacaatcgcttgcagttggtagatctagcgatctagttgggagataatggtgtttaccccatatgaagtattcaatagttctacttgtgaatttgtatttattttgagttatacttgacacagaattccttttttaaaaaaatatgtgtgtattttggaaaaaaaattcatagatgttaaaatttctgcatggttaccagtttttctcacaacactgaatttggtagcttttcccgaaaaaatcttcacagtaattttttgtctgtatatatttgagggcctttttttaaaaaaaaaaaaagaaaagaaaaatataattgtttgatttttgagattaaaacaaacaaaaagagaggcattttcaaaatttcagaactttcaggagggcaagagaatatcaaacaaagatttctggaagtattttgccaaccttctggttgagctgcaagaaaatatttatggtgagaacttttctgtttcccgttattgggtttttggttggtttttgtttgttttttactatgctttggtctgtaaaaatatgcaactgaactacattcagaaggaaatattgtctacatagaatattatatgaagttggtacataattctgatgaggaaaaaaaatctttgcaattctttaagccatattgttgtttttctgtgttgttttccctggatgaaaatatcagtattaagtagacagcatattattcaagtgtttagacttattaatatgttcttgtcctgtatttatacatatgtgtattttggaaagtattgccttttttaagggaagctataattcgatacatagtgaaaaagggaatggtgacccctttgtgcctcttccactgaggataacaaacagcattgtaatccattctcttgcaccttcttcttcttatcttgttattacggttttattaattttgtagagggacagggagtgggcaaggggaagaagcagcttatttgactaaccagcccctctgtggtccaccagcgtcttggcttggtgggagggctctcaatcagcagggccccaggagggaagaagaagtggggcaaagcctggcctcgccgctcgggagctttgccatctgagccacgcctcctccaggccatgctccttgaacttggaaatgtcaaccggagcccttacaccagccctccagcatctaatagacttgaatctactctaaacgaatatttaatccaacctcactacattgtagctcagtccaacgactaaccctgaaatgggggtgttccagccttcagcgagatggccaagcggtcccctgggggctgtggcagcgggcttatccttctctgttgccaaccttgccgtccgacctcctccgcccccatgcggtgaccccgtccgtgtctgtgtctgtccatacgtgtgagtccagctaaaaagacaaaacagaacccgtgggcccagctcggaaggtgcgtggagaaggctccgacgtctccgaagtgcagcccttgggatggcattccgttgtgtgccttattcctggagaatctgtatacggctcgcctatagaaatatagcctcttcatgctgtattaaaaggacttttaaaagcaaaa

SEQ ID NO: 296 - DNA, 430 bp, Homo sapiens
tttttttttttgctggaggcttggtttactgtggccagactactggggtgagcagtgtgggcaccagaatccaaaacccagttcggagcagccctgcaggtgggtcttcatggctgcaccatgctcattgcagggtcttcctctccactctttggaatccatgagacacatgccactgtgcaccaaaccccagcccacaattgagctccacaggtttttctctcaccacccgtttaaaagaaaaaataatccagcctcttaacatagagcccttctcagaaagcagggtttctctttccttcctcttctcataaaaggaggtaatgtcctcatctggtttgagattgatatgagcagtcttcaagagtgccacagatattctcctgggggaggatgctggtgttgggagggtggcagggtcacagaggcc

SEQ ID NO: 297 - DNA, 459 bp, Homo sapiens
ctctccggtccgtgcctccaagatgacaaagaaaagaaggaacaatggtcgtgccaaaaagggccgcggccacatgcagcctattcgctgcactaactgtgcccgatgcgtgcccaaagacaaggccattaagaaattcgtcattcgaaacatagtggagtccgcagcagtcagggacatttctgaagcgagcgtcttcgatgcctatgtgcttcccaagctgtatgtgaagctgcattactgtgtgagttgtgcaattcacagcaaagtagtcaggaatcgatctcgtgaagcccgcaaggaccgaacacccccaccccgatttagacctgcgggtgctgccccacgtcccccaccaaagcccatgtaaggaggtgagttcttaaagactgaagacaggctattctctggagaaaaataaaatggaaattgtacttaaataaataaataaaaataatg

SEQ ID NO: 298 - DNA, 641 bp, Homo sapiens
gggtgcagtggctcacgcctgtaatcccagcactttgggaagccaaggtgggtagatcatttgaggtcaggagttcgagaccagtttggccaacatggtgacaccctatctctacgaaaaatacaaaaatcagccccttttcacaagatggcaccaaaagctaagaaggaagctcctgcccctcctaaagccaaagcaaggctctgaaggccaagaaggcagtgttgaaaggtgtccacagccacaaaaaaaagaagatccgcgtatcactagccttctggcggcccaagacattgcgactccggaggcagtgcaaatatcttaagagcacccccaggagaaacaagcttgaccactatgcatcatcaagtttcctctgaccactgagtctccatgaagaagacagaagacacacgcacttgtgttcactgtgaatgttaagccacagcaccagagaagctctatgacactgatgtggccaaggtcaacaccctgattcggcctgatggagagaaggaacatgttcgactggctcctgattacaatgctttggatgttgccaacaaaatagggatcatctcaactgagtccagttggctaattctaaatatatgtatatcttttcaccattaaaaaaaaaa

SEQ ID NO: 299 - DNA, 480 bp, Homo sapiens
atggctgtatgccagcgaggctgcagtgttcgctgctgctctctgacctttgcaatactgctcaaggacaagaagaagaaagactctggaaaattggccaagaaagacaaagacccagtaaacaaatccaggggcaagtccagaaagaagaagtggtccagaggcaaagtttgggacaaactcaatagcttagtcttgtttgacaaagctacctataacaaactctgtaaggaagttcccaaatacaaacttataaccccagctgtggtctctgaaagactgaagattcgaggctccctggccagggcagcccttcaggagctccttagtaaaggacttatcaaactggtttcaaagcacagagctcaagtaatttacaccagaaataccaagggtggagatgctccagctactggtgaagatgcatgaatatgtccaaccaactgtacatttggaaaaataaaactttattaaataaaa

SEQ ID NO: 300 - DNA, 873 bp, Homo sapiens
gcatgagcggacgctgcctatgggttgccgggcgagatgtaaccggctgctgagctggcagttctgtgtcgctaggcttcggcccggccgccgccacacataagctgcgatgaggagctttacgacttcccggtcttcggggccgggcgcagcaagggccagactctgcgctagcaggcgctgcgcgccaaccggccggcacctgtcgcagaaggtgcaaccgatcgcactgtcgcgcagaagctcctcaatggccagcaccagctgcagccccggccgcccactcgcctcacttgagcctgtacgaatctggactgggaaagttgacattaatcaactcattattcctcacagatttgtattctccagagtatccaggtccttctcagagaattaaaaaacctgtacagatggaacaatccaaagttttaatcaaagaaggtggtgttcagttgctgcttacaatagttgataccccaggatttggagatgcagtggataatagtaattgctggcagcctgctatcaattatattgatagtaaatttgaggactacctaaatgcagaatcgcgagtgaacagatgtcagatgcctggtaacagggtgcagtgttgtttatacttcattgctccttcaggacatgggtggcagacaagaaacatggattattgcgtggagttccattagtaggaataagactcattctacattcttgttgttcttagtgttttttgtttttcatgagaaggaattgtatcagcacaaggcaatattctaacatgacaatgacagcagacagaacctcaataaactctgacttggtactgcaaacaccatttcatgataccttaattcaaataaacctttgttt

SEQ ID NO: 301 - DNA, 3742 bp, Homo sapiens
atggcggctggccgggcccaggtcccttcctccgaacaagcctggcttgaggatgctcaggtcttcatccaaaagaccctgtgtccagctgtcaaggagcctaatgtccagttgactccattggtaattgattgtgtgaagactgtctggttgtcccagggaaggaaccaaggttctacactgcccctcagctatagctaagtaagtgtgagggacattgaatatgataaacgtctctgggagagtcataggctgggattacagggctttttcttccttcttagaaacaagctcagaggtgtgcagcgaaacctggctgggagtctagttcgattgagtgctctggtgaaaagtaaacagaaagcttacttcatcctgtctcttggtagatcacacccagctgtcacccacgtgtccatcatcgtgcaggtccctgcccagctggtgtggcacagagcccttcggcctggtacagcctatgtgctgacagaactgcgagtgtccaagatccgtggtcagcgccagcatgtttggatgaccagtcagtcctcccgtctgttgctgctgaaaccagaatgtgtgcaggagctggaactggagctggaaggacccctcttagaggctgaccccaagccactccccatgcccagcaactcggaggacaagaaggatccagaaagtcttgtccggtattctagactcctatcctattcgggagcagtcactggcgtgttgaatgagcccgctggcctctatgagctggatgggcagctggggctctgccttgcctaccagcagttccgtggccttaggcgggtgatgcgacctggagtgtgtctgcagctccaggatgttcacctgctccagtcagtgggaggggggacaagaaggccagtgctcgccccctgcctccgtggcgccgttctgcttcaaagcttctctcgtcagaagcctggggctcactcatcccgtcaagcctacggggcctccctgtacgagcagctggtgtgggaacgtcagttaggacttcccctctacctgtgggctaccaaggccctggaggagctggcctgcaagctgtgtccccatgtgctgagacaccaccagttcctgcaacattcctctcctgggagccccagcctgggactgcaactcctggctcctaccctggatcttctagctccgccaggcagccctgttcggaatgcacacaatgagatccttgaagagccacatcactgtcccctccagaaatacactcggctgcagactccctcctccttccccactctggccaccctgaaagaagaaggacagcgtaaggcctgggcctcctttgaccctaaggcccttctgcccctcccggaggcctcctacctgcccagctgccaactcaatcgccgcctggcttggtcctggctctgtctgctgccctctgccttctgcccagcccaggttttacttggggttctggtggcttcatctcataaaggttgtctgcaacttcgggaccaaagtggttccctgccctgcctgctcctggccaagcactctcaacccctcagtgacccacggctgataggctgcctggtgcgggcagagaggtttcagttgatcgtagagagggacgtgagaagcagcttcccttcctggaaggagctgagcatgccaggcttcatccagaagcagcaggccagagtctatgtccagttctttctggctgatgccctgatcctgcctgtgcccagaccctgccttcattcagcaacaccctcaacacctcagacagatcccaccggcccagagggaccccacctaggacagagccggctcttcttgctctgccacaaggaggccctcatgaagcgtaatttttgtgtccccccaggagcaagtccagaggtgcccaagcccgccctcagtttctatgtgttggggagctggcttgggggcacccagaggaaggagggtactggatgggggctgcccgagccccagggaaatgacgacaatgatcagaaggttcacctcattttctttggctcttcagtccgctggtttgagttcttgcacccgggacaggtgtaccgactcgtagctcctggccccgctacaccaatgttgtttgaaaaggatggttcatcctgcatatctcggcgtcctctggagttggctggctgtgcatcctgcctcactgtccaggacaactggactctggagcttgaaagctcccaggatatccaagatgtgctggatgcaaacaagtcattgcctgaatcctcactgaccgacctgctcagtgacaatttcacagattccttggtgtctttctccgctgagattttgtcacggacactatgtgaaccccttgtggcgtctctctggatgaaactggggaacacgggggccatgagaaggtgtgtgaagctaacagtcgctcttgagactgctgaatgtgaattcccccctcacctggatgtatatatagaagacccacacttgcctccctcactaggactacttccaggagcccgggtccacttcagccagttggagaaaagggtttccagatctcacaatgtttattgttgtttccggtcatccacttatgtgcaggtcctgagttttccccctgagaccaccatcagcgttcccctgccccacatctacctggctgaacttctgcagggtggtcagtccccattccaggccactgcctcttgccatatcgtctctgtcttcagccttcagctcttctgggtgtgtgcttattgtaccagcatctgccggcagggaaagtgcactcgcctgggctccacttgccctacgcagacagctataagccaggccatcatcaggctcctggtggaggatgggactgccgaagccgtggtgacctgtaggaatcaccatgtggcagcagcactagggctgtgtcctagagagtgggcctccctcctagatttcgtccaagtgccaggcagagtggtcttgcagtttgcagggcctggagcccaacttgagtcttcagccagggttgacgagcccatgaccatgttcctctggacactttgtactagcccctctgtcctccgtcctattgtgctttcttttgagctggaaaggaaaccgtcgaagatcgtcccattagaacctcctcggctacagcgattccagtgtggagagctccctttcctgactcacgtgaaccccaggctccgattgtcctgcctttctatccgagagtcagagtactccagctctctggggatccttgcttcctcctgttaactgaactgcaaggatggcctgagagtccttccttgctgaaaacctgaaggcctaggtcctggctcctctccctacttgttctgtgattgaaccaaggactccagattcacaaactgctactccactataatttcccttctttggtgttctggtgccagcctgccttggcaaaattgtggcaacaggaaatcatggccctattaatatgtcctctgattgggacaaggcacctgcattcacaggcggccctgagcacctgggttctgactttgtcgcaggagctgagggaacaaaagacttgctcgctgtggggtgatggtgacaggcctattgacctgcaatgaagccctctggtgtcatttctcactggtactcatctctggggtcccaggcctcctgactcctagttgtccacctcctaggaactcctagtcgttcatcatcatttcag

SEQ ID NO: 302 - DNA, 4127 bp, Homo sapiens
gccggcgcctgcggcggcgacagcggcagctgcggcgcgaccaggccgggcacctccgagcgcaaggacagcgcgaggtccgcgcagcccagcgcagccatggagccccgcgcggactcactctatgatgtccctgtcggtgcggccgcagcgccgtctgctcagcgcccgggtcaataggagccagtccttcgcaggcgtcctcggcagccacgagcgggggcccaggagtttcccggtcttcagcccgccggggcccccacggaagccccccgcgctctcccgagtgtccaggatgttttccgtggctcacccagccgccaaggtgccgcagcccgagcggctggacctggtgtacacggcgctgaagcggggcctgacggcctacttggaagtgcaccagcaggagcaagagaaactccaggggcagataagggagtccaagaggaattcccgcttgggcttcctgtatgatctggacaagcaagtcaagtccattgaacgcttcctgcgacgactggagttccatgccagcaagatcgatgagctgtatgaggcatactgtgtccagcggcgtctccgggatggtgcctacaacatggtccgtgcctacaccactgggtccccgggaagccgagaggcccgggacagcctggcagaggccactcgggggcatcgcgagtacacggagagcatgtgtctgctggagagcgagctggaggcacagctgggcgagtttcatctccgaatgaaagggctggctggcttcgccaggctgtgtgtaggcgatcagtatgagatctgcatgaaatatgggcgtcagcgctggaaactacggggccgaattgagggtagtggaaagcaggtgtgggacagtgaagaaaccatctttctccctctactcacggaatttctgtctattaaggtgacagaactgaagggcctggccaaccatgtggttgtgggcagtgtctcctgtgagaccaaggacctgtttgccgccctgccccaggttgtggctgtggatatcaatgaccttggtaccatcaagctcagcctggaagtcacatggagccccttcgacaaggatgaccagccctcagctgcttcttctgtcaacaaggcctccacagtcaccaagcgcttctccacctatagccagagcccaccggacacaccctcacttcgggaacaggctttctataacatgctgcgacggcaggaggagctggagaatgggacagcatggtccctgtcatctgaatcttcagacgactcatccagcccacagctctcaggcactgcccgccactcaccagcccctaggcccctggtgcagcagcccgagccccttcccatccaagttgccttccgcaggcctgagacccccagctctgggcccttggatgaggagggggccgtggccccagtcctggcaaatgggcatgcaccctacagtcggactctgagccacatcagtgaggctagtgtagatgctgccttggctgaggcttcagtggaggccgttggcccagaaagcctagcctggggacctagcccacctacacacccagctcccacccatggagagcaccccagtcctgttcctcctgccctggaccctggccactctgccacaagctctaccctcggtacaacaggctctgtccccacatctacagaccctgccccatctgcacacctagactcagttcataagtccacagactctggcccttcagaactgccaggccccactcacaccactacaggctctacctatagtgccattaccactacccacagtgctccaagccccctcactcacactactacaggctccacccacaagcccataatctctacccttactactacaggccctaccctcaatatcataggcccagtccagactaccacaagccccacccacactatgccaagccctacccataccacagcaagccccactcatacttccacaagccccacccatacccccacaagtcccacccacaaaaccagtatgtcacctcccaccactacaagtcctacccccagtggtatgggcctagtccagactgccacaagtcccacccatcctaccacaagccccacccatcccaccacaagccccatccttataaatgtaagcccttccacttctctagaacttgctaccctctccagcccctccaaacactcagaccccaccctcccaggcactgactcccttccctgtagtcccccagtctccaattcctacactcaggcagaccctatggcccccagaactccccacccaagtcctgcccattccagtaggaaacccctcacaagccctgccccagatccctcagagtctacggttcagagtctaagccccactccctcacccccaacccctgcaccccagcattcagacctttgcctggccatggctgtccagaccccagtcccaacggcagccggagggtctggggacaggagcctggaggaggcactgggggccctaatggctgccctggatgactaccgtggccagtttcctgagctgcagggcctggagcaggaggtgacccgcctagaaagtctgctcatgcagagacaaggtctgactcgcagccgggcctccagtctcagcatcactgtggagcatgccttggagagcttcagcttcctcaatgaagacgaagatgaagacaatgatgttcctggggacaggcctccaagcagcccggaggctggggctgaggacagcatagactcacccagtgcccgccccctcagcacggggtgtccagctctggatgctgccttggtccggcacctgtaccactgcagtcgcctcctgctgaaactgggcacatttgggcccctgcgctgccaggaggcatgggccctggagcggctgctgcgggaagcccgagtactggaggcagtatgcgagttcagcaggcggtgggagatcccggccagctctgcccaggaagtggtgcagttctcggcctctcggcctggcttcctgaccttctgggaccagtgcacagagagactcagctgcttcctctgcccggtggagcgggtgcttctcaccttctgcaaccagtatggtgcccgcctctccctgcgccagccaggcttggctgaggctgtgtgtgtgaagttcctggaggatgccctggggcagaagctgcccagaaggccccagccagggcctggagagcagctcacagtcttccagttctggagttttgtggaaaccttggacagccccaccatggaggcctacgtgactgagaccgctgaggaggtgctactggtgcggaatctgaactcggatgatcaggctgttgtgctgaaggccctgagattggcgcccgaggggcgtctgcgaagggacgggctgcgggccctcagctccctgctcgtccatggcaacaacaaggtcatggctgctgtcagcacccagctccggagcctgtcactgggccctaccttccgggagagggccctcctgtgcttcctggaccagctggaggatgaggacgtgcagactcgagtggctggctgcctggccctaggctgcatcaaggctcccgagggcattgagcccctggtgtacctctgccaaactgacacagaagctgtgagggaagctgcccggcaaagcctacagcagtgtggagaagagggacagtctgcccatcgacggctggaggagtccctggacgccctgccccgcatctttgggcctggcagcatggccagcacagcattctaaactattcacccatgggttcctggtgcccctttccccccactttcagggctcaccaggcactggcagggagggtaagggctggctccagatacccctcccccacagattcctagcaatgaaaatctaatatattcttctgttgcccctggggttggagagtcagtgcctgcagtcaagtgcctcccagcctcggctcagcacatcccttgccacaaatcagtgtctggggcttggccaccctgccgctgcccagccacatcccttggttttgtattttatttacagagttttacagaaaataaaaaagcaaaatgtctttcctacaaaaaaaaaaaaaaaaaaa

SEQ ID NO: 303 - DNA, 495 bp, Homo sapiens
cgctgcctacggaggtggcagccatctcctcctcggcatcatggccgccctcagaccccttgtgaagcccaagatcgtcaaaaagagaaccaagaagttcatccagcaccagtcagaccaatatgtcaaaattaagcgtaactggcggaaacccagaggcactgacaacagggttcgtagaagattcaagggccagatcttgatgcccaacattggttatgggagcaacaaaaaaacaaagcacatgctgcccagtggcttccggaagttcctggtccacaacatcaaggagctggaagtgctgctgatgtgcaacaaatcttactgtgccgagatcgctcacaatgtttcctccaagaaccgcaaagccatcgtggaaacagctgcccaactggccatcagagtcaccaaccccaatgccaggctgcgcagcgaagaaaatgagtagacagctcgtgtgcacgttttctgtttaaataaatgtaaaaactgcaa

SEQ ID NO: 304 - DNA, 2402 bp, Homo sapiens
gagccgctggcgccactagagaagggcgagcggcgcggcagagtgcggcgcagcgcagctcctgaggttttggttatgaacaggattcggattcacgtcttgccaaccaatcgggggaggatcactccagtgcccaggtctcaggaacctctgtcttgtgcattcactcatcgtccatgctctcaccctcgtctggaggggcaggagttttgcattaagcatatccttgaagacaagaatgcacccttcaagcagtgtagttatatatcgacgaagaatggaaaaagatgtcccaatgctgccccaaagccagagaagaaagatggggtgtccttctgtgctgaacatgtccgtaggaatgccctggcacttcatgctcaaatgaagaagaccaacccagggcctgtgggtgaaacactcctgtgccagctgagctcatatgctaagacagagctggggtctcagactccagaaagtagtcgcagtgaagccagccgaatactagatgaagacagctggagtgatggggagcaggaacccattactgtggatcagacatggagaggtgaccctgacagtgaagctgatagcatagacagtgatcaagaagatcccctaaaacatgctggtgtctacacagcagaagaagtggccctgattatgcgtgaaaagctaattcgtttgcagtcgttgtatattgatcagtttaaacgacttcagcatctgctcaaggagaagaagcgccgatacttacataatcgcaaagtggaacatgaagctctaggcagtagtctcctgactggcccagagggacttttggccaaagaacgagagaacttaaagcgattaaaatgtctgcgacgataccgccagcgctatggagtggaagccttactgcataggcagttgaaggaacggagaatgctggccacagatggtgctgcccaacaggcccataccactcgttccagtcagaggtgcttggcctttgtggatgatgttcgttgttccaatcagtctcttccaatgaccagacactgccttacccatatttgtcaggatacgaatcaggttctcttcaagtgctgccagggatctgaagaggtaccctgcaacaaacctgttcctgtaagcctctctgaggatccctgctgcccactgcatttccagttgcctcctcagatgtataagcccgagcaggtactgtctgtgccagacgatctggaagccggccccatggatctgtacttgagtgctgctgagcttcagcccactgagagtttacctctggagttcagtgatgacttggatgttgtgggtgatggtatgcagtgtcctccttcacctttgctttttgatccttcactaacccttgaagatcatttagtcaaagaaattgctgaagacccagtggatattttgggccagatgcagatggctggagatgggtgcagatcccagggatctcgaaattctgagaaagcctctgcaccattgtctcagagtggattggctactgcaaatgggaagccagaacccacttctattagttgatagtttggggaaccattttactttggtggatttaaatttctcgttcttcaaagaagtatttctgatcatctctcacaaaacacaggcaacccagactaccttgtttttcttctggattgagtattatagtcaaacgtaaagccaaattttgaggacgtggaccgtgggtttcttcccactcagggcaaggaagagaaagagagataatccctatcaaagcttctgggattatttgggactatacctaaaaggaaagtgacatctttgtaatgggatttcccaagtcatggatagaaatccacttaagtagctaggtgggagctgtctttgtgagtggtgtctttgagatactgatggccctaatatcggttatctctatctgaagacctgcagtttagcttttcttcacctctacttaattgggcagtctttaacccctttccctggtgaactctggctttttatcctctgagaaaacagcccacaggactgggtcctccttatccgtcttgcttttaacctatgtaaatttctgtggttgctatcttatgtaaaatatagtaaaaatttattgtatatagtttctattaaatgttaaagaaaatgttatgaaaatatcaaacagtcacctgaattgaatgcatgttttgtttgagaatatagtttctttttcgcggttttggggacctgtctctgatgggaaagggaagttgggacagatgatacttccatcccaagaagtaaataaatcttcagtagctcattttggttttgctttgaaggaagaagtaaatgaaaaggggcaggacttattaaagcccatcagttccaaaaaaaaaaaaaaaaaa

SEQ ID NO: 305 - DNA, 1058 bp, Homo sapiens
cgagccgcgaagattgtttttgtcccgccgaaatcgagcaaagcacgctggaacttgtagtccttgaggccccttccctaggtccttcgagctactccgtctggccccgccttttctctgctctcctgaacctttaggcttgtctcggcccatttgaagaccaggaagttgatcaatcccgaggctgctgagagacggtggcgcgattgggacagtcgccagggatggctgagcgtgaagatgcagcgggtgtccgggctgctctcctggacgctgagcagagtcctgtggctctccggcctctctgagccgggagctgcccggcagccccggatcatggaagagaaagcgctagaagtttatgatttgattagaactatccgggacccagaaaagcccaatactttagaagaactggaagtggtctcggaaagttgtgtggaagttcaggagataaatgaagaagaatatctggttattatcaggttcacgccaacagtacctcattgctctttggcgactcttattgttggaaatctacatttctgaaggaacccactcaacagaagaagacatcaataagcagataaatgacaaagagcgagtggcagctgcaatggaaaaccccaacttacgggaaattgtggaacagtgtgtccttgaacctgactgatagctgttttaagagccactggcctgtaattgtttgatatatttgtttaaactctttgtataatgtcagagactcatgtttaatacataggtgatttgtacctcagagtattttttaaaggattctttccaagcgagatttaattataaggtagtacctaatttgttcaatgtataacattctcaggatttgtaacacttaaatgatcagacagaataatattttctagttattatgtgtaagatgagttgctatttttctgatgctcattctgatacaactatttttcgtgtcaaatatctactgtgcccaaatgtactcaatttaaatcattactctgtaaaataaataagcagatgattcttataaaaaaaaaaaaaaaaaa

SEQ ID NO: 306 - DNA, 260 bp, Homo sapiens
gggggctggctttagctcagcggttacttcgcgtgtcatcaaaccacctctctgggttgttcgagacccgcgggcgctctccagccctcttactgctgaagttcagctcactttccataataaaaggatccagggtttcttggagaaatggctgattttagtagtgggcaggaaatatagaaatggacacggagcacctcgtagtgctagaaagcaaggaagtgcttaaaatacaaaaaaaaaaaaaaaaaaaacatgtc

SEQ ID NO: 307 - DNA, 850 bp, Homo sapiens
gtttcaatgacctagaggaaaaaagatgttacaagttcgcttttgaaactggaacattaatttttcaccatattaagacaagaccctgtatatacacgttaaacttaaacagctatcttttaggctgttgaatgcaagaaggtaagtttaagtaccatctagtggtaggcatcaccctcacctagtggcatccctctccatctagtggcaagataggcgaattgaaagcaagtgccaaagaagaaatagtctgatactgaaatgttgagcaaaagtttaaaaagacaacagtattgaccacgcctcctccaagtcccagcgagcccgtgtacaacctgtcccgactccagccgcctcttcagctcgccatggatcccaactgctcctgtgccgccagtgactcctgcacctgcgccggctcctgcaagtgcaaagagtgcaaatgcacctcctgcaagaaaagctgctgctcctgctgtcctgtgggctgtgccaagtgtgcccagggctgcatctgcaaaggggcgtcggacaagtgcagctgctgtgcctgatgctgggacagcctgcccccagatgtaaataacgcgacctctacaaacttggattttttatgtacaaccctgaccctgacgtttgctacattcctttttctatgaaataatgtgaatgataataaaacagctttgacttgaaaaaaaaaaaaaaaaagagaatagtattaaagtaccagataaactttaccactgttttattaaattttaatataaataaactatgtaaaataattcatgattgtagcaggttatctaatttggaaataaaaagaatactcttgctggatggtaaa

SEQ ID NO: 308 - DNA, 2219 bp, Homo sapiens
ggcaggtgttgaggggctcccggtccggctgccgccgctcccccgctccggacccggggctccccctagcgccgctgaggagccgcctctgcggctccaggagggcgcaggagcgggactgagagcgcctggaggctcgagcggagggtaattcatttgcacacctgttagcaagaaacagaagttgaaggactggaacaagtgaactaggaaagagggaacgccaatccaaggatagaaggacaaggacagaatcaccagcactggctgaaggcctcctgtttcctgcgctttctccttttcctgtgaaatctccgaggagaagaaagaatgatggacagtttatcctttcactgccacaaggcctgtttacttggcagtaggtccttaagttccttgcttttttgctgctgtttggtgactggaagaggcaccagagactctcactctggggaggtttgctggcatgggtaatctcattaaggtgctaaccagggacatagaccacaatgcagcacattttttcttggactttgaaagtaccttaacatggggaatcttcttaaagttttgacatgcacagaccttgagcaggggccaaattttttccttgattttgaaaatgcccagcctacagagtctgagaaggaaatttataatcaggtgaatgtagtattaaaagatgcagaaggcatcttggaggacttgcagtcatacagaggagctggccacgaaatacgagaggcaatccagcatccagcagatgagaagttgcaagagaaggcatggggtgcagttgttccactagtaggcaaattaaagaaattttacgaattttctcagaggttagaagcagcattaagaggtcttctgggagccttaacaagtaccccatattctcccacccagcatctagagcgagagcaggctcttgctaaacagtttgcagaaattcttcatttcacactccggtttgatgaactcaagatgacaaatcctgccatacagaatgatttcagctattatagaagaacattgagtcgtatgaggattaacaatgtaccggcagaaggagaaaatgaagtaaataatgaattggcaaatcgaatgtctttgttttatgctgaggcaactccaatgctgaaaaccttgagtgatgccacaacaaaatttgtatcagagaataaaaatttaccaatagaaaataccacagattgtttaagcacaatggctagtgtatgcagagtcatgctggaaacaccggaatacagaagcagatttacaaatgaagagacagtgtcattctgcttgagggtaatggtgggtgtcataatactctatgaccacgtacatccagtgggagcatttgctaaaacttccaaaattgatatgaaaggttgtatcaaagttcttaaggaccaacctcctaatagtgtggaaggtcttctaaatgctctcaggtacacaacaaaacatttgaatgatgagactacctccaagcaaattaaatccatgctgcaataacaattctggaataagcacctgctgtagacagaagacagtattctgcaatgactgagaatgcagttttttagtgattgcaattactatctcatttattcttgcttttatttctttcctctgttcctcttccctcttttttaatcatgttcttaagacttcttttctgtgccaaaatcagtaaagttacactctgaagggatatcatcctttcaaacgggccatctaaggcagctaattatgcattgcattggggtctctactgagaaaaattctgtgacttgaactaaatatttttaaatgtggattttttttgaaactaatatttaatattgcttctcctgcatggcaaaactgcctattctgctatttaaaaaccctcaatgactttattttctactgccgcctttttcatgtgcaaccaaaatgaaaatgtttaaattaactgtgttgtacaaatggtacccaacacaaactttttttaaattagtaatacttttgtttaaagttttaagtttgcattttgactttttttgtaaggatgtatgttgtgtgtttaacctttattaactaacgttaaaagctgtgatgtgtgcgtagaatattacgtatgcatgttcatgtctaaagaatggctgttgatgataaaataaaaatcagctttcatttttctaaaaaaaaaaaaaaaaaaaaaaaaa

SEQ ID NO: 309 - DNA, 2776 bp, Homo sapiens
aattccaggaccagagatctggccctggcctattttctcttgctgtgtacacacacgcacacatgctgggtggcaggatctcgcccgctggagggtggtggagcccagtagaattggggtgactgggcataaacctgctgagactgcttccttccctggttgtgagtgatgtgaatgcctgccttccccggtcagcacttagaagcccttgataggcagcatttggcgacttgtggggcaggtgtttgggataaatcctaccttcatcctaggacttatttctgcatcagccttttaactcaggcacttcaggtaacgtgatctatgtgtgttttgactgaatctcatctcctgtgtttccctgtgcagtctagggaagcatgtctccagtctttgtccctgtcttgtcccaaccattaattctcatgtcacagcttctcactgcatgtgacaagagccaggcctatctgctagggccctgcggctgaggtctgacctggaccctcatgcccgagtcggaagacccctctccagaagccattctgcatccttgtctgctctgcgtcacccgagaacacaggcttcgcagcctcgctttctgaaatggtgtgtgccgagtcagattgccgctcagagaaaatacaagcccgttttccctagctgtgccatttggtgctctgccaggctgccgtgcaagggaataccgacgagacgagctgcactgtctctgatttggagccctcaccggagcttgtctttaaaaatgagcaggaagctcatgtatgtttgcatttcagtgagccgggtcctgacctgccgccacccatcacggtcagcgtggtgcatcttaccgaggaggcgcaggcctggattcttttgagtggtgctactgcctaggaagtaacacgtggagaatttccatcttgggaccatgcacacagtgccttggggagtagattttgccctaatagcgatgaagaattttatcagtcagtggagttcctttttcagatcagggatgggaaagagccaaactgggtacctcccacgtgtgccccgtgaacagccctttgcagctgggctgtggggcttggctgctgccctgtcccatctggcagttaacgccttctccctgctctgccccccactccccaaaaccagttgcagcctcaacccacatggggatgtagaaagccgtaaagtccacgctactgttgaaaatgtttacatctccgctctcaacctgccttgggttcgtgttaaatggtgttaaattctgcaaatggaggggaaaaaaatcaaattctaaatttcaaagtagaatttaaagcaaatttgtaaaaaaattatcctaccaccccttttggtccacttaagatatgccacgctgaagcaaggtatttcctactggattttgctttcactggtgtttagaaaataaacttgatttctctaggagcactcctttggttagagggatgcaagaaggagaggtgaaggtggcgtgtggtggctcatgcctgtaatcccagcactttggggaggccgaggcaggcggatcacttgaggccagcagtttgagaccagcctggccaacatgatgaaaccccatctctactaaaaatacaaaaaattagctgggcatggtggcaggcacctgtaatcccagttacttgggaggctgaggcaggagaattgcttgaacccaggaggtggaggttgcagtgagctgagattgtgccactgcacttcagcctgggcgacagagtgactctgtcaaaaaggaaaggcaaaaaccggaccctggagctctgtgggccctgattgcaggcccctccctgtgtgatgagggatgagtcagcttggggagccacttggccagcctgcatgcctggtcatcaggaggttgagaaaagccttgaaagttgtgaagcactgagcagatacaagtgtttgttaattttgtagaaattaactttcccatctggcctttatctccaaagttggtattgttgctccacgcagactgcagtccggtttcttattgtgactttgacaatgcaaagtgcaaaataggaagaggcctccccaccccactatcccaccctggtgaccaattcagtgtaaccattgcacgtactcagtcattggtgtctttggagtgacatctgcagccagttagtgccacctgagtacagcactcgtacttttacatgatgtgtgtgtgagtagctcttctgtccaaaccatgatttgaggttcaactacctgtagatcaaagctttattttagaacgataaactgattttttccaaatgggtgaaatcttctccccatgactatgttttcttaactttgcattgaatctatttactgggttacattctatgtgtagtttgctttcttcatttttttttcttttaaaatgctcatgtcttattccaagcaccttcctccaaagtccccataaagctgcatctccaacacattgttatgccaataaggttttatttaactttatttaaggatgattgtgtctttgaatgacaaatgtactgctgcttcctacctgcaagacgcacaatgtatgtttcaagggtgagcaagtgttatttcttaaatttctcaaatgcctgtagtaactattgtttctgcctctcaattgttgccagctctttgaagaaggggagaattgtgtgtttttgtgtggggatgtttctgatatgctgctacagttgcaaaacactggagctagagaaaataaagtactgatctt

SEQ ID NO: 310 - DNA, 4440 bp, Homo sapiens
ccctcccgctccccgcccccgcccccgcccccgcctccgccgcggcccccacctctgcctccttctactcgggcgccccggcggccgccacctctccccagcccaggagaggctgcggagccgcagccgcccagaccgcgcagcgcgggaggcaggttccgcacgaaataaatcagaatgagttatgcagaaaaacccgatgaaatcacgaaagatgagtggatggaaaagctcaataacttgcatgtccagagagcagacatgaaccgcctcatcatgaactacctggtcacagagggctttaaggaagcagcggagaagtttcgaatggaatctggaatcgaacctagtgtggatctggaaacacttgatgaacgaatcaagatccgggagatgatactgaaaggtcagattcaggaggccatcgccttgatcaacagcctccacccagagctcttggacacaaaccggtatctttacttccatttgcagcaacagcatttgatcgagctgatccgccagcgggagacagaggcggcgctggagtttgcacagactcagctggcggagcagggcgaggagagccgagagtgcctcacagagatggagcgtaccctggcactgctggcctttgacagtcccgaggagtcgcccttcggagacctcctccacaccatgcagaggcagaaggtgtggagtgaagttaaccaagctgtgctagattatgaaaatcgcgagtcaacacccaaactggcaaaattactgaaactactactttgggctcagaacgagctggaccagaagaaagtaaaatatcccaaaatgacagacctcagcaagggtgtgattgaggagcccaagtagcgcctgcgcttgcgtggtggatccaacaccagccctgcgtcgtgggacttgcctcagatcagcctgcgactgcaagattcttactgcagtagagaactctttttctcccttgtacttttttttgacctggcatctttttatagggaaaaatggcctttgtaggcagtggaaaacttgcaaggaaagctgccgtctctttggcagtctgatgcagagcctgcactctggcactcgctgaagaatctggaaggttgcggtttgctcttccagtgttcgggggcctctggctgctgaaggattcggtctaccacggagggctgtgctgttaggctgcatcccactcaaaatacaggaaaagcacgaatcatgattctgctttctgttagcttaggcagacattgggccttcacctacaagtttttccttacccctgtggtttttgtgtttttttttttttctttttccataggaaagaatatataaatttgtaaatcctaattcaaagatggctcatgtgtgagggcattgagtttgatttgttttccctttggtctgggttgtgtggcttttgggggatgcgtgtgagggggctatgtgttttttaattttttaaatatatattttggtgctgtgtgtggtaagagacttgttcctagtggatcaatgaaccatctcttctgggcagttttgttgaaaataaaggtttctctttgatttcaagaatgaccaaaatggcctctaaaagatgttaatcatctcaaatgaccttttgtctttggggcgttcttccccctgtgatagcggcagtggctttttctggtacctgcagctggaaaggccacttggccctgtgctgagtgagcggccttcattagagcgaggcagcccttggccggtggggacgcagagccccagcaggtggtgcacgactgttggcggaaggaacgcgtgttcatcctcagtgatctgccctccagcatctcggcagcatctcatcctccatcgtcagctggctctgccgatgtcctgcttctgttcactcacagaactgtcccctgctccgtggtgggcaggagggaagtggtgcagggctgcgtgcattgcctgcgagtcgggacagttgatgggcacatggccttgtagctctgggcacagatgtgtttggattcattgcagcggaccaccgggcactgttgaccccactgagcagtgctaagtgttggtttagtggatgttcgtggaattgctgacccatccaagggcgtcctttggagccagtggagcctgccggcgcatctgaggggcagaatgctgctagcacttgaatctgggatctcgccttattctcaagtagcaaggcatctcgacaagcatggtctaggtctggtggccagcttgccagtacctgagccggtcgggtcatctgcctctgagggaccgtcctcaccgagctcctgcatcccttgagtgttgatcaggaggcgtccacagcattgttctcgcctctgaatgatgcttctttctgtgttggagcctggcgaagttgtgttttcaagccctctacttctctttccagtgggtaggagcttttggcagtgtttactttacctagatggcttatataatccagtaagagatgcaaagataaaattgctgcggttgttacagaagcatggcggcctccagactgacccattggttgccctttagattttgtaaggatgcggtgctggggaggtggtgcttccctaccccctagaaatgctgccttccaactaccactctcccagatgtgacccttgcgattatttcctctgaggtttgaggatgaagataagttggagggaaagagagtaactaataggggatgaaatatagcagaagctagaagaaagcggtgaggtgagagagatgcatctgcacgttttcttcaacagcaccaggtgattcagcatattcctaattacctttcactattcgtgtatataagatcgtttacttgcataatatatcatcaatttgacatattcttaaaactagagggtgtgagaagcacagcaataggaagtctctccacaaactaggggaacacaaatggggtcattcacgtgcctggactgtcactatgtggctgtcacgtgaagtgctggtgttgatttccatttcagccagtgggtagctgataagccagtgccagcatccagcatgagcagatgtcggggagactgggaagtctccagcgttactgctctccttcccttcatgataagccagtgccagcatccagcgtgagcagacgtcggggagactgggaagtctccgatgttactgcctgccttcctttcgtgtgaggggctgcacttgcttttcttgtgatctgttagtggacgaggtcttccaaggaagtgctttgcacactttctttgctcctttttacagtctttgtctttgcagcaagcaaatgaaattaagccactttgggataatgaacattcagtataattctactttgtctcattttggatctcactgttgtctttataaaaatggcacattttacaaagtagtttattcttattatactttctgctggagagtgccttgaaataaaatgtgagagtattctggtactctgtgttccagatgcatgaaattgggtgaggaataacccctagtctggaatctttgtgaagcatagggttattgcaaggcaaatgggaactaacacatcttgccatttgaatcagggtctccagtttctagaaaaggcagacactggttgggaccaaagtctccatggcacatgactgaagactggtggtcgtgtgtgtgcggagtccacggaagcctcggggaggtggagctgctccttccattccgtcaggacgtgatctgaaaacatgtagagaagatgagttgaggacagcttttctaaggcaatgtgatgtctttgctttcttatttctctttctctgcgttgttagttttgaagagtggaggagctaggggctccagaaagaatcttacacatgtgttgaagacattgatgtcatagggagcggggagctgcattcccttctgggctgttactgctaaatctcagtatgaacagaccaggcggaaagcttggtggccaagcagtctgtgtgcttccccgctgatggagaacgttgcgttgttcacaatagggcctcatgggtgtagccgcatggcagacccatggctggcgcagctgcctgttgccgtctgtcttcagtaactgctgctctgttaactgttctattctgatactacgcgtgttgttttttacaacaggtatgtttttgtttcagaaatatgtattgcttttctcatattttttgcaaattgtattgtcaacatgggtcatttaaagtcctgtatgaaccataacctgctgtggtacctttgtacatgtttgattctgtattctttattccagtgtggcatatgtgcccctctgtatcttttgagaagtgcggaataggttgcttctaccacctgttcttaatgtaacagtaaaagttttcacatttttctcagaaaaaaaaaaaaaaa

SEQ ID NO: 311 - DNA, 2855 bp, Homo sapiens
ctcgtgacaatcttcgggtgcccttcgagagaaaaggggaggatgccactggagtcatcctcttcaatgccactatccttcccatctctcttaccctcagtaccacacaatactaacccttcccctcctctgatgtcttacatcacctcccaggagatgaagtgtattcttcactggtttgccaattggtcaggtccccagcgtgaacgtttcctagaggacctggtagctaaggcagtgccagaaaaattacaaccactgctggatagtctggagcagcttagtgtgtctggggcagaccgaccaccttctatctttgagtgccagctacatctttgggatcagtggtttcgaggctgggctgagcaggagcgcaatgaatttgtcagacagctggagttcagtgagccagacttcgtggcaaagttttaccaagcagtggctgctacagctggtaaggactgataggcattcagaccaaagaagataaccatagctgatggagccatgactctctacaatgataactcaattcaaatgtgttgcctaaagctctggaactggtattccaaccagctgaccgaactcactgaccagtacaggcatggttatttcaacattaatagcatgtcaactggactcctatttgtaaatgttatcaatctaagcaatccagctcatcagtctactagtttgcttctttccgagagatgtcaagtcctcaagaatttgatggcttcttctgcagctataaccacaaggaacctacacattgtaactcaagtccactgctggctcatgaaatgtgtaaagtagaaccctccttcccgagaaataagacaggacaataaaaggtggcgtttttgtactttacctggattccattggctggttttaccactcctatcagattgtagtgtaattgtgtgatacgcaaaccattagttttcccagtgatgatttaataaaattatgaaaaatcaggagagggagataattagttgcttcctccttcacactgtttgaatcgaactcgcggtgacttttttttttttttaaaaacatgggttgtcacttaagtttggagtgcagtggcatgatcatcagtgagcgtgagatcactgtgacctcaaattctaggctgaagtaatctttctgcctcagtctcctgagtatctaggactacaggcccgcacaacaatatctggctaatttttaaattattctgtagatacaggggtcatgctacgttttctagtctggtcttgaactgctggcctcaagcgatccattctcaccttggcctcccaaagtgctgggattacaggcatgaaccatcatacctggcctttttctaaggcatatgtatgtgatattcttggaactggtagcaggtgttcctattctgtaagtttgctttacaacaatacgaaaataagtgacaatttacaggttgaacaatttatttttgtaccaaaataaagaatggatctttagaactgtaaaacttcacccttttttcattgccaggctatataatattgacaaccggggaaagaggcattccaaagaaagtagaaattaagtatacacaatagattttccatccagttgtctcacaagaaattattctcttccttaccccctgtcatgttctgggcaacatcatacctcccttattcctctaactgggacccttgtgctgtggagctctggtgaatggtaagaggcagatggtctcacaggaagagtggctcttttctggtaggctgtggttcccattacacccaccaggattagcagcattaggcagagtcccatggacagccttaggtgggtcatggagggattatggtctgaagtaaccagcaacctaggaacatagaaggtaatatttggcatggaataatgcctagccttagtagataaagcggcattacctttttttttttttttttttggagacaaggtcttggtctgttgcccaggctggagtgcagtggtgtgatcttggctcaccgtaatctccgcctcccaggctcaagcaattctcctgcctcaaccttccgaatagctgggactacaggcgcacgccgcaccaccacgtctggctaaggggctttacccttaaagatagagctcatgaagccccgcctcatccaagcattaagctaaacaggaaatcattaagagggactatcgaaccttaaagtagaaataagatcaagatctaagtcttctagcatcttatattattggaagaagacctaacttggcagcaagggaagtggcttaagggaagagtcagtctatgttctttaggtagctagacacaatccctaacagtgcttaagaaaggaagggggctgggagtggtggcagtggctcccagcactttgggaggcagaggccggtgggttgctttagctcaggagttggagacaagcctgggcaacatggtgaaactgtctctatcaaaaatacaaaaattagctggcatggtggtgtgcacctgtagtcccagctacttgggaggctgaggtgggggaatcacttgagcctagggaggtcgaggccacagtgagctgagatcaccccactgcattccagcctgggtgacagagcgagaccctgtctcaaaaaagaagaagaaaaaggtggggggaggggactaagatccctatgtcctagagatgggggaatgtgttattgtatgggaggagggagtcaggtagtgacgggactggatgatcgtgttagggatctttgttctctgaaacgcaaccctgtctaggacaatatacacgtgagtgagtgcttaataaatttaatttcaaacaaaaaaaaaaaaaaaa

SEQ ID NO: 312 - DNA, 868 bp, Homo sapiens
agctctttttccggctggaaccatggagggtgtagaagagaagaagaaggaggttcctgctgttccagaaacccttaagaaaaagcgaaggaatttcgcagagctgaagatcaagcgcctgagaaagaagtttgcccaaaagatgcttcgaaaggcaaggaggaagcttatctatgaaaaagcaaagcactatcacaaggaatataggcagatgtacagaactgaaattcgaatggcgaggatggcaagaaaagctggcaacttctatgtacctgcagaacccaaattggcgtttgtcatcagaatcagaggtatcaatggagtgagcccaaaggttcgaaaggtgttgcagcttcttcgccttcgtcaaatcttcaatggaacctttgtgaagctcaacaaggcttcgattaacatgctgaggattgtagagccatatattgcatggaggtaccccaatctgaagtcagtaaatgaactaatctacaagcgtggttatggcaaaatcaataagaagcgaattgctttgacagataacgctttgattgctcgatctcttggtaaatacggcatcatctgcatggaggatttgattcatgagatctatactgttggaaaacgcttcaaagaggcaaataacttcctgtggcccttcaaattgtcttctccacgaggtggaatgaagaaaaagaccacccattttgtagaaggtggagatgctggcaacagggaggaccagatcaacaggcttattagaagaatgaactaaggtgtctaccatgattatttttctaagctggttggttaataaacagtacctgctctcaaattgaaaaaaaaaaaaaaaaaaaaaaaaaaaaggacaaaa

SEQ ID NO: 313 - DNA, 3609 bp, Homo sapiens
gagccgcggccgcgcggaggaagcgaaggaggcgggagcggagacctcgctgcgctcatggcgtcgcccgggcattcagatttgggagaagtagccccagaaataaaagcatcagagagacgaacagctgtggccattgcagatttggaatggagagaaatggaaggagatgattgcgagttccgttatggagatggtacaaatgaggctcaggacaatgattttccaacagtggagagaagcaggcttcaagaaatgctgtcacttttgggcctagagacgtaccaggtccagaaactcagcctccaggactctctgcagatcagttttgacagtatgaagaactgggcccctcaggttcccaaagacttgccctggaatttcctcaggaagttgcaggccctcaatgctgatgccaggaataccactatggtgctggacgtgctcccagacgccaggcctgtggagaaggagagccagatggaagaggagatcatctactgggacccagctgatgaccttgctgccgacatttattccttttctgagctgcccacccctgatacgccagtgaaccccttagaccttctctgtgccctgctgctctcctcagacagtttcctgcaacaagaaatagcgttgaaaatggccctctgccagtttgcactcccactcgtgttgcctgactcggagaaccactaccatacatttctgctgtgggccatgcggggcattgtgaggacatggtggtcccagcccccaaggggcatggggagcttccgggaagacagcgtggtcttgtccagggcgcccgccttcgccttcgtgcgcatggacgtcagtagcaactccaagtcccagcttctcaacgccgtcctcagcccgggccacaggcagtgggactgcttctggcatcgggacctcaacttgggcaccaatgcccgggagatttcggatgggttggtagaaatttcctggttttttcccagcggaagggaggacttggacattttcccagaacctgtggcctttctgaacctgagaggtgacatcgggtctcactggctgcagtttaagctcttgacagaaatctcctccgctgtgtttatattgactgacaatatcagtaagaaggaatacaaattgctgtactccatgaaggagtcaaccacaaaatactacttcatcctgagtccctaccgtgggaagcgcaacacaaacctgagatttctgaataagttaattcctgtgctgaaaatagaccactcacatgtcctggtaaaggtcagcagcactgacagcgacagcttcgtgaagaggatccgggccatcgttgggaatgtgctgcgggcaccctgcaggcgggtatctgtggaggacatggcgcacgcagcccgcaaactgggcctaaaggtcgacgaggactgtgaggagtgtcagaaagcgaaagaccggatggagaggattaccaggaaaatcaaagactcggatgcctacagaagggacgagctgaggctgcagggggacccctggagaaaggcagcccaagtggagaaggagttctgccagctccagtgggccgtggacccccctgagaagcacagggctgagctgaggcggcggctgctagaacttcgaatgcagcagaacggccatgatccctcctcgggggtgcaggagttcatctcggggatcagcagcccctccttgagtgagaagcagtacttcctgaggtggatggagtggggcctggcacgggtggcccagccgcgactgagacagcctccggagacgcttctcaccctgagaccaaagcatgggggcaccacagacgtgggggagccgctctggcctgagcccctaggggtggaacacttcttgcgggagatgggacagttttatgaggctgagagctgtcttgtggaggcagggaggctgccggcaggccagaggcgttttgcccacttcccaggcttggcctcggagctgctgctgacagggctgcctctggagctaatcgatgggagcacgctgagcatgcccgtccgctgggtcacagggctcctgaaggagctgcacgtccgactggagagacggtcaaggctggtggttctgtcaaccgtcggggtgccaggcacgggcaagtccacactcctcaacaccatgtttgggctgcggtttgccacagggaagagctgcggtcctcgaggggccttcatgcagctcatcacagtggctgagggcttcagccaggacctgggctgtgaccacatcctggtgatagactccgggggcttgataggtggggccttgacgtcagctggggacagatttgagctggaggcttccttggccactctgctcatgggactgagcaatgtcaccgtgatcagtctagctgaaaccaaggacattccagcagctattctgcatgcatttctgaggttagaaaaaacggggcacatgcccaactaccagtttgtataccagaaccttcatgatgtatctgttcccggccctaggcccagagacaagagacagctcctggatccacctggtgacctgagcagggctgcagcccagatggagaaacagggcgacggcttccgggcactggcaggcctggccttctgcgaccctgagaagcagcacatctggcacatcccaggcctgtggcacggagcacctcccatggccgcagtgagcttggcctacagtgaagccatatttgaattgaagagatgcctactcgaaaacatcaggaacggcttgtcgaaccaaaacaaaaacatccagcagctcattgagctggtgagacggctgtgagtgtgcagagaaacccagttcaggtgtaggaggctgctgtgggcagccctgtctgatggggcacccgtgtggggctgtgctctggtgcctgagaatggctggtgcccaatcgacatgagaagacgaggaaaagacagggtttggagtctcctcaacagtgttaaaagaggaagtgacctcacagaccagctcagagatgttaccaagaatatcacagcccccagggtagggagacaagcagcagtttgttctgtctcagctcctgtcaaggatcctgcggggtgggccctctgtatagctgctctctgtcactggcccctggagtgggagcagcgtccttagtcactgcaggcccaggcgggcaggtggtcccaggacagaggtggggaagttgtcctgaggaagcagaagtaggccttgctcccgcccaacccaagggcctccagtggaccagcattcaagatgtgagtgcccgtggtgtgcaaggcactcccatggcaccgtatttattgactgatctgtgaaggcttccctgacccctgcccaggaagagttcactggtcgctctgttgtgccccacagcactttgttatacctctgccacacacttcacgcagcgcgttgtaactcatgtgtttacatgtctgtccccccagactgtgagctccttgagggcagggactgtacattctccagctctgtgtccccagggcctggcacattgtagacgcttaataaatgtctgttaaatgaatgagtgcacaaaaaaaaaaaaaaaaaaaa

SEQ ID NO: 314 - DNA, 1361 bp, Homo sapiens
atggcgccggcctgcctcacgggcagggtgtctctcctctgcagcgggctgacgcacgaggcacacaggaaggaggtggagcaggtgtatctgcgctgtgcggcgggtgccgtggagtggatgtacccaacaggtgctctcatcgttaacctgcggcccaacaccttctcgcctgcccggcacctgaccgtgtgcatcaggtccttcacggactcctcgggggccaatatttatttggaaaaaactggagaactgagactgctggtaccagacggggacggcaggcccggccgggtgcagtgttttggcctggagcagggcggcctgttcgtggaggccacgccgcagcaggatatcggccggaggaccacaggcttccagtacgagctggttaggaggcacagggcgtcggacctgcacgagctgtctgcgccgtgccgtccctgcagtgacaccgaggtgctcctagccgtctgcaccagcgacttcgccgttcgaggctccatccagcaagttacccacgagcctgagcggcaggactcagccatccacctgcgcgtgagcagactctatcggcagaaaagcagggtcttcgagccggtgcccgagggtgacggccactggcaggggcgcgtcaggacgctgctggagtgtggcgtgcggccggggcatggcgacttcctcttcactggccacatgcacttcggggaggcgcggctcggctgtgccccacgcttcaaggacttccagaggatgtacagggatgcccaggagagggggctgaacccttgtgaggttggcacggactgactccgtgggccgctgcccttcctctcctgatgagtcacaggctgcggtgggcgctgcggtcctggtggggccgtgcggtgagggccgcgcgctgggagccgcgtgccctgggcccaggcctgaccctggtaccgaagctgtggacgttctcgccacactcaaccccatgagcttccagccaaggatgccctggccgattggaaatgctgtaaaatgcaaactaagttattatatttttttttggtaaaaaagaaatgtccataggaaacaaattcccgtgtcttaaaacgccttggtgtgccgtctgatactgttctctaaagacgttaggagtcacggcatctggcctgcggttgggtgaagcactggccgttgggcacagtggatgtgtgaaaaggtgccattcagagttgttattctcatgacggaagttttggagccaaataatacgttttttattttcattttatttttaaaggatgagctttggtccttttcaggccgccggttgtttccgttcccgagaataaagacgaggatccgaccagcca

SEQ ID NO: 315 - DNA, 2910 bp, Homo sapiens
acttgaggagtcgactgagagctttatctttgcccctgtgacgggtggcctgtggtttcctgccaacaactcctgtttccggaggcccaacaaggcccacgcagagccaggaggggcagtggggctgggcctgggtggccccaccagccccgccccatctatctttgggaatttatttgtccatgggcgaggctggcctgcagtctgttgccttccaggggccaagagctgctctgatcacccagggattctctctccaacccaagtgcctccagctgacctctggctcctgtcctctggctccacctgcaccgccctgctcttcctaaggggccaggaagcccccagaagctctaccatcgacgtgggtggtggcacccggctcaccctgagagcagaggccgtgcagggggctcagttctgagccccagccggcccaccatggcacggcggttccaggaggagctggccgccttcctcttcgagtatgacaccccccgcatggtgctggtgcgtaataagaaggtgggcgttatcttccgactgatccagctggtggtcctggtctacgtcatcgggtgggtgtttctctatgagaagggctaccagacctcgagcggcctcatcagcagtgtctctgtgaaactcaagggcctggccgtgacccagctccctggcctcggcccccaggtctgggatgtggctgactacgtcttcccagcccagggggacaactccttcgtggtcatgaccaatttcatcgtgaccccgaagcagactcaaggctactgcgcagagcacccagaagggggcatatgcaaggaagacagtggctgtacccctgggaaggccaagaggaaggcccaaggcatccgcacgggcaagtgtgtggccttcaacgacactgtgaagacgtgtgagatctttggctggtgccccgtggaggtggatgacgacatcccgcgccctgcccttctccgagaggccgagaacttcactcttttcatcaagaacagcatcagctttccacgcttcaaggtcaacaggcgcaacctggtggaggaggtgaatgctgcccacatgaagacctgcctctttcacaagaccctgcaccccctgtgcccagtcttccagcttggctacgtggtgcaagagtcaggccagaacttcagcaccctggctgagaagggtggagtggttggcatcaccatcgactggcactgtgacctggactggcacgtacggcactgcagacccatctatgagttccatgggctgtacgaagagaaaaatctctccccaggcttcaacttcaggtttgccaggcactttgtggagaacgggaccaactaccgtcacctcttcaaggtgtttgggattcgctttgacatcctggtggacggcaaggccgggaagtttgacatcatccctacaatgaccaccatcggctctggaattggcatctttggggtggccacagttctctgtgacctgctgctgcttcacatcctgcctaagaggcactactacaagcagaagaagttcaaatacgctgaggacatggggccaggggcggctgagcgtgacctcgcagctaccagctccaccctgggcctgcaggagaacatgaggacatcctgatgctcgggccccaactcctgactgggtgcagcgtgaggcttcagcctggagccctggtgggtcccagccagggcagaggggcctccccaggaagtctcctaccctctcagccaggcagagagcagtttgccagaagctcagggtgcatagtaggagagacctgtgcaaatctgagctccggctccgaccccacacaccctgagggagccctaccctagcctcagccgctcctggtggggaatggctggggctgggcaggaccctcccacacacctgcaccctagcttcgtgcttctctctccggactctcattatccaacccgctgcctccatttctctagatctgtgctctccgatgtggcagtcagtaaccataggtgactaaattaaactaaaataaaatagaatgaaacacaaaattcaattcctcggctgaactagccacatttcaactgctcagtagatacgtgtggttagtggctgccatactggacagctcggggcattttcactgtcaaagaaagttctattagacagccctgcttgagccctgtttcttcctggccttcggtttccctggggaacttatcgacaatgcaagctcctgggcccacccccagacctcctgaaccaaaagctccagggctggccgtatgatctgtgtggatggcaaactccccaggccattctgggacctaagtttaagaagtgccgtcctcgaactttctgactctaagctcctgagcgggagtcagacttagccctgagcctgcacttcctgttcaggtgcagacactgaacagggtctcaaacaccttcagcatgtgtgttgtgtgctcacgtgccacacagtgtctcatgcacacaacccagtgtacacaccacctacgtgcacacagcatccttccacactgtgtatgtgaacagcttgggccctgcaaacacaaccatctacacacatctacacccccaagcacacacacatggtccgtgccatgtcacctccatagggaaaggcttctctccaagtgtgccaggccaggacagccctcccagccatgaatccttactcagctacctcgggttggggtgggagccccagccaaatcctgggctccctgcctgtggctcagccccagctcccaaggcctgcctggctctgtctgaacagaaggtctgggggaagcgacgggtggagtacaataaagggaatgaggacaaacaaaaaaaaaaaaaaaaaaaaaaaaaaaaaaaaaaaaaaaaaaaaaa

SEQ ID NO: 316 - DNA, 2897 bp, Homo sapiens
ccgccgcggagcgaggttgcctggagagagcgcctgggcgcagaagggttaacgggccaccgggggctcgcagagcaggagggtgctctcggacggtgtgtcccccactgcactcctgaacttggaggacagggtcgccgcgagggacgcagagagcaccctccacgcccagatgcctgcgtagtttttgtgaccagtccgctcctgcctccccctggggcagtagagggggagcgatggagaactggactggcaggccctggctgtatctgctgctgcttctgtccctccctcagctctgcttggatcaggaggtgttgtccggacactctcttcagacacctacagaggagggccagggccccgaaggtgtctggggaccttgggtccagtgggcctcttgctcccagccctgcggggtgggggtgcagcgcaggagccggacatgtcagctccctacagtgcagctccacccgagtctgcccctccctccccggcccccaagacatccagaagccctcctcccccggggccagggtcccagaccccagacttctccagaaaccctccccttgtacaggacacagtctcggggaaggggtggcccacttcgaggtcccgcttcccacctagggagagaggagacccaggagattcgagcggccaggaggtcccggcttcgagaccccatcaagccaggaatgttcggttatgggagagtgccctttgcattgccactgcaccggaaccgcaggcaccctcggagcccacccagatctgagctgtccctgatctcttctagaggggaagaggctattccgtcccctactccaagagcagagccattctccgcaaacggcagcccccaaactgagctccctcccacagaactgtctgtccacaccccatccccccaagcagaacctctaagccctgaaactgctcagacagaggtggcccccagaaccaggcctgcccccctacggcatcaccccagagcccaggcctctggcacagagcccccctcacccacgcactccttaggagaaggtggcttcttccgtgcatcccctcagccacgaaggccaagttcccagggttgggccagtccccaggtagcagggagacgccctgatccttttccttcggtccctcggggccgaggccagcagggccaagggccttggggaacgggggggactcctcacgggccccgcctggagcctgaccctcagcacccgggcgcctggctgcccctgctgagcaacggcccccatgccagctccctctggagcctctttgctcccagtagccctattccaagatgttctggggagagtgaacagctaagagcctgcagccaagcgccctgcccccctgagcagccagacccccgggccctgcagtgcgcagcctttaactcccaggaattcatgggccagctgtatcagtgggagcccttcactgaagtccagggctcccagcgctgtgaactgaactgccggccccgtggcttccgcttctatgtccgtcacactgaaaaggtccaggatgggaccctgtgtcagcctggagcccctgacatctgtgtggctggacgctgtctgagccccggctgtgatgggatccttggctctggcaggcgtcctgatggctgtggagtctgtgggggtgatgattctacctgtcgccttgtttcggggaacctcactgaccgagggggccccctgggctatcagaagatcttgtggattccagcgggagccttgcggctccagattgcccagctccggcctagctccaactacctggcacttcgtggccctgggggccggtccatcatcaatgggaactgggctgtggatccccctgggtcctacagggccggcgggaccgtctttcgatataaccgtcctcccagggaggagggcaaaggggagagtctgtcggctgaaggccccaccacccagcctgtggatgtctatatgatctttcaggaggaaaacccaggcgttttttatcagtatgtcatctcttcacctcctccaatccttgagaaccccaccccagagccccctgtcccccagcttcagccggagattctgagggtggagcccccacttgctccggcaccccgcccagcccggaccccaggcaccctccagcgtcaggtgcggatcccccagatgcccgccccgccccatcccaggacacccctggggtctccagctgcgtactggaaacgagtgggacactctgcatgctcagcgtcctgcgggaaaggtgtctggcgccccattttcctctgcatctcccgtgagtcgggagaggaactggatgaacgcagctgtgccgcgggtgccaggcccccagcctcccctgaaccctgccacggcaccccatgccccccatactgggaggctggcgagtggacatcctgcagccgctcctgtggccccggcacccagcaccgccagctgcagtgccggcaggaatttggggggggtggctcctcggtgcccccggagcgctgtggacatctcccccggcccaacatcacccagtcttgccagctgcgcctctgtggccattgggaagttggctctccttggagccagtgctccgtgcggtgcggccggggccagagaagccggcaggttcgctgtgttgggaacaatggtgatgaagtgagcgagcaggagtgtgcgtcaggccccccgcagccccccagcagagaggcctgtgacatggggccctgtactactgcctggttccacagcgactggagctccaaggtgagcccggaacccccagccatatcctgcatcctgggtaaccacgcccaggacacctcagcctttccagcatagctcaataaacttgtattgatcaaaaaa

SEQ ID NO: 317 - DNA, 68 bp, Homo sapiens
ttgccaatgatggttaagaatttcttcacctgaataaaccatgtggtcagcattgcatctgaggcaaa

SEQ ID NO: 318 - DNA, 1410 bp, Homo sapiens
acccccgagcccccgcagccctagagccgcccaagggatggcgatggcgtacttggcttggagactggcgcggcgttcgtgtccgaggtcactagtttcccggtagttcagctgcacatgaatagaacagcaatgagagccagtcagaaggactttgaaaattcaatgaatcaagtgaaactcttgaaaaaggatccaggaaacgaagtgaagctaaaactctacgcgctatataagcaggccactgaaggaccttgtaacatgcccaaaccaggtgtatttgacttgatcaacaaggccaaatgggacgcatggaatgcccttggcagcctgcccaaggaagctgccaggcagaactatgtggatttggtgtccagtttgagtccttcattggaatcctctagtcaggtggagcctggaacagacaggaaatcaactgggtttgaaactctggtggtgacctccgaagatggcatcacaaagatcatgttcaaccggcccaaaaagaaaaatgccataaacactgagatgtatcatgaaattatgcgtgcacttaaagctgccagcaaggatgactcaatcatcactgttttaacaggaaatggtgactattacagtagtgggaatgatctgactaacttcactgatattccccctggtggagtagaggagaaagctaaaaataatgccgttttactgagggaatttgtgggctgttttatagattttcctaagcctctgattgcagtggtcaatggtccagctgtgggcatctccgtcaccctccttgggctattcgatgccgtgtatgcatctgacagggcaacatttcatacaccatttagtcacctaggccaaagtccggaaggatgctcctcttacacttttccgaagataatgagcccagccaaggcaacagagatgcttatttttggaaagaagttaacagcgggagaggcatgtgctcaaggacttgttactgaagttttccctgatagcacttttcagaaagaagtctggaccaggctgaaggcatttgcaaagcttcccccaaatgccttgagaatttcaaaagaggtaatcaggaaaagagagagagaaaaactacacgctgttaatgctgaagaatgcaatgtccttcagggaagatggctatcagatgaatgcacaaatgctgtggtgaacttcttatccagaaaatcaaaactgtgatgaccactacagcagagtaaagcatgtccaaggaaggatgtgctgttacctctgatttccagtactggaactaaataagcttcattgtgccttttgtagtgctagaatatcaattacaatgatgatatttcactacagctctgatgaataaaaagttttgtaaaacaagcttaagaattcaaaaaaaaaaaaaaaaaa

SEQ ID NO: 319 - DNA, 6369 bp, Homo sapiens
cccacgcgtccggccttggcggcggacgtgcagagaatctcgatgctggcctggagcagaaactgagctggaccactggagcctcggtgagggggtgcggggggcaatggcactgcagctctgggccctgaccctgctgggcctgctgggcgcaggtgccagcctgaggccccgcaagctggacttcttccgcagcgagaaagagctgaaccacctggctgtggatgaggcctcaggcgtggtgtacctgggggcggtgaatgccctctaccagctggatgcgaagctgcagctggagcagcaggtggccacgggcccggccctggacaacaagaagtgcacgccgcccatcgaggccagccagtgccatgaggctgagatgactgacaatgtcaaccagctgctgctgctcgaccctcccaggaagcgcctggtggagtgcggcagcctcttcaagggcatctgcgctctgcgcgccctgagcaacatctccctccgcctgttctacgaggacggcagcggggagaagtctttcgtggccagcaatgatgagggcgtggccacagtggggctggtgagctccacgggtcctggtggtgaccgcgtgctgtttgtgggcaaaggcaatgggccacacgacaacggcatcatcgtgagcactcggctgttggaccggactgacagcagggaggcctttgaagcctacacggaccacgccacctacaaggccggctacctgtccaccaacacacagcagttcgtggcggccttcgaggacggcccctacgtcttctttgtcttcaaccagcaggacaagcacccggcccggaaccgcacgctgctggcacgcatgtgcagagaagaccccaactactactcctacctggagatggacctgcagtgccgggaccccgacatccacgccgctgcctttggcacctgcctggccgcctccgtggctgcgcctggctctggcagggtgctatatgctgtcttcagcagagacagccggagcagtggggggcccggtgcgggcctctgcctgttcccgctggacaaggtgcacgccaagatggaggccaaccgcaacgcctgttacacaggcacccgggaggcccgtgacatcttctacaagcccttccacggcgatatccagtgcggcggccacgcgccgggctccagcaagagcttcccatgtggctcggagcacctgccctacccgctgggcagccgcgacgggctcagaggcacagccgtgctgcagcgtggaggcctgaacctcacggccgtgacggtcgccgccgagaacaaccacactgttgcttttctgggcacctctgatggccggatcctcaaggtgtacctcaccccagatggcacctcctcagagtacgactctatccttgtggagataaacaagagagtcaagcgcgacctggtactgtctggagacctgggcagcctgtacgccatgacccaggacaaggtgttccggctgccggtgcaggagtgcctgagctacccgacctgcacccagtgccgcgactcccaggacccctactgcggctggtgcgtcgtcgagggacgatgcacccggaaggccgagtgtccgcgggccgaggaggccagccactggctgtggagccgaagcaagtcctgcgtggccgtcaccagcgcccagccacagaacatgagccggcgggcccagggggaggtgcagctgaccgtcagccccctccctgccctgagcgaggaggacgagttgctgtgcctttttggggagtcgccgccacaccccgcccgcgtggagggcgaggccgtcatctgcaactccccaagcagcatccccgtcacaccgccaggccaggaccacgtggccgtgaccatccagctcctccttagacgaggcaacatcttcctcacgtcctaccagtaccccttctacgactgccgccaggccatgagcctggaggagaacctgccgtgcatctcctgcgtgagcaaccgctggacctgccagtgggacctgcgctaccacgagtgccgggaggcttcgcccaaccctgaggacggcatcgtccgtgcccacatggaggacagctgtccccagttcctgggacccagccccctggtgatccccatgaaccacgagacagatgtgaacttccagggcaagaacctggacaccgtgaagggttcctccctgcacgtgggcagtgacttgctcaagttcatggagccggtgaccatgcaggaatctgggaccttcgcctttcggaccccaaagctgtcccacgatgccaacgagacgctgcccctgcacctctacgtcaagtcttacggcaagaatatcgacagcaagctccatgtgaccctctacaactgctcctttggccgcagcgactgcagcctgtgccgggccgctaaccccgactacaggtgtgcgtggtgcgggggccagagcaggtgcgtgtatgaggccctgtgcaacaccacctccgagtgcccgccgcccgtcatcaccaggatccagcctgagacgggccccctgggtgggggcatccgcatcaccatcctggggtccaatttgggcgtccaagcaggggacatccagaggatctctgtggccggccggaactgctcctttcagccggaacgttactccgtgtccacccggatcgtgtgtgtgatcgaggctgcggagacgcctttcacggggggtgtcgaggtggacgtcttcgggaaactgggccgttcgcctcccaatgtccagttcaccttccaacagcccaagcctctcagtgtggagccgcagcagggaccgcaggcgggcggcaccacactgaccatccacggcacccacctggacacgggctcccaggaggacgtgcgggtgaccctcaacggcgtcccgtgtaaagtgacgaagtttggggcgcagctccagtgtgtcactggcccccaggcgacacggggccagatgcttctggaggtctcctacggggggtcccccgtgcccaaccccggcatcttcttcacctaccgcgaaaaccccgtactgcgagccttcgagccgctacgaagctttgccagtggtggccgcagcatcaacgtcacgggtcagggcttcagcctgatccagaggtttgccatggtggtcatcgcggagcccctgcagtcctggcagccgccgcgggaggctgaatccctgcagcccatgacggtggtgggtacagactacgtgttccacaatgacaccaaggtcgtcttcctgtccccggctgtgcctgaggagccagaggcctacaacctcacggtgctgatcgagatggacgggcaccgtgccctgctcagaacagaggccggggccttcgagtacgtgcctgaccccacctttgagaacttcacaggtggcgtcaagaagcaggtcaacaagctcatccacgcccggggcaccaatctgaacaaggcgatgacgctgcaggaggccgaggccttcgtgggtgccgagcgctgcaccatgaagacgctgacggagaccgacctgtactgtgagcccccggaggtgcagcccccgcccaagcggcggcagaaacgagacaccacacacaacctgcccgagttcattgtgaagttcggctctcgcgagtgggtgctgggccgcgtggagtacgacacacgggtgagcgacgtgccgctcagcctcatcttgccgctggtcatcgtgcccatggtggtcgtcatcgcggtgtctgtctactgctactggaggaagagccagcaggccgaacgagagtatgagaagatcaagtcccagctggagggcctggaggagagcgtgcgggaccgctgcaagaaggaattcacagacctgatgatcgagatggaggaccagaccaacgacgtgcacgaggccggcatccccgtgctggactacaagacctacaccgaccgcgtcttcttcctgccctccaaggacggcgacaaggacgtgatgatcaccggcaagctggacatccctgagccgcggcggccggtggtggagcaggccctctaccagttctccaacctgctgaacagcaagtctttcctcatcaatttcatccacaccctggagaaccagcgggagttctcggcccgcgccaaggtctacttcgcgtccctgctgacggtggcgctgcacgggaaactggagtactacacggacatcatgcacacgctcttcctggagctcctggagcagtacgtggtggccaagaaccccaagctgatgctgcgcaggtctgagactgtggtggagaggatgctgtccaactggatgtccatctgcctgtaccagtacctcaaggacagtgccggggagcccctgtacaagctcttcaaggccatcaaacatcaggtggaaaagggcccggtggatgcggtacagaagaaggccaagtacactctcaacgacacggggctgctgggggatgatgtggagtacgcacccctgacggtgagcgtgatcgtgcaggacgagggagtggacgccatcccggtgaaggtcctcaactgtgacaccatctcccaggtcaaggagaagatcattgaccaggtgtaccgtgggcagccctgctcctgctggcccaggccagacagcgtggtcctggagtggcgtccgggctccacagcgcagatcctgtcggacctggacctgacgtcacagcgggagggccggtggaagcgcgtcaacacccttatgcactacaatgtccgggatggagccaccctcatcctgtccaaggtgggggtctcccagcagccggaggacagccagcaggacctgcctggggagcgccatgccctcctggaggaggagaaccgggtgtggcacctggtgcggccgaccgacgaggtggacgagggcaagtccaagagaggcagcgtgaaagagaaggagcggacgaaggccatcaccgagatctacctgacgcggctgctctcagtcaagggcacactgcagcagtttgtggacaacttcttccagagcgtgctggcgcctgggcacgcggtgccacctgcagtcaagtacttcttcgacttcctggacgagcaggcagagaagcacaacatccaggatgaagacaccatccacatctggaagacgaacagcttaccgctccggttctgggtgaacatcctcaagaacccccacttcatctttgacgtgcatgtccacgaggtggtggacgcctcgctgtcagtcatcgcgcagaccttcatggatgcctgcacgcgcacggagcataagctgagccgcgattctcccagcaacaagctgctgtacgccaaggagatctccacctacaagaagatggtggaggattactacaaggggatccggcagatggtgcaggtcagcgaccaggacatgaacacacacctggcagagatttcccgggcgcacacggactccttgaacaccctcgtggcactccaccagctctaccaatacacgcagaagtactatgacgagatcatcaatgccttggaggaggatcctgccgcccagaagatgcagctggccttccgcctgcagcagattgccgctgcactggagaacaaggtcactgacctctgacctacaatctccagtgctgccttgggacataggtacctgaggtacctgagagcccctcaggggaggaggccgagtggctgtggctgaggcccccaccctcccctggaacgcgccccaagccggagtgggtgcagccggaacccgcccagcgtctagactgtagcatcttcctctgagcaataccgccgggcaccgcaccagcaccagccccagccccagctccctccggccgcagaaccagcatcgggtgttcactgtcgagtctccagtgatttgaaaatgtgccttacgctgccacgctgggggcagctggcctccgcctccgcccacgcaccagcagccgcctccatgccctaggttgggcccctgggggatctgagggcctgtggcccccagggcaagttcccagatcctatgtctgtctgtccaccacgagatgggaggaggagaaaaagcggtacgatgccttcctgacctcaccggcctccccaagggtgccggcactctgggtggactcacggctgctgggccccacgtcaaaggtcaagtgagacgtaggtcaagtcctacgtcggggcccagacatcctggggtcctggtctgtcagacaggctgccctagagccccacccagtccggggggactgggagcagttccaagaccaccccacccctttttgtaaatcttgttcattgtaaatcaaatacagcgtctttttcactctgaaaaaaaaaaaaaaaaaaaaa

SEQ ID NO: 320 - DNA, 523 bp, Homo sapiens
ctcctggttcaaaagcagctaaaccaaaagaagcctccagacagccctgagatcacctaaaaagctgctaccaagacagccacgaagatcctaccaaaatgaagcgcttcctcttcctcctactcaccatcagcctcctggttatggtacagatacaaactggactctcaggacaaaacgacaccagccaaaccagcagcccctcagcatccagcaacataagcggaggcattttccttttcttcgtggccaatgccataatccacctcttctgcttcagttgaggtgacacgtctcagccttagccctgtgccccctgaaacagctgccaccatcactcgcaagagaatcccctccatctttgggaggggttgatgccagacatcaccaggttgtagaagttgacaggcagtgccatgggggcaacagccaaaataggggggtaatgatgtaggggccaagcagtgcccagctgggggtcaataaagttacccttgtacttgcaaaaaaaaaaaaaaaaaaa

SEQ ID NO: 321 - DNA, 2421 bp, Homo sapiens
gtgtacactatgtgcactgagggtgacacttctgagtgtgggggccctggctagggagtgggactggcaggcttgggtggggttcccaagctttaatcttcctaccccacagaatgttttctctgcccttcaggcagcctgagccgggcagggcccctgcctctgctacggcagcccccgatcatgcagcccccactggacctcaagcagatcctgcccttcccactcgagccagcccctacccttggcctcttcagcaactacagcaccatggaccctgtgcagaaggctgtgctctcccacacttttgggggacccttgctcaagaccaagcggcccgtcatttcctgtaatatctgtcaaatccgcttcaattctcagagccaggctgaggcgcactacaaaggtaatcgccacgcccgacgagtcaaaggcattgaggctgccaagaccagaggcagggagcctggcgtccgagaacctggagacccagctcccccaggcagcaccccaacaaatggggatggtgtagcaccccgtccagtttccatggagaatggactggggccagccccaggatccccagagaaacagcctggctccccatcccctcccagcattccggagactggtcagggtgtaaccaagggtgaaggggggactccagccccggcttccttgcctgggggtagcaaggaagaggaggagaaagccaagcggctgctctactgtgctctgtgcaaggtggctgtgaactccctgtcccagcttgaggcacataacaaaggtactaagcacaagacaattctggaggcccgaagtgggctcgggcccatcaaagcttaccctcggctggggcctcccaccccgggggaaccagaggctcctgcccaggaccgaactttccactgtgagatctgcaatgtcaaggtcaactcggaggtccaactgaaacagcacatctccagccggcggcaccgagacggcgtggccgggaagcccaacccactactgagccgtcacaagaagtctaggggcgccggggagctggcgggcacgctgactttctccaaggagctgcccaagtccctggcgggcggcctgctccccagccccctggcggtggctgcagtgatggcagcggcagcaggctcgccgctgtccctgcgcccggctccagccgcacctcttctccagggaccgccgatcactcaccctctgcttcacccggcccccggacccatccgaactgcgcacggacccatcctcttctccccgtactgacctcaaccctgaacccctcccattcaactccccacctccagccgggacccaggcgtccgggctcccagcccgcccctcctcccggcactccctaaatgatctctccttccccccccccaccccgagatacggggttccaggaaaggggaggggtagcgggggaggggggcttcagaagggggggaacaccccagatctcagggaaccccgccccctgcctttccctctcccctagaaaagggggggccgtctcacccccgagcccccttggagacaccccccctcccaaaagccatgtccatccagcccttccccccaaacctagcacaaaacggggttcacaagccatggtcggggtccgggggggacagaaatggattttcttggcaataagcggactctgggactccggctccctaccccaaactgaagcgcttccgtgaacacccccgtcctccgtagggggaggggagcaggcgggatcctgggtccctcataagcactttggttttaccgcctgcaacctcactgtgcccgccccgcaccatgccctagccccaggtctagccgggcccattgcagggggcagcacttgggggcatctccggcacttgggtgggaccaaggagatgccaccatagacctttccctcgccttcttcctccctagtccgggttccattcttttcaccagcacccatcgcccaaggggtaccgaggggggcaaggggtgtccagtccaagcccacccccgcctcgccttccgcaaaactgtgagcaaaaagcaatagaagcctcgcccccgcccttccccttcgcaggattcgccgagtctgtagcctccccgatccaagttcctagacctcatggctgtcccctcccaccagtcacctccactgcacaactcgggcgggggtgtgacacctctcccccacccccgactccgtggtttccgtatcgtcaacccttcagccgccgacccgggaggggtctggcctacactggtcttccccttcccatcaactctttctgcttgacaatgtagcaacccaggccccccacccacggtcctcccctttttcctctccctgacaataaagtctgaatttgttctgccctccaaaaaaaaaaaaaaaaa

SEQ ID NO: 322 - DNA, 3824 bp, Homo sapiens
actgcctctctcacagccctcaagacacaccatgggcccagaggcaggtttgctacacagcagcgacgacgcaggcggcggccccagcgactcgcaactgcctccctgaccacagcggccaccgcccaacacccccgagaagccatcgccaccaccggcaggagaacctagggtccataaagccatcttcgcgatcgactaaagctacgtcaacaactatggcgggcgacgggcggcgggcagaggcggtgcgggaaggatggggtgtgtacgtcacccccagggcccccatccgagagggaaggggccggctcgcccctcaaaatggcggcagcagcgatgcgcctgcgtacagaactcctccgtcgcgccagggccggcgggaagtgaggttctcggacgagccgccagaagtgtacggcgacttcgagcccctggtggccaaagaaaggtccccggtgggaaaacgaacccggctagaagagttccggtccgattctgcgaaagaggaagtgagagaaagcgcgtactaccttcggtctaggcagcggaggcagccgcgaccccaggaaaccgaggaaatgaagacgcgaaggactacccgccttcagcagcagcactcagagcagcctccgctacagccgtctcctgttatgaccaggagagggctgcgggactctcattcctctgaagaggatgaagcatcttcccaaactgatttaagccaaacgatctcaaagaaaactgtcaggagcatacaagaggctccagtgagtgaagatcttgtaatcaggttacgtcgaccccctctaagatacccaagatatgaagccaccagtgtccaacagaaggtcaatttctctgaagaaggagaaactgaagaagatgatcaagacagctctcacagcagtgtcactactgttaaggccagatccagggattctgatgaatctggagataaaaccaccagatcatctagtcaatatatagaatcattttggcagtcatcacaaagtcaaaacttcacagctcatgataagcaaccttcagtgctaagctcaggatatcaaaaaactccccaggaatgggccccacaaactgcaagaataaggaccaggatgcaaaatgacagcattctgaaatcagagcttggaaaccagtcaccatcaacctccagccgacaagtgactggacaaccccaaaatgcatcttttgtcaagaggaaccggtggtggctacttcctctgatagctgctcttgcctctgggagtttttggttctttagtactcctgaggtagaaaccactgctgttcaagagttccagaaccagatgaatcaacttaagaataagtaccaaggtcaagatgagaagctgtggaaaaggagccaaacattcctggaaaaacatcttaatagctcccatcctcggtctcagcctgctatcttactgctcactgctgcccgagatgctgaagaagcacttaggtgtctgagtgaacaaattgctgatgcctattcttcttttcgtagtgtccgtgccatccggattgatgggacagataaagctactcaagacagtgatactgtcaaactagaggtagaccaagaactgagcaatggatttaagaatggccagaatgcagctgtggtacaccgctttgagtcatttcccgcaggctctactttgatcttctacaaatattgtgaccatgaaaacgcggccttcaaagatgtagccttagtcctgactgtcttattggaggaagagacacttggaacaagtctaggcctaaaggaagttgaagaaaaagtaagagattttcttaaagtcaagttcaccaattctaacacacccaactcctacaatcatatggacccagacaaactgaatggcctctggagccgtatttctcacttagttctgcctgtgcaacctgaaaatgccctgaaaaggggcatctgcttataagaagtgagagagaagaaaaatcatgtcccaagttctgagaattgttcacactttctaaccagagacagaattcagagctctttttgaaagaactagtttctttttaaagaagttaagtgcttacataaacatggaacatataaatcattcattcaacctaattatctgtgatatgagagaatcatttcagtttccattgagagctctgttaaaggtatcttaggagtgcagattatatgcagttccttagagaatctgttttgattctgggctgagttattacagttatggtatgaccagtgagagggatttgtgtcctttcttatgaaccttcctgattttttaacttagatttctcactaagtttcctgagttattagtaagattgctccctaaatgtaaccagggattttcccattatgttcccttttataccatttaggtgtgagttccttagcttctgcctataggaacataagtaatgaaaggtcatctaggtgtgtgtttggaatttttttcttttgttttttggaaaatggaaagaacaaggcaaggaaggaaaattaatggggaagctgaagggaggaaatgttacagtaatccactgagatgtagtttagtcaaacataggtatatgaactgttaatcttggtggattccgttgggatttgttttttacatctcctttttccttccttgaagaaaaattcttggctgtcccaaggattcttcatgtatattgcaaaatttaatatatttgttcacttgagtcttaagagtaggtcaggccaaggcaggtggatcacctgaggtcagaagttcaagaccagcctggccaacatggtgaaaccccgtctctactaaaaatacaaaaattagctgggcgtggtggtgcatgcctgaaatcccagctacttgggaggctgaggcaggagaattgcttgaacccgggaggcggaggttgcagtaagccgagaccatgcttattgccctccagtctgggcaacaaaaatgaaactccgtctcaaaaaaaaaaaagtaggtcaattcgtaacagtttattttggacacaccctgaagcttttgttttgaattaagaaatgagtttcaggaattgacaaaccatttgttaaccagctgtcctgggctattgaagaagatttcattttccgcgcatccacttgttgcagtccaagtcctctagtgcaacgccatagcaaatataaagatttactatgcacgtgatacattttatggagtgcctcaagccaagatagtgaatttatatgaagggtgtgaaatgtatttctttactactatagtagtttagttataactttgcatctataattgagctttctcatctgtcaaatgctatggttttcttaaaatgttacaattctagatctatccaccttgtttttttattgtctacaaaccattaaatgtaaatattgtttttagagtcagtcattggctttgtcatttaccctttgagagttccacaagtggtagtagagtggtttaacgtctttcctctagtactaccagtattcataaatgtataccccttactgtaatttgttcctcttagaagtcagatcatctgatttatagaggattatgaaaaccagagtttttgaaaaggcttattttatacatacgtattatatagagaaacaaatgtttttattaaatgtttcattgacccaagtaatttaaaagtaatatgttacctatgtctttcaggaaaaataattatagcagctgatctgtaaatgactttaaaagctattttagtaatttaaataaatttactttcttggtttatactctcaaaaaaaaaaaaaaaaa

SEQ ID NO: 323 - DNA, 3623 bp, Homo sapiens
ttttcctcacactaaatcgaaaactctccctgttggtcctgatctgtttcagtcaggcaaattacatcctgggaaaacgtcagatgacaggggaggccactcgcttcctgctcatccagtttcgacactttctgtgctttcattagcttccagacctcagccctggccctcgctttactgtacagtcagaactggtttctacgcctcgcgagggtgggaggtcgtgtatgggaggaggaccgcttcccaccagcctcgttgggaagccaggagaaatctcttcaaatcctgcgattcagagtcaagtcccagtcgtcctttttctggtcggcccagaactgtttgtgcctcctccctcatgaggaatgatgtcagtggggccgcggtcgccgcccacgaagagtgtaaggctgcgaagtcggggctttcccgacgccccctccgtccgcgtctgcgtaggggaggtgacgagggcggggcgcggcggcggggtgacgtcacggccgcgcgcggcgtgggcggagcctcactttgaacccagttggcgggagtggctgctcgcggaggggcagtgtctgcggggccgctgtatgctgtccagcgatggatcccaccgcgggaagcaagaaggagcctggaggaggcgcggcgactgaggagggcgtgaataggatcgcagtgccaaaaccgccctccattgaggaattcagcatagtgaagcccattagccggggcgccttcgggaaagtgtatctggggcagaaaggcggcaaattgtatgcagtaaaggttgttaaaaaagcagacatgatcaacaaaaatatgactcatcaggtccaagctgagagagatgcactggcactaagcaaaagcccattcattgtccatttgtattattcactgcagtctgcaaacaatgtctacttggtaatggaatatcttattgggggagatgtcaagtctctcctacatatatatggttattttgatgaagagatggctgtgaaatatatttctgaagtagcactggctctagactaccttcacagacatggaatcatccacagggacttgaaaccggacaatatgcttatttctaatgagggtcatattaaactgacggattttggcctttcaaaagttactttgaatagagatattaatatgatggatatccttacaacaccatcaatggcaaaacctagacaagattattcaagaaccccaggacaagtgttatcgcttatcagctcgttgggatttaacacaccaattgcagaaaaaaatcaagaccctgcaaacatcctttcagcctgtctgtctgaaacatcacagctttctcaaggactcgtatgccctatgtctgtagatcaaaaggacactacgccttattctagcaaattactaaaatcatgtcttgaaacagttgcctccaacccaggaatgcctgtgaagtgtctaacttctaatttactccagtctaggaaaaggctggccacatccagtgccagtagtcaatcccacaccttcatatccagtgtggaatcagaatgccacagcagtcccaaatgggaaaaagattgccaggaaagtgatgaagcattgggcccaacaatgatgagttggaatgcagttgaaaagttatgcgcaaaatctgcaaatgccattgagacgaaaggtttcaataaaaaggatctggagttagctctttctcccattcataacagcagtgcccttcccaccactggacgctcttgtgtaaaccttgctaaaaaatgcttctctggggaagtttcttgggaagcagtagaactggatgtaaataatataaatatggacactgacacaagtcagttaggtttccatcagtcaaatcagtgggctgtggattctggtgggatatctgaagagcaccttgggaaaagaagtttaaaaagaaattttgagttggttgactccagtccttgtaaaaaaattatacagaataaaaaaacttgtgtagagtataagcataacgaaatgacaaattgttatacaaatcaaaatacaggcttaacagttgaagtgcaggaccttaagctatcagtgcacaaaagtcaacaaaatgactgtgctaataaggagaacattgtcaattcttttactgataaacaacaaacaccagaaaaattacctataccaatgatagcaaaaaaccttatgtgtgaactcgatgaagactgtgaaaagaatagtaagagggactacttaagttctagttttctatgttctgatgatgatagagcttctaaaaatatttctatgaactctgattcatcttttcctggaatttctataatggaaagtccattagaaagtcagcccttagattcagatagaagcatcaaagaatcctcttttgaagaatcaaatattgaagatccacttattgtaacaccagattgccaagaaaagacctcaccaaaaggtgtcgagaaccctgctgtacaagagagtaaccaaaaaatgttaggtcctcctttggaggtgctgaaaacgttagcctctaaaagaaatgctgttgcttttcgaagttttaacagtcatattaatgcatccaataactcagaaccatccagaatgaacatgacttctttagatgcaatggatatttcgtgtgcctacagtggttcatatcccatggctataacccctactcaaaaaagaagatcctgtatgccacatcagaccccaaatcagatcaagtcgggaactccataccgaactccgaagagtgtgagaagaggggtggcccccgttgatgatgggcgaattctaggaaccccagactaccttgcacctgagctgttactaggcagggcccatggtcctgcggtagactggtgggcacttggagtttgcttgtttgaatttctaacaggaattccccctttcaatgatgaaacaccacaacaagtattccagaatattctgaaaagagatatcccttggccagaaggtgaagaaaagttatctgataatgctcaaagtgcagtagaaatacttttaaccattgatgatacaaagagagctggaatgaaagagctaaaacgtcatcctctcttcagtgatgtggactgggaaaatctgcagcatcagactatgcctttcatcccccagccagatgatgaaacagatacctcctattttgaagccaggaatactgctcagcacctgactgtatctggatttagtctgtagcacaaaaattttccttttagtctagccttgtgttatagaatgaacttgcataattatatactccttaatactagattgatctaagggggaaagatcattatttaacctagttcaatgtgcttttaatgtacgttacagctttcacagagttaaaaggctgaaaggaatatagtcagtaatttatcttaacctcaaaactgtatataaatcttcaaagcttttttcatttatttattttgtttattgcactttatgaaaactgaagcatcaataaaattagaggacactattgagagtgagccactagcttgattttctttctcctctgatttcagttcactgttcagtttagcattaaaataataaaataatcatacagttcc

SEQ ID NO: 324 - DNA, 2053 bp, Homo sapiens
acatctcccggcaggctgcggaagggggtcgagtagaaggaccgccgctccggcctcccgcgacttctcgaaggtgggcaggtcccaccttgtggaggatggaggtgaccggggacgccggggtaccagaatctggcgagatccggactctaaagccgtgtctgctgcgccgcaactacagccgcgaacagcacggcgtggccgcctcctgcctcgaagacctgaggagcaaggcctgtgacattctggccattgataagtccctgacaccagtcaccctggtcctggcagaggatggcaccatagtggatgatgacgattactttctgtgtctaccttccaatactaagtttgtggcattggctagtaatgagaaatgggcatacaacaattcagatggaggtacagcttggatttcccaagagtcctttgatgtagatgaaacagacagcggggcagggttgaagtggaagaatgtggccaggcagctgaaagaagatctgtccagcatcatcctcctatcagaggaggacctccagatgcttgttgacgctccctgctcagacctggctcaggaactacgtcagagttgtgccaccgtccagcggctgcagcacacactccaacaggtgcttgaccaaagagaggaagtgcgtcagtccaagcagctcctgcagctgtacctccaggctttggagaaagagggcagcctcttgtcaaagcaggaagagtccaaagctgcctttggtgaggaggtggatgcagtagacacgggtatcagcagagagacctcctcggacgttgcgctggcgagccacatccttactgcactgagggagaagcaggctccagagctgagcttatctagtcaggatttggagttggttaccaaggaagaccccaaagcactggctgttgccttgaactgggacataaagaagacggagactgttcaggaggcctgtgagcgggagctcgccctgcgcctgcagcagacgcagagcttgcattctctccggagcatctcagcaagcaaggcctcaccacctggtgacctgcagaatcctaagcgagccagacaggatcccacatagcagcagcgggaagtgtgccaaggaagctctgtggcgttgtgttattggtagacaccctcagcctcatcatttgactacctatgtactactctaccccctgccttagagcaccttccagagaagctattccaggtctcaacatacgccgttccaccaattttttttttagccccaccagcttcaggacttctgccaattttgaatgatatagctgcaccaacaatatcccgcctcctctaattacatatgatgttctctgttcaaaagtaattggcagtgattggccaggcgcagtggctcacgcctgtaatcccagcactgggaggccgaggggggcggatcgtgaagtcaggagatcgagaccatcctggctaacatggtgaaaccctgtctctactaaaaatacaaaaaaaattagccagccatggtggcgggcgcctgtaatcccagctacttgggaggctgaggcaggagaatggcatgaacctgggaggcagagcttgcagtgagctgagattgcgccactgcactccagcctgggcaacagagcgagactccgtctcaaaaaaaaaaaaaaaaaaagtaattggcagtgactatgggcgcactgcctaacatttagccctgccccatatggaacatgttaaaaaaaaaaaaagccaggccgagcgtgttggctcacgcttgtaatcccagcactttgggaggccgaggcgggtggatcacgaggtcaggagatcgagaccatcctggctaacacagtgaaacgtgtttttactaaaagtacaaaaaactagctgggcgtggtggcaggagcctgtagtcccagctactcgggaggctgaggcaggagaattgcttgaaccggggaggcagaagttgcagtgagccgagattatgccactgtactccagcctgggtgacagagtgacactctgtctcaaaaaaaaaaaaaaaaa

SEQ ID NO: 325 - DNA, 414 bp, Homo sapiens
gccgctgtcgccgccgcggagacaaagatggctgcgagagtcggcgccttcctcaagaatgcctgggacaaggagccagtgctggtcgtgtccttcgtcgtcgggggcctcgctgtaattctgcccccattgagcccctacttcaagtactccgtcatgatcaacaaggccacgccctacaactacccagtgcccgtccgtgatgatgggaacatgcccgacgtgcccagccacccccaggaccctcagggccccagcctggagtggctgaagaaactgtgagcacctccactgacagaggcggcccctcccacggctcccaataaaaatgtgaaaaccaacccccgaacgtgaaaaaaaaaaaaaaaaaaaaaaaaaaaaaaaaaaaaaaaaaaaaaaaaaaaaaaaaaaaaa

SEQ ID NO: 326 - DNA, 2423 bp, Homo sapiens
acccgcgctcgtacgtgcgcctccgccggcagctcctgactcatcgggggctccgggtcacatgcgcccgcgcggccctataggcgcctcctccgcccgccgcccgggagccgcagccgccgccgccactgccactcccgctctctcagcgccgccgtcgccaccgccaccgccaccgccactaccaccgtctgagtctgcagtcccgagatcccagccatcatgtccatagagaagatctgggcccgggagatcctggactcccgcgggaaccccacagtggaggtggatctctatactgccaaaggtcttttccgggctgcagtgcccagtggagcctctacgggcatctatgaggccctggagctgagggatggagacaaacagcgttacttaggcaaaggtgtcctgaaggcagtggaccacatcaactccaccatcgcgccagccctcatcagctcaggtctctctgtggtggagcaagagaaactggacaacctgatgctggagttggatgggactgagaacaaatccaagtttggggccaatgccatcctgggtgtgtctctggccgtgtgtaaggcaggggcagctgagcgggaactgcccctgtatcgccacattgctcagctggccgggaactcagacctcatcctgcctgtgccggccttcaacgtgatcaatggtggctctcatgctggcaacaagctggccatgcaggagttcatgatcctcccagtgggagctgagagctttcgggatgccatgcgactaggtgcagaggtctaccatacactcaagggagtcatcaaggacaaatacggcaaggatgccaccaatgtgggggatgaaggtggctttgcccccaatatcctggagaacagtgaagccttggagctggtgaaggaagccatcgacaaggctggctacacggaaaagatcgttattggcatggatgttgctgcctcagagttttatcgtgatggcaaatatgacttggacttcaagtctcccactgatccttcccgatacatcactggggaccagctgggggcactctaccaggactttgtcagggactatcctgtggtctccattgaggacccatttgaccaggatgattgggctgcctggtccaagttcacagccaatgtagggatccagattgtgggtgatgacctgacagtgaccaacccaaaacgtattgagcgggcagtggaagaaaaggcctgcaactgtctgctgctcaaggtcaaccagatcggctcggtcactgaagccatccaagcgtgcaagctggcccaggagaatggctggggggtcatggtgagtcatcgctcaggagagactgaggacacattcattgctgacctggtggtggggctgtgcacaggccagatcaagactggtgccccgtgccgttctgaacgtctggctaaatacaaccagctcatgagaattgaggaagagctgggggatgaagctcgctttgccggacataacttccgtaatcccagtgtgctgtgattcctctgcttgcctggagacgtggaacctctgtctcatcctcctggaaccttgctgtcctgatctgtgatagttcaccccctgagatcccctgagccccagggtgcccagaacttccctgattgacctgctccgctgctccttggcttacctgacctcttgctgtctctgctcgccctcctttctgtgccctactcattggggttccgcactttccacttcttcctttctctttctctcttccctcagaaactagaaatgtgaatgaggattattataaaagggggtccgtggaagaatgatcagcatctgtgatgggagcgtcagggttggtgtgctgaggtgttagagagggaccatgtgtcacttgtgctttgctcttgtcccacgtgtcttccactttgcatatgagccgtgaactgtgcatagtgctgggatggaggggagtgttgggcatgtgatcacgcctggctaataaggctttagtgtatttatttatttatttattttatttgtttttcattcatcccattaatcatttccccataactcaatggcctaaaactggcctgacttgggggaacgatgtgtctgtatttcatgtggctgtagatcccaagatgactggggtgggaggtcttgctagaatgggaagggtcatagaaagggccttgacatcagttcctttgtgtgtactcactgaagcctgcgttggtccagagcggaggctgtgtgcctgggggagttttcctctatacatctctccccaaccctaggttccctgttcttcctccagctgcaccagagcaacctctcactccccatgccacgttccacagttgccaccacctctgtggcattgaaatgagcacctccattaaagtctgaatcagtgc

SEQ ID NO: 327 - DNA, 3105 bp, Homo sapiens
cgcggcggcagcagcagcagcagcagcgagaggcagaggcggcggcggcggggaggacagcacggccgaggctgcccagcggcgcctcctccacaccccccgccgcagcagcaccggcgacagattttttaaaaaatggatttggccaaccatggacttattctactgcaacagttaaacgctcagcgagagtttggtttcctgtgtgactgcacggttgcaatcggcgatgtatacttcaaggcacacaaatcagttcttgcttcattctccaattactttaagatgttgtttgtccatcagaccagtgagtgtgtccgcttgaaaccaactgacatacagcccgacatcttcagctatctcttacacttgatgtacactgggaagatggcgcctcagctcatcgacccggttcgattagaacagggcatcaagtttctgcacgcctacccgctcattcaggaagccagcctcgccagccagggagccttttctcaccctgaccaagttttcccactggcttcttcattgtatggcattcagattgcagatcatcagttgagacaagccaccaagattgcttcagcacctgaaaaactcgggcgagatccacggccacagacctccaggataagccaggagcaggtccctgaggcctcacagctctcccagctgacttcaaatctggcccaggtgaatcggacaaatatgactccctcagaccccctgcagacctcgctgtctccagaacttgtttccactcctgttcctccccctcctcccggggaggagaccaatctggaagcatcttcctccgatgagcagcctgcgtccctcacaatagcccacgtcaagccaagcatcatgaagaggaatgggagctttccaaagtactatgcctgccacctgtgtggacggcgcttcactctccggagcagcttacgtgaacacctccagatccacacaggagtacctttcacatctagccaacagggagaaagtcgcgtccccctgactctctgtagcaatgcagctgacctcgggaaagatgccatggaagtgcctgaagccgggatgataagtgacagtgagctgcagcacatctctgattctcccatcatcgatgggcagcagcagtcggaaaccccacccccctcagacattgctgacattgacaacctggagcaggccgaccaggagagggaggtgaagaggcggaagtacgagtgcacaatatgtggacgcaaatttatccagaaaagccactggagggaacacatgtacatacacaccgggaagcctttcaagtgcagcacttgtgacaaaagcttttgcagggccaaccaggctgcccgccacgtgtgcctcaaccagagcatcgacacttacaccatggtggacaaacagactctggaactctgcacatttgaggaagggagtcagatggacaacatgctggtgcaaacaaacaaaccctacaaatgcaacttgtgtgacaaaacattctccactcccaatgaggttgttaaacattcatgccaaaaccagaactcggatgtttttgccctagacgaagggcgatccattctcctgggcagtggggactcggaagtaacggagcctgaccacccagtgttagcttccatcaaaaaggaacaagaaaccgtcttactagactgaatgtcacttatctttttaaaaaactctcatttttacaaagactatcttccctcccttccctgaattcagaactgtagttctccatggcatgatacaaacaggtccttgttctcttctcctcttccccttttccacatcccagccccacctctgtaaaggctttgtgcattataaacctggaatgtatcgactttctttcaggggatattggaaagataatggtcattatacttataaactcaaattttgagaggttttagattattcagaagcatacttggaactaatgaagggtatataataaaacaactggaatccaatttggtaagctaaaattatgactttccctgggtaaaaagtcttctcagaaaaacaatgtcagaaaataacagcgtgctgcttagaaatacggctgggctctgtactatgcaaaatctagaaagtgtggggaaactttaaacccaagaaaacgttcttagtattcatcctccaggtgtcttacttcagaatgcatcctttgagattatgtccacttaagagaaatcatcagttaagaaatctactttaacaaaacaaaaaggagaaaaagtaataatgtgatggcaatcttaatttttgggtacaacatgacaagctgtgagtttgtgtgtttgtaagagaaaaatgtgtgggtacttgctaataaacaggtgaattaatgcacatccttatctcattgctggcttctttccaagttgagcaacaacaaaatgctgtatttgagtttctgacaaatttgttttaaaaatcaaatttgaatgtactattctataaattgcctttctgaatagaacatgacatgccattttctagcagctgccagtgataatttgttttacactaacttttaaatcagtgtgtgtactgcagggaaaaggatataggaatactcatcttacaggggaatttgtgaccagaagatgtagtaacttcaatgactgaaagtcaatgctgatagtttactggcaacattaattgaagcatcaaaaataaatggcaaagagaaatcaggacaaaaaatctaattgctgtttgggaaaaaacttgattttgatgtttattctccaggtttttggttgtttttttttctttcttctttcttaatgcctgaaattttctccattggcccgaaagcagtaaaaattgttcattaatcttccgttaggccaataaaagaagggcctcacaagacaaaacaggagccagaagtaaggactgaaggagaaggggagaatagctaatagctatagtatatgtatatgttaaaaactgaatatcccatcatcctatttcatgtatagttgagttctcaaatttgtaagtttttatacatcctttcattgaataaacgtttaattaaatgagtaaaaaaaaaaaaaaaaaaaa

SEQ ID NO: 328 - DNA, 2216 bp, Homo sapiens
agcgccgacccgtctctctgcccccgccgctgccatggcggcagctccgccgctttccaaggccgagtatctgaagcgttacttgtccggggcagatgccggcgtcgaccggggatctgagtccggtcgcaagcgtcgcaaaaagcggccgaagcctggcggggccggcggcaagggaatgcggattgtggatgatgatgtgagctggacagctatctccacaaccaaactagaaaaggaggaagaggaagatgatggagatttgcctgtggtggcagagtttgtggatgagcggccagaagaggtaaagcagatggaggcctttcgttccagtgccaaatggaagcttctgggaggccacaacgaagacctaccctcaaacagacattttcgtcacgataccccggattcatctcctaggagggtccgtcatggtaccccagatccatctcctaggaaggaccgtcatgacaccccggatccatctcctaggagggcccgtcatgacaccccggatccttctcccctcagaggggctcgtcatgactcagacacatctcctcccaggaggatccgtcatgactcctcagacacttcacccccaaggagggcccgtcatgattctccagatccttctcccccaaggaggcctcagcataattcttcaggtgcatctcctaggagagtccgtcatgattcaccagatccctctcctcctaggcgagcccgtcatggttcctcagatatctcttcccccagaagggtccataacaactcccctgacacatctaggaggactcttggctcttcagacacacagcaactcagaagggcccgtcatgactcccctgatttggctcctaatgtcacttattccctgcccagaaccaaaagtggtaaagccccagaaagagcctctagcaagacttctccacattggaaggagtcaggagcctcccatttgtcattcccaaagaacagcaaatatgagtatgaccctgacatctctcctccacgaaaaaagcaagcaaaatcccattttggagacaagaagcagcttgattccaaaggtgactgccagaaagcaactgattcagacctttcttctccacggcataaacaaagtccagggcaccaggattctgattcagatctgtcacctccacggaatagacctagacaccggagctctgattctgacctctctccaccaaggaggagacagaggaccaaatcttctgattctgacctgtccccgcctcgaaggagtcagcctcctggaaagaaggctgcacacatgtattctggggctaaaactgggttggtgttaactgacatacagcgagaacagcaggagctcaaggaacaggatcaagaaaccatggcatttgaagctgaatttcaatatgctgaaaccgtatttcgagataagtctggtcgtaagaggaatttgaaactcgaacgtttagagcaaaggaggaaagcagaaaaggactcagagagagatgagctgtatgcccagtggggaaaagggcttgcccagagccggcaacagcaacaaaatgtggaggatgcaatgaaagagatgcaaaagcctctggcccgctatattgatgacgaagatctggataggatgctaagagaacaggaaagagagggggaccctatggccaacttcatcaagaagaataaggccaaggagaacaagaataaaaaagtgagacctcgctacagtggtccagcacctcctcccaacagatttaatatctggcctggatatcgctgggacggagtggacagatccaatggatttgaacagaagcgctttgccaggcttgccagcaagaaggcagtggaggaacttgcctacaaatggagtgttgaggatatgtaactttcctgaggctgtgggggtggctgggctgtggtagtgggcataggcagcgagatatccagtggtaacagttgtctgtgctaataattggagcccacacagaccagcaacttgttgaatgccagttttgaccacagaagaatattcgagacctgatgtttggactgaggtacctgtacttcttgggtgtgacagcaccggctgttgctggctttcagaggaagcattgatttctcattgaccagggtttgttcttggtagggtttttctttttcttttttaaataaacatgtatttatttttttaaaattaaaaaaaaaaa

SEQ ID NO: 329 - DNA, 1691 bp, Homo sapiens
gtgactgggtggggctgcctcacttctgcctgatttgggaagcgctgcaaggacaaccggctggggtccttgcgcgccgcggctcagggaggagcaccgactgcgccgcaccctgagagatggttggtgccatgtggaaggtgattgtttcgctggtcctgttgatgcctggcccctgtgatgggctgtttcgctccctatacagaagtgtttccatgccacctaagggagactcaggacagccattatttctcaccccttacattgaagctgggaagatccaaaaaggaagagaattgagtttggtcggccctttcccaggactgaacatgaagagttatgccggcttcctcaccgtgaataagacttacaacagcaacctcttcttctggttcttcccagctcagatacagccagaagatgccccagtagttctctggctacagggtgggccgggaggttcatccatgtttggactctttgtggaacatgggccttatgttgtcacaagtaacatgaccttgcgtgacagagacttcccctggaccacaacgctctccatgctttacattgacaatccagtgggcacaggcttcagttttactgatgatacccacggatatgcagtcaatgaggacgatgtagcacgggatttatacagtgcactaattcagtttttccagatatttcctgaatataaaaataatgacttttatgtcactggggagtcttatgcagggaaatatgtgccagccattgcacacctcatccattccctcaaccctgtgagagaggtgaagatcaacctgaacggaattgctattggagatggatattctgatcccgaatcaattatagggggctatgcagaattcctgtaccaaattggcttgttggatgagaagcaaaaaaagtacttccagaagcagtgccatgaatgcatagaacacatcaggaagcagaactggtttgaggcctttgaaatactggataaactactagatggcgacttaacaagtgatccttcttacttccagaatgttacaggatgtagtaattactataactttttgcggtgcacggaacctgaggatcagctttactatgtgaaatttttgtcactcccagaggtgagacaagccatccacgtggggaatcagacttttaatgatggaactatagttgaaaagtacttgcgagaagatacagtacagtcagttaagccatggttaactgaaatcatgaataattataaggttctgatctacaatggccaactggacatcatcgtggcagctgccctgacagagcgctccttgatgggcatggactggaaaggatcccaggaatacaagaaggcagaaaaaaaagtttggaagatctttaaatctgacagtgaagtggctggttacatccggcaagcgggtgacttccatcaggtaattattcgaggtggaggacatattttaccctatgaccagcctctgagagcttttgacatgattaatcgattcatttatggaaaaggatgggatccttatgttggataaactaccttcccaaaagagaacatcagaggttttcattgctgaaaagaaaatcgtaaaaacagaaaatgtcataggaataaaaaaattatcttttcatatctgcaagatttttttcatcaataaaaattatccttgaaacaa

SEQ ID NO: 330 - DNA, 1030 bp, Homo sapiens
cttcctcccggcacagaaggcctccccctctcaccagggccctcgcccgctggtccgccaggccccgccttttttgcggcccccattgtgctgctggacccgacgagcagtgttgacagtgaaccccacgtagacgcggccccggtaccgggggttcaggcagtagagcaggtagacgccgaaaaagcgccctggcctcgccgcgacccccgcgggacccatcgggccttggggttcgggaaccacagcagggggttgattgccgtgacctagggtccaggggagggctggatcgctagggctgcagggtgcttgcttcggaacaagctctcggggactatccggaggcagcctgcaggaagccgtagcgccggtacgtgcccctctcctgtctggaggcgggtgtagaagtccgaccgcggaagccagactgctgtccagtcggcgagcgcgtaccattcagcatcggctccgcccgagtcccaccttcctcaggctctgattggctgacacatggcaagcgcgaaaagcctggaccgctggaaagcccggctgcttgagggcggaagtactgcgttgacgtacgccttagtaagggcggaagtgagttttccagcggaagtggctcctgtaaggcagcaaggtagcgtggccggcgcccgagctggggttgtgtccctgctgggctgccgttccagctggactgccgccatggaactcagcgccgaatacctccgcgagaagctgcagcgggacctggaggcggagcatgtggaggtggaggacacgaccctcaaccgttgctcctgtagcttccgagtcctggtggtgtcggccaagttcgaggggaaaccgctgcttcagagacacaggctggtgaacgcgtgcctagcagaagagctcccgcacatccatgcctttgaacagaaaaccctgaccccagaccagtgggcacgtgagcgacagaaatgagggactgggatctgcacagccattaaattataaatctggaaaaaaaaaaaaaaaaaaa

SEQ ID NO: 331 - DNA, 2154 bp, Homo sapiens
tccgcttccgtccacttggcgagtgagacgctgatgggaggatggacgtactggtgtctgagtgctccgcgcggctgctgcagcaggaagaagagattaaatctctgactgctgaaattgaccggttgaaaaactgtggctgtttaggagcttctccaaatttggagcagttacaagaagaaaatttaaaattaaagtatcgactgaatattcttcgaaagagtcttcaggcagaaaggaacaaaccaactaaaaatatgattaacattattagccgcctacaagaggtctttggtcatgcaattaaggctgcatatccagatttggaaaatcctcctctgctagtgacaccaagtcagcaggccaagtttggggactatcagtgtaatagtgctatgggtatttctcagatgctcaaaaccaaggaacagaaagttaatccaagagaaattgctgaaaacattaccaaacacctcccagacaatgaatgtattgaaaaagttgaaattgctggtcctggttttattaatgtccacttaagaaaggattttgtatcagaacaattgaccagtcttctagtgaatggagttcaactacctgctctgggagagaataaaaaggttatagttgacttttcctcccctaatatagctaaagagatgcatgtaggccacctgaggtcaactatcataggagagagtataagccgcctctttgaatttgcagggtatgacgtgctcaggttaaatcatgtaggagactgggggacccagtttggcatgctcatcgctcacctgcaagacaaatttccagattatctaacagtttcacctcctattggggatcttcaggtcttttataaggaatctaagaagaggtttgatactgaggaggaatttaagaagcgagcatatcagtgtgtagttctgctccagggtaaaaacccagatattacaaaagcttggaagcttatctgtgatgtctcccgccaagagttaaataaaatctatgatgcattggacgtctctttaatagagagaggggaatccttctatcaagataggatgaatgatattgtaaaggaatttgaagatagaggatttgtgcaggtggatgatggcagaaagattgtatttgtcccagggtgttccataccattaaccatagtaaaatcagatggaggttatacctatgatacatctgacctggctgctattaaacaaagactatttgaggaaaaagcagatatgattatctatgttgtggacaatggacaatctgtgcacttccagacaatatttgctgctgctcaaatgattggttggtatgaccctaaagtaactcgagtcttccatgctggatttggtgtggtgctaggggaagacaagaaaaagtttaaaacacgttcgggtgaaacagtgcgcctcatggatcttctgggagaaggactaaaacgatccatggacaagttgaaggaaaaagaaagagacaaggtcttaactgcagaggaattgaatgctgctcagacatccgttgcgtatggctgcatcaaatatgctgacctttcccataaccggttgaatgactacatcttctcctttgacaaaatgctagatgacagaggaaatacagctgcttacttgttgtatgccttcactagaatcaggtctattgcacgtctggccaatattgatgaagaaatgctccaaaaagctgctcgagaaaccaagattcttttggatcatgagaaggaatggaaactaggccggtgcattttacggttccctgagattctgcaaaagattttagatgacttatttctccacactctctgtgattatatatatgagctggcaactgctttcacagagttctatgatagctgctactgtgtggagaaagatagacagactggaaaaatattgaaggtgaacatgtggcgtatgctgctatgtgaagcagtagctgctgtcatggccaaggggtttgatatcctgggaataaaacctgtccaaaggatgtaatccttcataggtttgaacactgtgtgtttttaccaaagtggccattggcactgtttgcttttttacaatcatgtggacacaagcataagtaaagaaaatttgtcaaccaggcaaaaaaaaaaaaaaaaaa

SEQ ID NO: 332 - DNA, 3004 bp, Homo sapiens
agtgcgtggcagcgggacctgcggccccgtcgcgaagtttccagccctgcgagcgccgccgggtcggccgatcgtcccccatacctcggccatgcggcccctgctgctactggccctgctgggctggctgctgctggccgaagcgaagggcgacgccaagccggaggacaaccttttagtcctcacggtggccactaaggagaccgagggattccgtcgcttcaagcgctcagctcagttcttcaactacaagatccaggcgcttggcctaggggaggactggaatgtggagaaggggacgtcggcaggtggagggcagaaggtccggctgctgaagaaagctctggagaagcacgcagacaaggaggatctggtcattctcttcgcagacagctatgacgtgctgtttgcatcggggccccgggagctcctgaagaagttccggcaggccaggagccaggtggtcttctctgctgaggagctcatctacccagaccgcaggctggagaccaagtatccggtggtgtccgatggcaagaggttcctgggctctggaggcttcatcggttatgcccccaacctcagcaaactggtggccgagtgggagggccaggacagcgacagcgatcagctgttttacaccaagatcttcttggacccggagaagagggagcagatcaatatcaccctggaccaccgctgccgtatcttccagaacctggatggagccttggatgaggtcgtgctcaagtttgaaatgggccatgtgagagcgaggaacctggcctatgacaccctcccggtcctgatccatggcaacgggccaaccaagctgcagttgaactacctgggcaactacatcccgcgcttctggaccttcgaaacaggctgcaccgtgtgtgacgaaggcttgcgcagcctcaagggcattggggatgaagctctgcccacggtcctggtcggcgtgttcatcgaacagcccacgccgtttgtgtccctgttcttccagcggctcctgcggctccactacccccagaaacacatgcgacttttcatccacaaccacgagcagcaccacaaggctcaggtggaagagttcctggcacagcatggcagcgagtaccagtctgtgaagctggtgggccctgaggtgcggatggcgaatgcagatgccaggaacatgggcgcagacctgtgccggcaggaccgcagctgcacctactacttcagcgtggatgctgacgtggccctgaccgagcccaacagcctgcggctgctgatccaacagaacaagaacgtcattgccccgctgatgacccggcatgggaggctgtggtcgaacttctggggggctctcagtgcagatggctactatgcccgttccgaggactacgtggacattgtgcaggggcggcgtgttggtgtctggaatgtgccctatatttcaaacatctacttgatcaagggcagtgccctgcggggtgagctgcagtcctcagatctcttccaccacagcaagctggaccccgacatggccttctgtgccaacatccggcagcaggatgtgttcatgttcctgaccaaccggcacacccttggccatctgctctccctagacagctaccgcaccacccacctgcacaacgacctctgggaggtgttcagcaaccccgaggactggaaggagaagtacatccaccagaactacaccaaagccctggcagggaagctggtggagacgccctgcccggatgtctattggttccccatcttcacggaggtggcctgtgatgagctggtggaggagatggagcactttggccagtggtctctgggcaacaacaaggacaaccgcatccagggtggctacgagaacgtgccgactattgacatccacatgaaccagatcggctttgagcgggagtggcacaaattcctgctggagtacattgcgcccatgacggagaagctctaccccggctactacaccagggcccagtttgacctggcctttgtcgtccgctacaagcctgatgagcagccctcactgatgccacaccatgatgcctccaccttcaccatcaacatcgccctgaaccgagtcggggtggattacgagggcgggggctgtcggttcctgcgctacaactgttccatccgagccccaaggaagggctggaccctcatgcaccctggacgactcacgcattaccatgaggggctccccaccaccaggggcacccgctacatcgcagtctccttcgtcgatccctaattggccaggcctgaccctcttggacctttcttctttgccgacaaccactgcccagcagcctctgggacctcggggtcccagggaacccagtccagcctcctggctgttgacttcccattgctcttggagccaccaatcaaagagattcaaagagattcctgcaggccagaggcggaacacacctttatggctggggctctccgtggtgttctggacccagcccctggagacaccattcacttttactgctttgtagtgactcgtgctctccaacctgtcttcctgaaaaaccaaggcccccttcccccacctcttccatggggtgagacttgagcagaacaggggcttccccaagttgcccagaaagactgtctgggtgagaagccatggccagagcttctcccaggcacaggtgttgcaccagggacttctgcttcaagttttggggtaaagacacctggatcagactccaagggctgccctgagtctgggacttctgcctccatggctggtcatgagagcaaaccgtagtcccctggagacagcgactccagagaacctcttgggagacagaagaggcatctgtgcacagctcgatcttctacttgcctgtggggaggggagtgacaggtccacacaccacactgggtcaccctgtcctggatgcctctgaagagagggacagaccgtcagaaactggagagtttctattaaaggtcatttaaacca

SEQ ID NO: 333 - DNA, 1200 bp, Homo sapiens
cagttaaaaggaggcgcctgctggcctccccttacagtgcttgttcggggcgctccgctggcttcttggacaattgcgccatgtgtgctgctcggctagcggcggcggcggcggcggcccagtcggtgtatgccttctcggcgcgcccgctggccggcggggagcctgtgagcctgggctccctgcggggcaaggtactacttatcgagaatgtggcgtccctctgaggcaccacggtccgggactacacccagatgaacgagctgcagcggcgcctcggaccccggggcctggtggtgctcggcttcccgtgcaaccagtttgggcatcaggtgcgccgggcggagcggggcggggcgggggcggacgtgcagtagtggctgggggcgccggcggtgtgctggtgggtgccgtcggctccatgcgcggagagtctggctactctctcgtttcctttctgttgctcgtagctgctgaaattcctctccgcccttgggattgcgcatggagggcaaaatcccggtgactcatagaaaatctcccttgtttgtggttagaacgtttctctcctcctcttgaccccgggttctagctgcccttctctcctgtaggagaacgccaagaacgaagagattctgaattccctcaagtacgtccggcctggtggtgggttcgagcccaacttcatgctcttcgagaagtgcgaggtgaacggtgcgggggcgcaccctctcttcgccttcctgcgggaggccctgccagctcccagcgacgacgccaccgcgcttatgaccgaccccaagctcatcacctggtctccggtgtgtcgcaacgatgttgcctggaactttgagaagttcctggtgggccctgacggtgtgcccctacgcaggtacagccgccgcttccagaccattgacatcgagcctgacatcgaagccctgctgtctcaagggcccagctgtgcctagggcgcccctcctaccccggctgcttggcagttgcagtgctgctgtctcgggggggttttcatctatgagggtgtttcctctaaacctacgagggaggaacacctgatcttacagaaaataccacctcgagatgggtgctggtcctgttgatcccagtctctgccagaccaaggcgagtttccccactaataaagtgccgggtgtcagcagaaaaaaaaaaaaaaaaaaa

SEQ ID NO: 334 - DNA, 1986 bp, Homo sapiens
aaggccccgctgcgtcttccgagccgcaggcgcaggcccagctgagcggccgccgagcgggtgcgggtgcgggcgcatcggccatcaccgcgcggccgcgcagcggacaccgtgcgtaccggcctgcggcgcccggccaccggtgagtccccggcccgagcccaggagcgcctctgacccgctgcgccgcgcggcctgccgcccccgcccccgcccccacgcggatcttgcgcatccgagcgtggccgcctcgggggcggaccgcggaacccgaggccatgtcccatgaaaagagttttttggtgtctggggacaactatcctccccccaaccctggatatccgggggggccccagccacccatgcccccctatgctcagcctccctaccctggggccccttacccacagccccctttccagccctccccctacggtcagccagggtacccccatggccccagcccctacccccaagggggctacccacagggtccctacccccaagggggctacccacagggcccctacccacaagagggctacccacagggcccctacccccaagggggctacccccaggggccatatccccagagccccttcccccccaacccctatggacagccacaggtcttcccaggacaagaccctgactcaccccagcatggaaactaccaggaggagggtcccccatcctactatgacaaccaggacttccctgccaccaactgggatgacaagagcatccgacaggccttcatccgcaaggtgttcctagtgctgaccttgcagctgtcggtgaccctgtccacggtgtctgtgttcacttttgttgcggaggtgaagggctttgtccgggagaatgtctggacctactatgtctcctatgctgtcttcttcatctctctcatcgtcctcagctgttgtggggacttccggcgaaagcacccctggaaccttgttgcactgtcggtcctgaccgccagcctgtcgtacatggtggggatgatcgccagcttctacaacaccgaggcagtcatcatggccgtgggcatcaccacagccgtctgcttcaccgtcgtcatcttctccatgcagacccgctacgacttcacctcatgcatgggcgtgctcctggtgagcatggtggtgctcttcatcttcgccattctctgcatcttcatccggaaccgcatcctggagatcgtgtacgcctcactgggcgctctgctcttcacctgcttcctcgcagtggacacccagctgctgctggggaacaagcagctgtccctgagcccagaagagtatgtgtttgctgcgctgaacctgtacacagacatcatcaacatcttcctgtacatcctcaccatcattggccgcgccaaggagtagccgagctccagctcgctgtgcccgctcaggtggcacggctggcctggaccctgcccctggcacggcagtgccagctgtacttcccctctctcttgtccccaggcacagcctagggaaaaggatgcctctctccaaccctcctgtatgtacactgcagatacttccatttggacccgctgtggccacagcatggcccctttagtcctcccgcccccgccaaggggcaccaaggccacgtttccgtgccacctcctgtctactcattgttgcatgagccctgtctgccagcccaccccagggactgggggcagcaccaggtcccggggagagggattgagccaagaggtgagggtgcacgtcttccctcctgtcccagctccccagcctggcgtagagcacccctcccctcccccccacccccctggagtgctgccctctggggacatgcggagtgggggtcttatccctgtgctgagccctgagggcagagaggatggcatgtttcaggggagggggaagccttcctctcaatttgttgtcagtgaaattccaataaatgggatttgctctctgcaaaaaaaaaaaaaaaaaa

SEQ ID NO: 335 - DNA, 39614 bp, Homo sapiens
atcctcactgttaacctaggggtctggcacaataattgtgcagcctcgaactcctaggctcaagtcatcctcctacctcagcttccttagtacctgggattacaggcacatgtcaccatgcccatctaatttttaaattttttactttttcttttcttttttttttgagatggagtctagctttgctgtccaggctggactgcaatggcatgatcctagctcactacaaccaccgcctcctgggttcaagcgattctcctgcctcagcctcccaagtagctaggattacaggtgcccaccaccatgcccggctaatttttgtatttttagtagagatggggtttcaccatgttggccaggctggtctcaaactcctgacctcaaatgatccatccccctcagcctcccaaagtgctgggattacaggcatgagccactgcgcccagccaagttttaaattttttctggagatggggtgctcgctatgttgcccaggctggtctcaaactctaggcctcaagtcctcctgccccgacctcccaaagtgctgagattacaggcatgagccactgtgctcagccccaacaattatttttgacagataatagggatgtctccttgctctctgtgtctggccaagtagccccaggtgacactcttttttttttgtttgtttttgagatggagtcgtgctctgttgcccagcctggagtccaatgccgtggtctcggctcactgcaatctccgcctcctgggtttaagtgattctcctgcctcagcctccagaggagctgggactacaggtatgtgccaccacacctggctaatgttcttatttttagtagagatgggatttcgccatgttggccaggctggtctcgaactccagacctcatgatccacccgccttggcctcctaaagtgctgggattacaggtgtgaaccaccatgcccggccgtgacactcgttttatagcatcaggctggtgaccagaatgtcatggcttctgggcagaggccagcttccatgccgtgtcctgtcttcctagtgcagatgtccccagctgcagtgagtaccagtgtgagggaatgggctccagactcccagaggggccacagggatggccacgccaagctctggggagtagccgattccccagcacctgcctgcccatgcacctttggggtgactcatgagacagggtggggctcccacctcccctctcccaaaaggcaatcagctataaaggctctcagaggcccacccagccccaggtcatcaaacaagccccagttccatggcaaccattatacccattcatcaaggagatgaagaaggaggtgcttcctggttcaccccaccctcagcagagacagaccccagatctgggcccaggactttgtgcagggaggggaaatgcaggtgactcagcccctattcctccatcaaaccagccttgaagatgggttaaatcagagcttttcattccacaaaagagaaattttaatggggtcagaacattgatcttctaatatttgaaagcctgttaactaggagagagagagcaaactattttgttgtaggaggacccacccagctctgacggtttaaagcgtcatgaatgcgaatttgaactccagaaaagcagagcttcctaacaatgggacttccacagcaatgggatctgcttcctctttcagtttgtgccttttctatgagcgagagactcctaggaaagcagcagcccattaggaaaacgtgtgggaactcactcgcaggttctttattttttttgagatggagttttgctcttgttgcccaggctggagcacaatggtgccatcttggctccctgcaacctgcgcaccatgagttcaagtgattctccagcgccctctcctgagtagctgcgattacaggcatccaccaccatgcctggctaattttttgtatttttagtagagatggggtttcaccatgttgtccaggctggtctcaaactcctgacctcaagtgatccacccactttggcctcccaaagtgctgggattacaggcatgagccactgagcccagccgggaacccacaggttttttggatggtctctgaatgtcatgtaactcttttattttttatcaaaaaaaatttttttgacacagtatcttgctgtgttgcccagactggagtgcagtggcaagatcacggctcactgcagcttctaactcctgggctcaagtgatcttcctgtcacatgagtctcccaagtagttggaacacaggtgccagccaccacacctggctaatttggtttggttttgtttttttagagatgggctcttgctatgttgcctatactggtctcgaactgctggcctcaggcaatcttcctcccttggccacccaaagtgctgggattacaagcatgagccactgtgcacagctgaaattttttgacttagtctttttgtacatgtgatattttattcatagaatccataaatggaagggaaatttctgagttcagagcaatacatatgatacaaaacttgatatatagactagagtttcttagccgaactggaggggctggcttaggtaatccatggattccctgaaactggggacaccattggaaatatgtgtgagctcaggggcagtttcctatgatttttaggcctcaaaatgtctcttggactcaaaattgccttagggcagaggacgtgtgtacccccagtatagaatctcggacagtgaatgtgagtaaacattcggcagaaaagctctgccaaactgagtgctctgatgtgactttttcatcaagtcagtattcctgggatctcttgtacgtgataatctcactcttgtacatgataatctcactcttgtacatgatactctcactcttataaggtttcatcgtttctgcttaccctagttttctttcccactctgttccctctcccaccagactggactctgaaatgggcatgtacagagacgaagagaccccaacatgcttcaggctttgagtggagaggacacagcctctgctgggacagggaatagagggatgtggagtccctgaagatgcttttggacaatggtctgaggttgggacagtggcaggagataccattcacccaggatctccaggacaagagatcagcctggcagttacatgtgttttttttcaaactggttgccaggttggcatgaacgatgacatcagagattccgaccttcctgattggagggaccggactccgtggtgcctggagatcagttggacaacagtatcttctcagagctgttctctactcctgacttctcctaggcttgagaattgataacatactcttctggatcctagaagtgtccagaagaaggccatggacagaacggagactaggttccgtaagaggggacagattacgggaaagatcacgaccagccgtcaaccgcacccccagaatgagcagagtccccagcggagcacctcggggtaccccctccaggaggtggtggatgatgaaatgttgggaccatcaggtgaggggactggtggaagaagaggtgggataggattgactaagacgaaggaagggggccgggtgcggtggctcacgcctgtaaccccagcactttgggaggccgaggcgggcggatcacctgaggtcaggagatcaaggccagcctggccaatatggtgaaaccccatctctactaaaagtataaaaattagccaagttgtagtggtgcacacctgtaatcccagctactcaggaggctgaaacaggagaatcacttgagactgggaggaagaggttgcagtgagctgagagcacgctactgcactccaaaaaaaaaaaaaaaaaagaaaagaagggtcagtggtcaggaaggagaacctgaggagggtgtgtgggaagaatggagaaattcaggctgggtgcagtggctcacacctgtaagcccagaactttgggaggccaaggcaggcggatcacttgaggccaggagtttgagaccagcctggccaacatggtgaaaccctgtctctactaaaagtacaaaattgagctgggcattatggcaggcacctgtaatcccagctacctgagaggctgaggcagaagaataaatggaatccaggagatggatgttgcagtgagctgagattgcaccactacactccagcctgggtgacaaagcaagattctgtgtcaaaacaaaacaaaacaaaaaaggagggactcagagagccagggaccagggaaggacatgaagcagtgttcggaggacagagagagagaagaatggggaggggaaggagcggcacatggggttgagcagaggagaaaatcagaaagatggcttagagaagccagcagtctgcaagtctggggaggatggagagtggtttggggtttggggtcggggtctaaggtgatcagatgcagaagcattacacggtggcctggtttctttactcagcccctggggtagatcccagccccccatgtaggtcccttggctggaaaaggaagagggagtggtcagatgaatctgaggaggagccggagaaggagctcgcccctgagcctgaggagacctgggtagtggagatgctgtgtgggctcaagatgaagctgaagcaacagcgagtgtcacccatcctccctgagcaccacaaggacttcaacagtcagcttggtaggaggataccccagagagcacctccaatcctgttctttctaaaaagaggaaacttccaataaccacacttttccaatgggaaagatacgcccccagtggctgagctctccacgcaggaggactcagaagtgatcactcatgagggacacttaggagacgatagaagactaggctagacttgataaaggttggcgcttgggatgagaaagcttggtttcgggccaggtgcagtggctcatgcctgagatgctagcacgttgggaggctgaggcaagaggattgcttgaactcaggactttgaggctgcagtgagctatgactgcaccactgcactccagcctgggtgacagagcaaaaccctgtgtcaaaagaaaaacgaaggccaggtgtggtagctcatgcctgtaatcccattactttgggaggctgagatgggtggatcacttgaggtcagttgttcgagaccaaccagaccaatatagcgaaacctcatttatactaacaatacaaaaattagccaggcatgcctgttatcccagctactcaggaggctgagacaggataatcgcttgaacccaggtggaagaggttgctttgagccaagatagcgccactgcattccattctgggtgagagagtgagacgctgtctcaaaaaaaaaaaaaaaaaaaaaaaagaaggaaggaagggcccagaagtcaggaaggagcacatgaggagggtgtgtgggaagaatggaggtactgaggcagggtgcagtggctcacacctgtaatcccagcactttgggaggccaggcaggcagatcacttgaggccaggagttggagaccagcctggccaacatggtgaaaccctgtctcttctagaagcacaaaaatgagctgggcgttctggtgggcacctgtaatcccagctacttgggaggcttaggcaggagaatcactggaacccgggaggcagaggttgcagtgagccaagatcgcaccactacactccagcctaggccacaaagcaagactgtttctcaacaacaacaacaacaacaaaaaaaaaaaaaaaaaaaagggactcagagagccagggaccagggaaggatatgaggaagtgttctgaggacagaaaaacgggagaatggggaggagaaggagcggcacatggagctcagcagaggagacagacagaaggaaagatggcttggagaagccagcagtctgcgaggctggggaggatggagagtggtttggggttttgggtcgggctctagtgtgatcaactgcagaagcattacaccgtggcctggtttctttactcagcccctggggtagatcccagccccccgcataggtccttttgctggaaaaggaagatggagtggtgggacgaatctgaggagtcgttggaggaggagccacggaaggtgctcgcccctgtgcctgaggagatctgggtggcggagatgctgtgtggcctcaagatgaagctgaagcgacggcgagtgtcgctcgtgctccctgagcaccacgaggccttcaacaggctgcttggtaggaggacaccccagagagcacctccaatcctgttctttccaaaaacaggaaacttccaataaccacacttttccaatgggaaaaataggccccagtgggtgagctctccatgtgggaggaatgtgaagtgatcactcatgagggacacttaggagatgataaaggattaggtcaacttgataaaggtcagcgcttgggataagaaagcttggtttcgggccaggcgcagtggctcccgcctgagatcccagcacgttgggaggctgaggcaagaggattgcttgaactcaggactttgaggctgcagtgagctatgactacaccactgcactccagcctgggtgacagagcaaaaccctgtctcaaaagaaaaaccaaggctgggcacagtagctcatgcatgtaatcccagctactcgggaggctgagacaggagaatcgcttaaacccgggaggcagaggttgcagtgagccaagatcaggccactgcattccagcctggcccacagagcaagactctgtctcaaaataaattaataaataaataaaaataaaaatccaataaagaaaaacaaaatcaataaacaaagaaagtggtttcagctgtgccctctgaaacttaatgtctcttactgacttttctaaacctaagtgtctccatccatagtgggggataccaaggccatggtcacaccctgatgtgactgtctcatgaggaaatgatgggaattcctttatgactctgcagtggtccctccgtgtctgctggagggggtcccggctgattcccagctctacatcctgtagattctcacacccagggcctccttcggcctcttctcaggggagtgtcagagcaggagcctctctcccttgcccagtgaaagtcattctcccctctcccatccacctcacccgcggccacaatcctgagacttccccccgggaggcacacttctcctcgctgccctgctgctcccacggaaaccctgtcctgcttctcacactgacatctgctctctaatcacagaggatcctgtcattaaaagattcttggcctgggacaaagatctgagggtgtcggacaaggtaaggttgttctccatgtaactgttcctgttccaacgcatggctggggggagggcgcagcttccaaacccacagttctccctccaccacctcccaccagatgctcctacagtcttttttttttttttttttttttgtgtgtgtgtgtgtgtgtgtgagacagagtcttgctctgttgcccaggctggagggcagtgtctcgatcttgactcactgcagccgatgcctcctgggttcaagcgattctcctgcctcagcctccaagcagctgggattacagacatgaaccaccacgcctggctaatttttgtgtttttagtagaaacggggttttgccatgttggccaggttggtcctgaacacctgacctcaggcgatccacccgccttggcctcccaaagtgctgagattatagacgtcagccactgtgcccgaccagctcccatggtcttgagtcttggcacccacaaattttttttttgtgagacagagtctagctctgctccccaggatggagtgcagtggcatgatcatagctcattgcagcctctaattcctgggctcaagcaatcttctttcctcagcctcctgaggagctgggactaggcacatgccaccatgctcaactaatttttgaaatgtttgtagaaacagggtctcactatgttgcccaggttgttctcgaactgttgggctcacatgatcctcctgtctccacctctcaaaaagtactgggatcacaggcttgagccgccactcccggctattcttggtctttttatgatttgtcagcatctccctcaggattctgctggtctcttgcagagtgaatgagtggcccctgcctctcctatgggtcctttgggatctgagctctgggccacagtctggccgcagccccgaagctcctggcccctctactctcagctcttcgggacagttctctgcctggcacacaaaagaccctcctgacaccagccgacctagacacaccccctccaaagatcccatcggagcccaccatcctgggagcatcacccaaaacccttcctctggcttctcggatttgcatccgaccttcgaatacccctccatcccgcaatttccaaatgagtagtcaccccaacactgaggtcccttctctgatgggcagcccctccccagaccctcattccccctctccacaatcttcctcttccaagatgtgacctctccctctctgtgttcctttctctccatcagtatctcctggctatggtcatagcgtatttcagccgggccggcttcccctcctggcaataccaacgcattcatttcttcctggctctgtgagtggtttgctgcctcctatccgtcaatatccaatgccctgggacagcgggggaagtgggattccagcctttcatttattctttcacctatttgtcctctttactctgtgtacaaaaaagagaggattatactatcatagactgttgtttctaaacagaaactcaggctgggcacagtggaatacgcctgtaatcccagcactttgggaggccgaggcaggcggatcacctgaggtcagcagttcgagaccagcctggccaacatggccaaatcccgtctctactaaaaatagaaaaattagctgggcgtggtggtgtgcatctgtaatcccagctactcgggaggctgaggcaagagaaccctttgaacccaggaggtggaggttgcagtaagctaaggtcgagccactgtactccagcctgggtgacagagtgagactttttctcaaaaaaaaaaaaaaaaaaaagccaaaaaaacaaactccaatgccagtgtacaaataaaagaataaaacaaaaggaaccataaaccgctcctaaggggaaaagaaaaggagtggaggagcggacatgccgcttcctccagcaagcagacgtttctggttcttctctctctctccttcccacatcaaccacaaacgccatcgacctcctctgggttcccatgacagaggccacagttcaggtccccctcgcatcactcgaatttactgtcaaatgctccccgctggggtctcctggagtctctccccaagccagggggcttcctagtgcagcctgaacatctttccaaagcacgacaacctcactgcccacctgaacaacttccttagctgatgcctttctctatcgaggccagggtccacagtgtcaattctaccctctctacaatctctacaagcacactggctcgccatcttggtatttcctggctcggcttcactgctccttccaaatgccctccactcgactttgtgtttgtgttttctgtctgggtgtcctgcacacatgtggctctgaagggaaggacccattccttgaaatcagttcaccccacagcctctgtgatgccttccctcatcttccaacttctgcatgcccgtagctctctagttacatcctggacactgggattaggtcatctgccttgattactcccagtcccattagactagatgcctgtagaaggcagggtcctggcaaaatatcaatgtattcaatttcttttatttttttgagacagacttgccctgtcccccaagctggagtgcagtggtgagatcatagctcaccgcagcctccatatcctgggctcaagcgatcctcccacctcagcttctttattagctccgactacagggctgtgccaccacacctggacagtttgtttgtttgtttgtttattgagacagagtcttgttctgcctctcaggctggaatggagtggcccaatctcaactcactgcaacctccgcctcctgggttcacacaattcttgtgcttcagcctcctgagtagctaggcctaacgggtgtgccaccgcaccaggctcatttttgtatttttagtagagatggggtttctccgtgttgaccaggctggtctccaactcctggtctcaagcgatccacctgcttcagccttctaaagtgctgggattacaggcatgagccaccgcgtctggcatatttcttacatttttaatagagacgagggtcttgctatgttgcccaggcccgtctcaaactcctggcctcaagtgatcctcctgctttggcctcccagtgtgctgggattccaggcgtaagccaccactctcggccaccagttgggtttttgtctccatcctgaaggagtgggagacgcccttgatcaggtctctgtccagcagagccctcctgaggaaggcatggctctctgcagggtgggtgccagtcctgagctagggacggtcccttaccttcctctctgggaagctgacctcagccggaggcctctcctggtggtgcccctgagcagcaacctgatttctgtcctcagctacctggccaatgacatggaggaggacgacgaggactccaaacaaaacatcttccacttcctgtataggaagaaccgctctcgcatacccttgctccgtaagcgttggttccagttaggccattccatgaacccgagggccaggaagaaccgctctcgcatacccttgctccgtaagcgtcggttccagttataccgttccacgaacccgagggccaggaagaaccgctctcgcatacccttgctccgtaagcgtcggttccagttataccgttccatgaactcgagggccaggaagaaccgctctcagatagtcctgttccagaaacgacggttccacttcttctgttccatgagctgcagggcttgggtttccccagaggagttggaggaggtgagtggggcctggggaggtggaggaggtggtgaggaattgggtgggctggaggctggatgaggggagagaggggtatcctggcgagtccccgtcttctcaaagggcgtttgtttttccagatccaggcttatgacccagagcactgggtgtgggcgcgagatcgcgctcacctttcctagagctccagggaccggggaggcctgaggtcatcggcctgagagaaggtacatctgcatcctctggggtaaaggcagaatattggggtctatttcggaaatccgaagaacccaattgcttgatctggcttcaagcctgggcaacgtggcgagatcccctctccacaaaaatacaaaaactagccaggcgatgtgggacgcatctctactcccaactactcaggaggctgaggcgggaggatcgctggagcctggaaggtcggggccgcacggagccctgatcctgccactgcactccagtctgggcgacagagtgagaccctgcctcaaaaataatcataaaaactgagtttggggaggttcattatgattgacgcacttgagttactgatttgggtcgagggttcagtgaagctttggtttacatcttgtgcagctaaccacgttgagcacagagcatgagacttcatcatgaggaggtaggattaaggattaggcttctggactcgtggttcgtgatgttgtcacattagaaacacatctagcatggttacaagtttagatcttaagtgacacaaaaggccccagctgtgataaagtccaaagccacattctctgagggtgccctactccctgggcagacccacccaaagtccttgctatgaagcagatcactggggctgaccttgggtgtattaagtgagttttggagtcgtggtcaccaaagtgtgagtttcacagttgaacacgatggttcagaagcagggtatagaatgaaaggcagcagataaaattgcatttctcaattgacatgggacgtgaataactttcctgtctagagagctgcctccttgaagtgtgacattgtctctctcgcttccagaacaccggacccaggggagatgtggattttcagcgggaactttattccaatgctaatggcagacaccaggcaggaggagaggaaccatttgtgcagatcatctagaagaacctggaccattcttgatggagctgaatacagtgatcacgttgtcctcctaggagcaggggtggggggaggggggtggggtccttctaggagtccttggagaaaagtaagaaaccaggagcgtttccagttccaccctttcctgcggcaccaccaccctttttatattgctgaattccaacctccctggggcggaacctggaggtcctgtttcttacggacttgcagtccaggaggatttgaaggcacaatgcaggggctcagattgggacagaattcttttgtgaaatatcagtgccacagattgtaacagatagcttcatgcacactctgcattttattggtttgtatggaaaatgtcggccattgaattattcatagatttatttcaaatagtttggaaattgttgtacttttgaaaacatgctgttcctgtagttttttgatgagagttatagttgttatatatacataaagctaattttcttttcatttttaagagacaattctttttatcctaaatattttattatctttaaatttgtttctgtattattacatgtgctcctgaagcgagcactctttttatctatgatacttccataataatctcttctatttatagctattggtagttccccaccagaaaaaaacataattctggtgatagaaatttttatttgctgtttaggtttgtgactgaattgtgagaattcagttgtgatttttaacatgcctcagatatatatactaacacgtctaatatatactatctattttattggtttattttgaaaaacatgggtatagaattatttaaatattattttatttatttaaatatttattaaatatatttatttatttaaatattattattactttaaatattattttaaatattttggaaatactggtatttttgaatagatgctgtttctataaagctgtgtgatggatattataactgttatatacacatacatataattttgttttcctttttaagagaggattcttttcatcctaaatcttttacctttcaatctttgcatctattattacacgtgctgctgaagggagcatggtttttatctatgatacttagttaacatatatattacatttatagctatgtagtagttcccctaaattcttgtaaaaataaatttttatttgatatttcatatatatttgaaatgtgagaattcagatgtaattttttaccttgttttggcatgtttgtatgttactttaaagaggatgtgtgttctaaaggaggacatgagctgtgtgttttcaagagaacaatagagtgcgtctcttggggaaacataataaaaatgaacttttctcaccttcacagcaattgtgatcatattggtctggattgattatttgctgcccagtgatatttttccttaatggggttgtggttatttgaacatatttattagctctggaagataatcctgtgctgttttttatgtagaaaaaaacataaggctgggtgcagtgctcacacctacaatccctgtggttttggaggtcatggcgggaggatcacctgaggccaggagtttgaggccagcctcagcaacatagcatctacatccatttttaatttttattttttaaagaaaaacaatagaagagaaggctgatcccaagctacagggtttttttgtttgtttgtttgttttggagacagagtcttgctctgtctcccaggctggagtgcagtggcacaacctcggctccctgcaactttcacctctgggttcaaacaaattctcctgcctcagcctcccaagtagctgggactacaggcacccgtctgtacgtccgactaacttttgtaaaaatagtagagacaaggtttcaccatgttggccaggctggtctcgaactcctgacttcaagtgatccacctacctcggcctcccaaagtgctgggattacaggcatgagctactgcgcccagatgccaagctagagttttaaggcaggaaatgagagaaagatattgagagaggaaaaccaggtggtaagaaaactctaaaggtggccgggcgtggtggctcacgcccatgatcccagcaggagtttgagaccagcctggccaacatggtgaaaccctgtctctactaaaaatacaaaaattaggcaggcgtggtggtgcacgcctataatcccagctatttgggaggctgaggcaggagaatcactagcagagattgtgtctcctcaccccctctcaaaaaaaaaaaaaaaaaaaaagttcgttcctgcagcagttaaagctgtgaaagacaggcactctgacatgcaattccttgtgatttttctttttcctttttggagttggggtcttgtgctgtcacccagactggggtgcagtggtgtggtcatagctcactgcggcctcagactcaagctcaagcgatcctcttaccttgcctttcaaattgctgggattataagcatgagccactgcatctggcctgtgtgacacaattttttttttgtcttttttctttttgggggggatggagtctcgctctgtcacccaggctggagtgcggtggcgtgatcttggctcaatgcaagctctgcctcctgggttcacgccattctcctgcctcagcctcccgagtagctgggactacaggcgcccgccaccatgcctggctaattttttgaatttttagtagagacgggatttcactgtcttagccaggatggtctcgatctcctgacctcgtgatctgcccgccttggcctcccaaagtgctaggattacaggcgtgagccaccgcgcccagcctatgtgatgcaattctgatgtcaactccctgatgttacctcaaatgccacaggttaaggccaccagtccccactaggctgccctcgctttagacacacctgcaggcttgggtgtcctcagaccacatgtacttctcaccaactggctgcaaatttggaggttcccaccatgccctcaagttcgataactcactaaaacaattcacagaatgcagaaaagcatgatactttctttctcttttttttttttgagacggagtcttgctctgtcacccaggctggagtacagtgaccaccatgcttggctaatttttgtatttgtattagagacggggtttcgccatgttggccaggctggtcttgaactcctgacctcaggtgatccacccgccttggcatcccaaaatgctgggattataggcatagccaccatgcccggttgacttctagagtttcaataacagagatgtgattcaagaagggagacatgttttgtagatggcaggagcttcatgaaaagaagccaatgaagggcaggacgtgtagctgtctacctacaggaaaccagccaggagcctccccacagggacttcagcacagatggccgggaaaatctgcattcacctgagctctggacctaagagaggacaaggccttgaccatttctacagactcacaagatgcaatctctgtggtccatgcccgtggtgtgatctgggaagcagggggccttctaaatgccaacaacaaggaaatcaaatgtgcaacaaacagaaataacggcattgacgtgggccatggaaaggcctaaacagatgactgcagttcactgccaaggtcatcaaaggggtgactctgaaataataaatttcagacgccatggcccaaatagctgcatgaggtggggaagtcctccacatgcctctgcttccttcggtacctgtttatgaaatcagccgaggtacttccctggggaatttcctttctttctttctttcttacgagacggagtcttgctctgtcgcccaggctagagtgcagtggtgcaatctcggctcactgcaacctctccctcctgggttttagcaattctcctgcatcagacttctgagtagctgagattacaggtgcatgccaccatgcccagctaatatttgtagttttagtagagacagggtttcaccatctaggccaggctggtcttgaactcctgacctcgtgatccacccgtcttggcctcccaaagtgctgggattacaggtgtgagccatcaagcccggactttttttttattttttgagacgacgtttcactcttgttgcccacgctggagtgcaatggcacgatctcagctcactgccacctcctcctcccaggttcaagcgattatcctgcctcagcctctcgagtagctgggattacaggcacccaacaccaaacccagctaacttattgtatttttagtagagatgggatgtcaccatgttggccaggatggtcttgaacccctgacctctaacgatccacctgaattggtttcccaaaatgttgggattacaggcacaagccactgcgcccagcccctcccatacctcttttggccaaggcagcacaattcagaagaatcttgccagggaagactggtaaatggatgtcaacgtgatgcctatggctcctggtggatttagatacctcctggtgcttattgatatctttaccagttgcacaggggcttttccatgccagactgaaaacgcagaagatcactgatcaaccttcaactatttactagcagaacactgaggggactgtgcggtcaccaatacctcctattgcacttggataaacacctcccaggaaatagagatgaatagaaaggacatagtcaaacaagcagaatggctgcattccttcaaccagaagggtccattagtctgttttcacactgctataaagaactatgagaaactgggtaatttatgaagaaaagaggtttaattgactcacagttctgcaggctgtacaggaagcgtggctggggaggcctcaggaaactgacaatcacggcagaaggcgaaggggaagcaggcacgtctggccatgttggagcaggagagacagagagagtgaagtgggagggctgcacgcttttaaacaaccagatcccacaagcgctcactcaatatcacgagaacagcaagggggaagtcggcccccatgagccaatcacctcccaccaggtccctcccacaacactgggaattacaatttgacatgacatttgggtgtggatacagagctgaaccatgtcaagggtagttcaaccgctgagattgattgattgattgattgactgagatggagtcctgctctgttacctaggctggagtgcagtggcacaatctcggctcactgcaacctccgcctcccgggttcaagcgattctcctgcctcagcctcccgagtagctgggactacagcacatgccaccatgcctagctaatttttgtatttttagtagaaacagggcttcaccatgtttgccaggctggtcttgaactcctgacctcgtgatcaccctgcctcggcttttctttgctgtggctctttcccctctaaactgttctagattcccaggcgccctgctaggaacaggtgtgggccaccctggggtgagctgcctcccagaggcctggaaggaccaggccttgccaatcaccgacaagggacgtagaagagcacccccaaaggacagtaggtccccgcccggatctggcccacagcacccgagggaccctgcagcactacagaagtcccatggggcagacgggagccacaggcccagactccacagcccctcagtccacatgtcctggagcctgtggtggaagtccctgttcttccatcaccgccgcctctccctgaggacctccgaagaaacaggccagggctgtcccaggcctgggcacacgggccagtgtccagcccaccccgtctgcccctccaggccccgccctcacccggaagcgctcctccagcagggacagctccctgatgaggtcggtgatggcgttggtaaaggcttcctgggggctgtagtccggcgtggtctgcactcggatgatgatcttgtgctccaaggggtgggggactttgtagccagcaaatagcacttgcgggtcttttaggagttgtctgaggtccagggacagacagtgtgagggtctagcctcatgcccaagctgggtagcagccagctcagagcagaagaacagactttctagccaaaaatcccccccaacttttttcccaaaaagtcttcaaggaaagtaacacttttaggaagatacctcatgtggggacaccctatccccgccacacacacacactctgcatccatgaggttgaaggacccgagctggaaagagattccagcaacctcttcccaccgggcaccgcagtgctggcaaagagatctcccaggcagtgaatgtccagccagtgttcagtgactcagacccaaaaagcccacaaagagcctccacgcagcaaataaaggcagcaggagaggagggccagctcccggcagtgagtggaatgcaaatggaactctgccctccgagcagcacagccgccagcggctggccacgcacactgggccttgtgccatggggctgcgtcgcgtactgtgccctgggcatgcaggggtctcctctagagcggctcagagtggcgtgagcaccacaagggggacccgtgcataggtggcaacactgagctcaagagcaggggagcagcagggccccaggagagcttgggtgccccactggctgggctccgggcaggattcctccatccccgtgcctgaccacaccaggagactgggcagaccccactcacagacggggaaaagcctggcttcgctggtggcaccagagggaagagccaagtctacagtaaaatggcaagtccctgggccagaatggcagacacatccctgaccaaccacctggctaggacctcactggtataaacaaacacccaccaaccaatgcagggtgcccattaggggcactggatagccacagaactcctacttctttctcttgttaaatagaagttctagtctctgccacatacatcttagaggcccaggtggcactgaggtcacaaacgggtggcatgaggggagctaatcttgactgcttttcaatgtccctcagcatgaataacaaacaggcctactgtgctggaatctgctgctcgttcatttacagaatgtgcacttaatggtgaatgtaaggccgggcgcagtagctcacgtctctaatcccagcactttgggaagccggcaggtggatcacctgaggtcaggagttcgagaccagcctggccaacacagtgaatccccgtctctactaaaaacacaaaaattagccgggcatcgtggcgtgggcctgtagtcccagctactaggaaggctgaagcaggagaatcacttgaacccgggaggcggaggttgcagtgagcaagatcgtgccattgcactccagcctgggcaacaaagagagaaaattccatctcaaaaacaaacaaacaaacaaacagtgaatgtaaatgcacgtgttcatctacagaataagccactacagaagtgtggcttatgtgaagacatggaggtcggtgtcattttgataaaaaggtaccaagattataaaatgcccagagcaagcccccagaaggacttcctgtagctcagagagactgaggaagacttggaacttgtgctttgcccagaggggcccattaaacatagcccctgagagcctgtgacgggaaacttacgatttaatgatgtttcccagtgtgtggtcttctttgttgatggtgaataaacaggcattgggtaccttggtgtccttgttaatggtgatcctaggaagacacagaggccacagatgaggagcaggggctcccctcctcccaccctgagtctaaaccctgtctcctcccggccaggtgtggtggctcgtgtctgtaatcccaacactttgggaggctgaggtggatggatgacctgaggtcagaagttcaagaccagcctgcccaacatggcaaaaccctgtctgtactaaaaatacaaagaaaaaaaaaaaattagctgagtgtggtgatccatgcctgtagtcctagctacttgggagactgaggcaggagaatcacctgaacctgggaggtggagttgcagtgagccgagatcatgccactgcactccagcctgggcaacagagtggaactctgtatcaaaaatataaaaataaaaaggaaaaataagctctgcctcttcctgaaggcctttctcaatctcttcatcccataaaggcctcgccaacccggtcccctacttcctgctaccccaggtctatggaaccttggccttttctgaattcctccttttttttttccggtagagatggggttttgccttgttgtcctcgctggtcttgaactcctcgcctcaaatgatctctcctgctgcccaggctggagtgcagtggtgtgatcatagctcactgcagcctccaactcctcggctaaagtgatcctcccgccttagcctcctgagtagctgggaccacaggcgcacgtcatcatgcctggcctgttccttttttcttacgccaacataatgaagcaaccaaaaggtgaagaagagaggccctgaagttacacggtgaggctggtcctgaccctgtgagttccgaaagcaaccatccccctggctggagtgtgcagtccttccatccattccccaaaacaagtcatgctctggcatttactatgattttagtgaacgcttagatggacaaagacaggaaacttccattggattttccaagacaaggggttttcagagtgcagttcccagataagcagcatcagaatcccctgggaacttgttaagagtctcccacctcccacttactggacccagaactctggaggtggggcgcagggatctatggtttaagaagcccttcaggtgattctaatgcacactcaatttgagggcaactatgctgacagtaaaatctcacacaggtgagaggtatcaagttgaatatccttttttctaaggtggtttctccaggctgacaccacacacattttagggtgcatcattctttcctgtggggtgctgtcttgtggacattgtaggacatcagcagcatccctgacctctacccagtagattccagtcataaccccctttgacaaccaataatgttctcagttattgccacatgtcccttgtggggccaaatggtccccagttgagagtctgctctaaaggaggccgaagtggctggcaagggccagaccaagacctctgcacgccaacctgggaacaataagagccaatggttatgaggttttccaggggctgagctttggaccaagagttttacacaaattacctcatccaattctttttattttgagacaggattgcgctcagtcgcccaggctggagtgcagtgatgcgatcaaagctcactgcagcctggaactcctgtgctcagctcaagcaatcctcccacctgagcctcccaaagtgccgggattaaaagcgtgaaccagcgcacctggccagatccctttttttgttttttgaaacggagtttcgctcttgttgctcaggctggagtgcaatggcgtgatctccgctcacctcaacctccacttcccaggttcaagtgattctcctgcctcagccttctgagtagctgggattacaggcatctgccaccacgcccggctaattttgtatttttagtagagacagggtttctccatgttggtcaggctggtcttgaactcccgacctcaggtgatccgcccgcctcgggctcccaaagtgctgggattacaggtgtcagccaccgcacccggcctgaatcccacgtttaagtacagtaataaactcattttccagatgaggaaacagggcctccgacagatcaagccactcgcccacagatacagagtgagcccaagctctctcccctggactccttcaacccgcaggcagcgaggagccactgcggcttttacgcaggccgctgacagatcggaggggatgaaggatggaggtggcgggcgagagacaaaaagaggaagctgccagatcccagaggaaaagggctatggagaaccagacactctgggttcgaatacaagcgccgccacttcctgtgtccggggcaacttgctcgcctccaagcctcagtgtcctcatctgcaaaatgaacacactcgcgactgcctcgcggaacggccttaaatttggctgacacaggccgagcagacgatcaagcaaaagctgtttccctcccggggcaagagatgggcaggagacaccccagaatgcgacagccgcaggcccgcgcacctcggccctccgcagccggcgtcacttacttctcgccctcgaagagcaagaacgactcgaaggctggaggggcgttcatgctcccgccgccgttgcgtccagaccccaagtgtccgccaccgccgccaccagagccctaataagaggcctcttccggattactccggcggggcaaacccgcgcaaggatcggctcatcgccccctgttgggctggaggatcttgcgcaggcgcgagaaaaccccgagagagaccagtgtctctgcgcatgcgtcagtggcgagcgcaccgcccccccccacccccccacccccccaccccgcaccccggcatggctttccccgtgggcgcttttcggcgcatgctcagagcgccggcagggctgttctgcccctacagaggcctcctagtcctggctgagcgggaacctcaagctgtacctttctcctttccccatgtcccttgatctctctttggaaacgtgcacccccttggagtgcgcagcaggaggcccctgaatagagagaataaagctaaggggtagtggacagctgcggctagcagccgtagggggagcagaagatctcgtggccagaggcagatctatgacaagccccctgcccaggctgcctataccgactgctgcaggacctctgcctggggggtgcagctggcttgttagccgggagggacaattgggtgagggatgcagaaggaggcaggtgtatacagcagtgagaggggagcccgtagggttacgtatatctttttatatattattattattatttagagacagcgtctccctctgtcgcccaggctgaagtacagtggcgccatcatgcagcctccaactcctgggctccagagatcctcctgcctcagcctcccgatagttaggactgcaggcatgtgccatcacacttagctatttttttttttatttttggagatggggggggggtctccctatgttgcccaggctggtattgaactcctggcctccagcagtcctccagcctcagcctcccaaagtgcacttggtggatgtgggcagcaagccacccaggtgccgaggcaagagaccgagggcacgagctgttccagtataataaaatatataaaataagaatagttatactagatatagatctgagatatgattatatatgaatcattaatcattagtttgtagtaattattctttattccaatattataataatcctcgctctacaatcataacctaggaaaaaccaggccatacagagatgggagctgaggggacagtgaggagtgaccagaagacaagagtgcaagctttctgttatgcccggacagggccaccagagggctccttggtctagcggtaacgccagcatctgggaagacacctgttgccaagcccaccgtggtctagcggtagcgttagtgtcaaggaaaaacacccgctacttagcagaccgggaaagggagtctccctttccccgggggagtttagagaagactctactcctccacaggcccgcccacagttacccggaggcataaccgtctccctgtgatgctgtgcttcagtggtcacgctcctagtccaccttcatgttccatcctgtacacctggctctgccttctagatagcagtagcaaattagtgaaagtactaaaagtctctgataagcagaaataatggtgtaagctgtctctctctctttctcctctctctctctgcctcggctgccaggcagggaagggcccctgtccagtggacacgtgacccatgtggccttacctatcattggagatggctcactctccttatcctgcccctttgtcttgtatccaataaatatcagcgcagcctggcattcagggccactactggtctctgcgtcttggtggtagtggtccccccagcccagctgtcttttatctctttgtcttgtgtctttatttctgcgctctctcgtctctgcacatggagagaaacccaccgaccctgtggggctggaccctacaggtggataagtgtatcttaccctttttggtttggttgctttgcagactacagtttagcataaaggccctccttaagctgtttgaagcaacagggactggggtctcagaggagctaccagagccctaacagtttggcagctgtttctccaaggctgggcagcagctacagtgctgaggaaatctggagcatctaccccttctgggaaggcccatttcctacttgagttcttgcaccctggcaggaggaaatctcattctgcaacagccccacacagaatctgactttccaggcgaagtgggtgggcacctctttaactgctgaggaacagaaagtgatatgggtaggctgggtgcggtgactcacgcctgtaatcctagcactttggcactttgagaggctgaggcaggcggatcacttgaggtcaggagttagagaccagcctggccaacatggtgaaacctcatctctactaaaaatacaaaaaattagtcgggcgtggtggtgggcacctgtaatcccagctacttgggaggcagacgcaggagaatcgcttgaacccgggaggcggaggttgcagtgagccgagattgcgccactgcactcagcctcccaaagtactgggattacaggcgtgagccactgttcctagccaagggtagcatccttgacccaagcttttccagggtgacccagaagtgtggaggttatatcctcagggaattattacccttatcactttttttctttttttctctttttttctttttttttttgagatagcatctcgctctgtcgcccaggctggagtgcagtggcatgatctcggctctgttgtctaggctggagtgcagtggtgagatcatagctcactgcagcttcaagctcctgggctcaagcagtcctcctgcctcagcctccccagtacctgggaccacaggcaggcaccacggcgccctgctagtttttttctttttactttttgtagcgatggggtccaactttattgcctaggctggtctcgaactcctgacctcaagcaatcttctcgccttggcctctcaaagtgctgggattataggcatgagccctgcccctggccacacataccatgctaatttgttacacattggctgtggttgctttcatgctacatggcatggtggttgtgactgagagctgcatgtctggtcctttacagaaaacgtttgctgatcctaatcttggggattgtgcctgtgttgactttgctatttattgtttggttacagcccagacactgaagttacttattagcttgtgggtgtctatcccgtagaaaagaaaacttcatggccgggcgcagtggctcacacctgtaatcccagcactttgggaggccgaggtgggcagatcacgaggtcaggagatggagacgatcctggccaacatggtgaaaccccatctctactaaaaatacaaaaattagctgggtgtggcggtgagcacctgtaatcccagctactcgggaggctgaggcaggagaattgcttgaacccgggaggcagaagttgcagtgagccaagatcgcaccactgtactccagcctggacgacagaatgagcctccgtctcaaaaaaaacaaaaaacaaaaaaaaaaaaaaaagaaaagaaaacttcattaattaaccactttcgtatgtaatatcacaatcttattctagcattcttctcttaaagtgtttacgggccaggcacagtggctcacatctgtagtcccagcacttagggaggctgagggaggattgcctgagcccaggagtttgaaactagcctgggcaatatagcaagatcttgtctctactaaaaatttaaaaaatcagcagggcatagtagtgtgtgcctgtagttgcatttacttgggaggctgaagcaataggattgcttgagcccaggaggaacaggctacaatgagctatgactgcaccactgcattccagcctgggtggcagagcgagaccctgtctcaaaaacaaaacaaaacaaaagaatgcttacaaatacatgaaatacatgtacccagcttctcagaatgatccatgaatcagagttcccactctttttctgaattgatgcgtagtagatctttgatatgtgttcatgatatatatgagtcatcttttttacatgtttgaaaattatactttgaaaaggccttgtccggaggtggttgctgcatacctgttcagatttcctaagaggttgagagaaacaggtactgggtgagctgggtccagtcaagccttcccagggtgcctgccctgccctgtggtgaacaccagccccctgggctgcagatatctgcctgggggtccaatcagatcctcaagacatctgggactgggcatggtggctcatgcctgtaatcctagcactttgtgaggatgaggtgggcggatcacttgagttcaggagttcaaaaccagcctggccaacatggtgaaaccccatctctactaaaaaatacaaaaattagtcaggcgtggtgatgggcacctgtaattccagctattcgggaggctgaggtgggataatcacttgaacttggaaggcagaggttgcagtgagccaagaatgttccactatcctccagcttgggtaacagagggagactctgtctcaaaaaaaaaaaaaaaaaaaataggccaggtgcggtggcttacacctgtaatctcagcactttgggaggctgaggcagaaggatcatcttaggtcaggagtttaagaccagcatggccaatatggtgaaactccatgaaaccccatctctgctaaaaaaaaaaaaaagacaaaatattagctgggagtggtggcatgtgcctgtaaatcccagctactcaggaggctgaggcaggagaatcgcctcaacctgggaggtggaggttgcagtgagttgagatcacaccactgccctccagcctgggcgacagaaccagattccatctcaaacaaaaacaaaaacaaaaacaaacaaacaaaacatctgggaacctgccccaggccccagttgaatgccagggcttgaagtctctgggagggggtggtatagacttgtgggacagatggaaggtataccctctcctgctcctctcgcttttccaggtggcctccagaaacaatgtggcatgatggactatgggcagctctgctcagggcctgagaggagaaccagggggcagtgccaggcatgcactgatgttaacttcccttccagctgcagtggtcaggatctggggaggggaggagaggcatggtggatgctgccagaagggtggctgtgtgtgtgcactcaagatccaggtttccacttgtagccctaataagtccacggctccttccctttcactgcctgcgtttaggctcaggagaccctggaggccatacttcctagagagaaggtccttgaaacccaaggagatccaacaggcatgaggatttttgtgtacccctaaggaagtagccagagaaccaggtgctggtgatttggggtggggtaggggctgcatcaggctcagctgtccctggacccagggccttgggccaggaagggaggggagggacccaatccagcaaaaaggcttagttgcccataggacggcagagcacagcaggctatgaagctctaaggggtcgggctggtgggctgcctatgggggaaatggtatccaccaaggccacagccaggagaaaaggttggtatggccccaaaagccatagggaagagggagagggcaggccccttgaatcttaatttccccttgacctttttattttttttttttgagacagcgtctctctgtcacccaggctggagtggagtggcccgatctcggctcactgcaacctccacctcctaaattcaagcaattctcctgcctcagcctctcaagtagtgattacaggcacctgccaccatgcccagctaatttttgtatttttagtagagacagggtttcaccatgttgaccaggctggtctctaactcctgacctcaggtgatccacccaccttggcctcccaaagtactgggattacaggcatgagccaccgtgcccagccctctttgcctttccctactattcctggaagagccaaggtatacaggatgccccactggccctgccccagaacctagctgggcagccaggtcaggggtcatgtctgagccctgggacactgggggctgtcctaggctaaggacaaaggggaggctcagagcttgcttggatgagcgttgagaatgtgttcgtggctgggtgcggtggtcctgtaatcccagcgctctgggaggctgaagtgggaggatggcttgagcccaggagttggagaccaacctggacaacatggtgagaccctgtctctaccaaaagtacaaaaaattagctgggcatgatggtgcacacctgtagtcccagctactcagaaggctgaggcaggaggatcacttgaactcaggagttggaagccgcagtgagttatgatcactccactccactccagcctgggcaacacagtaagactctgtctcaaaaaaaaaaaaaaaaaaaaaaaagatgttctggaagactctgcccctcctctcctctgtcttgttgtttttttttttttttttgagatggagaatcactctgtcacccaggctggagtgcagtggtgcgatctcagttcactgcaacctccgcctcccgggttcaatccaattctcctaagtagtaggggttacagatgcgcaccaccgcacctggctaatttctgtgtttttagtagagactgggctttgccatgttggccatggtttgccaggctggtctcgaactcctgaactcatgtgatctgccggcctcagcctcccaaagtgctgggattacaggtatcctcagtcttgttaattacactggggtttacattgctgtgtacagtgagatcaggatgagggtggtgaggtggtgatcagggggacccatgcttctgctcagggggttggcagaagccagcaaggcttggggtttccctgtttggagcgctccaagttgagagtgcagaggagtgtgagatgcgtgtgaaaatgcaaacttggctctccctggctggaggctggcattgggtgagtctctggtaggaccaggccatgtatactttttaagcttttttattcttgaaaagttcaaagatatacaaagatagactatgcaggataatgagcccccacatactccgcatctcttgtctgtaattatcagctcgtggctacctctacctctcccctctacctcttgtctcatctctacctctccccctgacccctgcctctgggtcattttgcagcaaatcccaaatgcctatatcatttatcctaaatattccataaacattccactatgtagctctgaaagataaggacgcttacaacacaactgcaatatcttttttgtttgtttgtttgtttttgtaaagacggggatttcgccacgttgcccaggctggtctcgaactcctgagctcaagcgattctcccacctcagcctgccaagtagctgggattacaggcatgtgccactgtgcccagccaagtgcagtatcttatcacacctttaaaaattaataattccaatcatcctatagttgatcagtgttcaaatttccaattgcctcataaaaagatcatttcttaacattttgttttgttgcaattggttgctgtaagtcacctaaatatcttctcttttttatactttttattgtagtaaaataggtataacatacaatttgccattttaaccattttaagtgtttaactcagtggtgttaattacattcacaatgtgtagccatcaccactatttagttcaaaaatttcaagtctcctttattttccttttttttttttttttttttttaattttagggactaggttttgctatgttgcccaggctggccttaaactcctggcctcaaggtgatccttctgtcttggcctcccgagtagctgggactagaggtgtgcaccgtcacacccagcttcaagtctcttattataaagttctggccacgcacagtggctcgcaactgtaatctcagcactttcggaggccaaggcggtcagatcacctgaggtcaggagttcgagaccagtctggccaacatggagaaactccgtctctactaaaaatacaagaattagctgggcatggtggcacacgcctttagtcccagctactcgggaggctgaggcaagagaattgcttgaacctgggaggcagaggttgcagtgaaccaagatcaagccatttgcactccagcctgggcaacacagtgagactctgtctcaaaaaaaaaaaaaaaaaaaaaactataaagttccccttcatctgaaaattgaatgtgattttaaacaacctatttgagctctgaggtagatgtctaagttcaaagcccactcctcctttctgggggtcccagtttcgtgatctcttcttccctttccttcctggtagcttaaaaaaatagagataacaggataaaggtgaggaatgaaggaatgaatggatgcaggcagacgtgaaaacagcgcccacctggagagctagaaacatctggagggctgggaccacctggagacgccccgtgtctatgagctgctgttgtgaggagcctggagccagtggacgctgggagggaggaggctttagagtggggggcaaccgggggaggaaggaggttggctgagccaggtctgggggcctcagggacttctgtgtcctcataacccacaaaagccctgcccaccctgccccggggcggcccacagtagcagcggctggtggtccctacagccggtcagccccaagagcaggcacaacgtgtggcctgggtaccacagggccagaagagagggacaggggccctgctcctgtcacctgctgcttctgccaccccaggaccaagtcattggtgtgagccggtggccagacatcactgccccgcaggcagtgggggctcctcttgggctgggggcagggcttggtgggcagccctatgggagggggagctggtgggggaccacagggactgaccaaagaaaggcaggccagatcccaggacagcaggggttctaagtccccaagagtggggactgggccggagtcaagttttgccaaccatcggaccagccccgggcctctatgatgaaggcatcagagaaaccccatggggccagaaaggggctggggcaacggtgcacctttgggatctggggtcagagggggaaggaggtgactgcatggcaaggcaagagctgaaggccttctggagaaggagggtccagtccttgtccccaccctgatccaggtcactgtggacgcagctgggagctgagcctggcagcccatgtgacacaatggtggggggatgggagcccctacgtggccaacactgccagccacacagctagagggcttggggtaagggctgcgtgaagaggaatggggtctctgagtcccgcctctgtgctgtcctcagggacaccctagagaagggacttgcttgggggctgctttgaggagagaacagctggttggacacactgggctctgtggcctgtgggacatgaaagaggggacccagggacagcaactgggaagggaaaggaacccccgaccccagaagagtggggggaagaaagaggggggaacagggatgcccagagcccatactgtcagccccatcatcggcacatccaccgacagcctccggggtccccccgggcccactttctccccagaccctcatcacaagaccccagagcctggacagtaagagcaggtttactgttggcaacagcacagccctgtggcacccaagggtagcgggtggggtggcggccgggtctcctggggccccgttctccctcccattctctaggtccctggaggccagacccctgggtgcggcccatcctagcagtggttctggctgggtctgtcctgggcaggagaggagggtccctggagaggcagtgatggctacagcgtctgtagggagctggggacacttccggccagccatgacaggcccaagcctgctcagctctgcacttctggggatccccttattcctgactctcccccctcccccacctggaagagacctaggccctgcaccctaatgaggaggaccggggtgagggggtgcagagtgtcctgggggggctccgagcgcttggcaggggactcagcaaggggagcgtagggcgggcctcacgtctgcagctccaggaggcagttgggctctgagggtggggagccggccgggctggagctatgggcctcgcggaggtcctgcagcacccggagcagccgggccaatgagtcctcggggactgtgggcagaggcagccgtgagggcccctgggagtgagcccgaggaccccacccgtgcatctctggagggggctcgggccacgagcaagtcccaggtgggcaagacctacctttgccagggctcgtgggcaccgtgcctgcctctgcgcccccgctcagctcccggtgcctctccctgtgggggaggtcagagtgagggccagcagcctccactctccctgccagaccttctggtgtccttgtgggaaggctgggggtggcccagcatgggcctcctgggctagaggtggctctgggggtgatggcagggctgactctttcagtctgtgaagaggctgggccaaggcccaccagggcaccttccaccttctccctccccgtgtctcctcctcctccccatcccactgtgggttgaccagaaggccctttgcatttgttttgttttgtttttgagacagagtcttgttctgcggtccaggctggagtgcagtggcgcaatctaagctcactgcaacttccacctcctgggttcaagcaattctcctgcctcagcctcctgagtagctgggattacaggcaccctccaccacatcagttaatttttgtatttttagtagagaagaggtttcgccatgttggccaggctggtttcaaactcctgatctccaacaatctgcctgcctccacctcccaaagagctgggataacaggcatgagtcaccgcaccccacctccgtgggttttgagggcagagataaaccctggaagagtcgatgaggaatggggaggaccacacccttcctccttgcagagtgtaggggtgtgacagatgaatgagctccagctccagttggctcaggggaagctgagcgcatgggaagcactggatcaccttgaagtatcctggcaccagccacatctccagagaccctgagtgatggggccttggcatcctgttttttaaagctgatctttaaaagcatcctgttttttctaagcttctgccaaggctgagaaccactggacgaagcaagatggccagggaactcagggaactggctgaggctgtgcctgtactccaagggcccaggagaacagctgggcaggttgcaaggtgggctcagtcagcacatggcatgaagcaggcatggccccgacccttggggcctctgtcctaacctgagctggcctcgtgctgcagagaggtactcctggtgccctccccagatgtggccaattacaagagaggtgaccagccaccatggagcagccccaagcctggcacgttccccaggctgcacaggctctcctgggtgggactcaccacagcatggcctccacgcccagcaggtgccggtagatgagctgggcctcaaggtcatggtcaagagggtcattccactcctgcagggtcacccgtgaccgggtcttatcgcagccctgacctgggggcacagagagggcaaagttacgagcagacacttgggactaccatgtccaacactgtggttgcacagatggagaaacagaggcctggagaggagagagatgcactcgggggtccctagtgagggctgggctgggagcatagcctggtaagtctgacccaggccctgcctcggctccccaccctctgggggcagcagctcctcttggggtcagcccctgcaccacgggatgcgtgactgaggagcatggatatcatcaggatatgactcgggttgctgggtaacttttggttttttttgagacggagtctcgctctgtcgtgcaggctgcagtgcagtggcgcgatcttggctcactgcgagctctgcctcccaggttcacgccattctcctgtttcagcctcctgagtagctgggactgcagatgcccgccaccacgcccagctaattttttatatttttagtagagacggggtttcattgtgttagccaggatggtctcgatctcctgacctcgtgatttgcccgtctcggcctcccaaagtgctgagattacaggcgtgagccaccgcgcccagccagggagccgggtaactttctggaagactgtctgcctggaagggagcaggctgaaatgttaacatcatggtgaggtgggccacagggggttcatgccttagaatgagctggtcctgcagcttgctgtctttatgaccttgccaagtcatctgccttccctaagcctcagcttctcctccatacagtggaataacaggccctgtctcttgggccagggtgggtcccaccttgccgataatgagagtatcgctctgatggttacaggcagaggctgcaggccatatcagccagccagcaatgcccttgcaaagagtcaccaagaggccaggcacagtggctcacacctgtaatcccagcactttttactttgggaggctgaggcaggaagatagcttgaggccaggagttcaagaccagtctgggcaacatagtgagaccctgactctacaaaaaaataaaataaaaaatagctgggtgtggtggcatgtgcctgtagtcccagttctgcaggaggctgaggcaggaggatggcttgagcccaggaggtcaaggctacagtgagctatgattatgccactgcactccagcctgggtgagagagtgagagacccaactcaaaacaaaaacaaaaacaaaagagtcacccatccctatacagtgcttggctgtaaatccagggctgggctagagtgcgtgggtcagttttcgatggcctctgccacactgggctctggggaccaagatttggcctggcctgaaggacaggggactcgaagtgctgagtctactctgtaaagtaagtgtggataacagggagaaggtctcgaaagttctagaactgtgctgttctacagggcggcagctagccacatgaagctatttgagttaattaaaattaaaacaacgttttttgtttcttttctgtttttttttttgtttttttgtttttttttttttgagatggagtctcgctctgtcgccaggctggagtgcagtggcaccatcttggcttactgcaacctctgcctcccaggttcaagcagttctcctgcctcagcctcctgagtagctgggactacaggcccacgccgccatgcctggctaattttttttttgtattttagcagagatggggtttcaccatgttgcctaggctcgtctctaactcctgagctcaggcaatccgcctaccttggcctcccaaagtgctaggattacaggcgtgagccaccacacccggccaaaacaacatttttaaaaatgtgaaactcaggccagatgtggtggctcactcctacaatctcagcactttgggaggccgaggcaggaggattgcttgagcctgggaattcaagaccagcctgaacaacatagcaagaccccacctctaaaacaattttttttaaatgagccaggtgtggtgatgcatgccggtagtgccagcctactcagaggctgaggcaggaggattgcttgagcccaggagttggaggctgcagtgagctatgatcgtgccactgcactccagcctgggcaacagagcaagaccctgttttaaaaaattaaacaaaaaaaacccctcagctcctcaagccacatttcaagtgctcaagaaccacaggtgctagaacctagagtactacacagtatggagtccttctagaagctcctctatgccatccctctagtgcccaaggctcagggtcccctcccacccacagctccggattcagatggccagcattggagtgtgcgaacccaggggctctctggctctcattagcagggggctcctcgaatgtgttcctgagaacacctgttctgtaagaagctccttggggaagagaagggttccctgtcaaaagagtttgggaagtgctgggttaaaccacgttagaaatggaattctaggccgggcgtggtggctcacacctgtaatcccagcactttgggaggccgaggagggcagatcacgaggtcgggagttcaagaccagcctggccaacatggtaaaaccccgtctttactgaaaatacaaaacttagctgggtgcagtggcttgcgcctgtagtacttgggaggctgaggcaggagaatcacttgagcctgggaaacggagattgcagtgagccgagattgcaccactgcactccagcctggatgatagagcgagactcagtatcaaacaacaacaacaacaacaacaacaacaaaacaagagcagcttgactaacatggtgaaaccccatctctagtcaaaatacaaaaaaattagctaggcttggtggcgagtgccggtcatcccagctactggggaggttgaggcaggagaattgcttgaccctgggaggtggagattgcagcgagctgagatcgtgccattgcactccagtctgggggacagagtgaaagtctgtgtctgaaaaaaaaaaaaaaaagaagaagaagaaataaaaagaaatgggattctaacgtgttttcgggcctccttagagccttcagcgaattcactcatatgcatcacacacatcacgtggcatttcccaaaccacctggtccacgggaccctttctgcccagagctcctggaggggccagcattccttgggttaggtccctgcaggtgcacagcagggctcagggtcccatcgttcagccagaggcccgatctcgcagtggacggatgcagagcccgggacccaggcctcctctcccacctgtcttctctttttggtggcagcagctccacttgtccccacggaagacgccagggtggtaggagcccagcagtccggtgttgttgatgctcaccttccgcagcgcagacagccactggttaagctcattcacacactgcaggggacacggagggggaggcctgttcagacgtcacctcctccaggaagccctcctaacccggagctcctgtaccacgccagacgccatgttccccaccataccaacccagcagctttgagtgaattaggagaagctgcccttcctccagtggaacatgacccatgcccgggcgcatggcctggagagcaggtgcagtggctcactcctataatcccagtggctcactcctataatgccatcatggctggctaatttcttttttttagagatggggtcttgctacattggccaggctgttctcaaactcctggcctccagtgatcctcccacctcagcctcccaaagtgctgggactacagctgggattatagggggccgaggtgggaggatcgcttgagcccaggaattcaagaccagcctgggcaacacagcaagacttcatcctctcctctcccacctgtctcgtctttttggtggcagcagctccacttgtccccacggaaggcaccgggatggtaggagcccaggaggctggtgtgggctggatttcagccgccgctggccccttggccacgctcgtaggtattccagaacccgccaaatatatttggtggccctgatatcactacttttcccagtggctctggaccctgacacaaaagggaactcctagagggaagggcacagagggacaggtctgtgacttcctccccacaggccaggacggtcaagcccggaagaaaccaacccccctccagctgcaggcttcttacttgtcccacatgtccctgccctagatacacatctgggtcaccctcctacaaggtccctgctcgaatgccacccatcagaggtcctccctgaccactctttaattaatttactaattaatttatttatttattttgagatggagtcttgctctgtcaccaggctggagtgcagtggctcgatctcagctcactgcaacctccacctcccaggttcaagcgattctcctgcctcagccccccaagtagctgggactacaggcacgcgccaccacgcccggctactttttgtactctccctgaccactcttaataggacagaccgctccctgctataccccactctcttccctcccttgctcccttagtcccttctggttcccttcaagtcactatcacaatttgcttttttttttgcttttttttttaagagacagggtctcactctgtagcccaggctggagtgcagtggtgtgatcatagttcactgcagcctccaactcctgggttcaggctatcttcctgcctcagcctcccaagtagctggaatcacaggtgcatgccatcatggctggctaattttctttttgtagagatggggtcttgctacattggccaggctgttctcaaactcctggcctccagtgatcctcccacctcagcctcccaaagtactgggactacaggcatgagccgacatttgaaacatgtatttattggcccatcttctcccagggatatcagctccatgagggcaggactctgcctcatctgccactgtatcccctcacctagaatcatgcctggaacctaggaggtgctcagtaagtattttttaaataaatgaatgaatgagttaatgaaggaacagatgagaaggttacttgagaacatgcacccagagccacacacagcataatgtttgattattaggcattgatacagacacagaacca

SEQ ID NO: 336 - DNA, 3169 bp, Homo sapiens
cccgcccgcgtggtcgtcgccaccgcagccgcccgagaggagctgggggaggacggtggcccgcgaggctcgtcgcagacaacgcggcggcgatgtccgcgagccaggcgagtgccgcggcggcagcggcggggccttgcgcgcggcagggcggcctgggcttcggcctccctccggttccctggaagcgggcccgcgaccagcgcgggagcagcagcagaggcggaggctccagcgcgtctctctcctccccctcagcctgagccgggggaagccaggcggcccgggtgtctggagggggggggtccgctgcccgagaatgggaattctcttcactagaatatggagactgttcaatcaccaggagcacaaagttatcattgttgggctggataatgcagggaaaactaccattctttaccaattttctatgaatgaagttgtacatacatctcctacaataggaagtaatgtagaagagatagtgattaataatacacgtttcctaatgtgggatattggtggccaagaatctcttcgttcttcctggaacacttactatactaacacagagtttgtaatagttgttgtggacagtacagacagagagaggatttctgtaactagagaagaactctataaaatgttagcgcatgaggacctaagaaaagctggattgctgatttttgctaataaacaagatgttaaagaatgcatgactgtagcagaaatctcccagtttttgaagctaacttctattaaagatcaccagtggcatatccaggcatgctgtgctctaactggcgagggattgtgccaaggacttgaatggatgatgtcacgacttaagattagatgatctctactgacctcttctcatagattttgtataaatgaagtgctggactttacctgaaagctgcaaaaattaatggtttagatatatttataataaactgatttaaactttttctataagaagaaaaattaagaccacttatttgaaaacaaagatgaagtctcaccttccagtttgctttctcattagttttttccaaagtaagttattgaagctgtgattgacatttttctcataatgaatcctctcaggacattgtgtagcctatggtaagtacaaagggagaggaagacattttgaattttaagagctttattatcagtttaaccctccctagttgaatgttattttcttcttgttccattaagtcagaatacaaatcagcacagatattcgaatgtttccaatattttaaaatgtaatgttacttatgaaaagtattttgcttaaggttgtgtgtgtattgtgtatatacctcaagttcaagttaatggcattgatttatgttccagacaaaaataacacaaataataatatccttcgttataaccacaatgagataagtattggcattagtgttcagtgccattttatactttctctctgtgttctctgtattgtactaaccaacctcccaaatcgctgagctgcttgtttaaaaaaaaaaaaaaggaaaaggaaaaagcatgacattgtgtatcgattttttgttgttgaccaaaatcacacacatggaaacatgtaattcaacagagtgggaaagctagcagattcttggcttagtattactaataggcaggattgtacaatgagcaactatcagattattcctttcagtggttcttatggcatctaaattactgaataaattattaatccattaatcagtgaatcaaattatgattacaattatcaaatgaatgctcagcattaattgaaaactgttttgtgaaacatgtctacccagaaaagtagcattctataaatactattaaacaacttagctatattatttttaagtattaaattatatgtcaagcagttaaagtgaatttcagagtaaaagtaaggcatgtttctgagcaacattgataatttcttaatttgcaaatttcttcttattttggtacttggaatatagtgtgagattttttatttctaaattttgttgtatcttctattacataaatgcattgacaattataaaatgcaagtgttttttgaatgattttaagaatttggcttaaaaattgattgatacaacgtattatttgtactaagaagtaacttgacccaaaacaccttttatgtttgcttagggtatattttttcagtgtctgaaagtcaaaggtattcctgtcacaactgtaaacaaacttatcctaaatgtgttaaaacatattcttgggtactctatttatgtatctttcatgccttgaaaatctgaaggttaatccaaactcacatgttttagcatatttgagaaaaaaaaactaccttcaatatcagccttttaaatttcatgaagattttggtgaggaataatagtatatagtttaagtattgacaaaactttgaaagtttctttctttaaaatgggaaatactcaatatctaaatccaggtcaggcatgggatatcagtatttaacattggatgttttatgttttatatttataatgttcaaaatgcaagcataacatttaatatttgtccacatggttttacaaaagtaaatcttaaattactaagcttttcccatatgttctcgtactttctcaaatccctataaagaattacttgttatctattaaaaatctcctttacccaaatctgtattatggtttcgccagacaaatattatgtgatgtagcccagaaaatccacaccttttgtcctttttatgttttaatttgaataatcatgtgcttagtcccttggattactgccacatcagtttaacacgatatcagcacattcccttgtcatcatcaaggtgttggctcagatttattcttaattggatgtttaaagcatgtactaccttgttacagttggtttagtgtagtggattattgacatgacatcatgagaagatgtgtaattttataccacatttataaaacatgattttgttttctacccttcaaggtaaacattaaaaataaggtggtacttgtgtacttgtacataaaaccaaaattatagttgggaaaaaaataaatttatatatgaaaatgtcaaaatcattttaaaagtattattttcaaataaaatggagaagctggtgaaaagtcatattggcaatttt

SEQ ID NO: 337 - DNA, 1844 bp, Homo sapiens
tcctcttcttaccctgcacccagagcctcgccagagaagacaagggcagaaagcaccatgagtgggggcccaatgggaggaaggcccgggggccgaggagcaccagcggttcagcagaacataccctccaccctcctccaggaccacgagaaccagcgactctttgagatgcttggacgaaaatgcttgacgctggccactgcagttgttcagctgtacctggcgctgccccctggagctgagcactggaccaaggagcattgtggggctgtgtgcttcgtgaaggataacccccagaagtcctacttcatccgcctttacggccttcaggctggtcggctgctctgggaacaggagctgtactcacagcttgtctactccacccccacccccttcttccacaccttcgctggagatgactgccaagcggggctgaactttgcagacgaggacgaggcccaggccttccgggccctcgtgcaggagaagatacaaaaaaggaatcagaggcaaagtggagacagacgccagctacccccaccaccaacaccagccaatgaagagagaagaggagggctcccacccctgcccctgcatccaggtggagaccaaggaggccctccagtgggtccgctctccctggggctggcgacagtggacatccagaaccctgacatcacgagttcacgataccgtgggctcccagcacctggacctagcccagctgataagaaacgctcagggaagaagaagatcagcaaagctgatattggtgcacccagtggattcaagcatgtcagccacgtggggtgggacccccagaatggatttgacgtgaacaacctcgacccagatctgcggagtctgttctccagggcaggaatcagcgaggcccagctcaccgacgccgagacctctaaacttatctacgacttcattgaggaccagggtgggctggaggctgtgcggcaggagatgaggcgccaggagccacttccgccgcccccaccgccatctcgaggagggaaccagctcccccggccccctattgtggggggtaacaagggtcgttctggtccactgccccctgtacctttggggattgccccacccccaccaacaccccggggacccccacccccaggccgagggggccctccaccaccaccccctccagctactggacgttctggaccactgccccctccaccccctggagctggtgggccacccatgccaccaccaccgccaccaccgccaccgccgcccagctccgggaatggaccagcccctcccccactccctcctgctctggtgcctgccgggggcctggcccctggtgggggtcggggagcgcttttggatcaaatccggcagggaattcagctgaacaagacccctggggccccagagagctcagcgctgcagccaccacctcagagctcagagggactggtgggggccctgatgcacgtgatgcagaagagaagcagagccatccactcctccgacgaaggggaggaccaggctggcgatgaagatgaagatgatgaatgggatgactgagtggctgagttacttgctgccctgtgctcctccccgcaggacatggctccccctccacctgctctgtgcccaccctccactctcctcttccaggcccccaaccccccatttcttccccaccaacccctccaatgctgttatccctgcctggtcctcacactcacccaacaatcccaaggccctttttatacaaaaattctcagttctcttcactcaaggatttttaaagaaaaataaaagaattgtctttctgtctctctataaaaaaaaaaaaaaaa

SEQ ID NO: 338 - DNA, 3602 bp, Homo sapiens
aaatcttgggactttttggacacccagagaacaggtcccagataccgagtccgcaactccaaacatcgcgattaataggaggcctctggtctctgcctgccctgggtgctcatggaaccagctgctgctctgcacttctccctgccagcctccctcctcctcctcctgctcctcctccttctcagcctgtgtgcactggtctcagcccagtttactgtcgtggggccagctaatcccatcctggccatggtgggagaaaacactacattacgctgccatctgtcacccgagaaaaatgctgaggacatggaggtgcggtggttccggtctcagttctcccccgcagtgtttgtgtataagggtgggagagagagaacagaggagcagatggaggagtaccggggaagaatcacctttgtgagcaaagacatcaacaggggcagcgtggccctggtcatacataacgtcacagcccaggagaatgggatctaccgctgttacttccaagaaggcaggtcctacgatgaggccatcctacgcctcgtggtggcaggccttgggtctaagcccctcattgaaatcaaggcccaagaggatgggagcatctggctggagtgcatatctggagggtggtacccagagcccctcacagtgtggagggacccctacggtgaggttgtgcccgccctgaaggaggtttccatcgctgatgctgacggcctcttcatggtcaccacagctgtgatcatcagagacaagtatgtgaggaatgtgtcctgctctgtcaacaacaccctgctcggccaggagaaggaaactgtcatttttattccagaatcctttatgcccagcgcatctccctggatggtggccctagctgtcatcctgaccgcatctccctggatggtgtccatgactgtcatcctggctgttttcatcatcttcatggctgtcagcatctgttgcatcaagaaacttcaaagggaaaaaaagattctgtcaggggaaaagaaagttgaacaagaggaaaaagaaattgcacagcaacttcaagaagaattgcgatggagaagaacattcttacatgctgctgatgtggtcctggatccagacaccgctcatcccgagctcttcctgtcagaggaccggagaagtgtgaggcggggcccctacaggcagagagtgcctgacaacccagagagattcgacagtcagccttgtgtcctgggatgggagagcttcgcctcagggaaacattactgggaggtggaggtggaaaacgtgatggtgtggactgtgggggtctgcagacacagtgttgagaggaaaggggaggtcctgctgattcctcagaatggcttctggaccctggagatgtttggaaaccaataccgggccctgtcctcccctgagaggattctccctttgaaggagtccctttgccgggtgggcgtcttcctggactatgaagctggagatgtctccttctacaacatgagggacagatcgcacatctacacatgtccccgttcagcctttactgtgcctgtgaggcccttcttcaggttagggtctgatgacagccccatcttcatctgccctgcactcacaggagccagtggggtcatggtgcctgaagagggcctgaaacttcacagagtggggacccaccagagcctatagaatcaattccttggactcacagccatgcagataagccctggccatctcagcagccaccgcacaacccccctaatgaaagacacgccctcctcccctctggtcacgtaagagaacatcttccagctgcctttttcacacccactccagccctctgccccagttttctcctcctcactagtctgtggctttagtagttcctttgcttgtaattatgggatgggatccaggcatagggaactagttgtttcatagctcccagtcaaaaagaaagtgagagaagctgttgggcagcgaacctactgtttaaaatcaggataaccacattaagcccaatatgccagttggcaccagatgctgtggacttggaatgaggccaacagggttcaccaggatgagagaggagagaggaatccacaggaccaccagaagggagagggaaccagatatgcagatcagagatagaggaagtggaaccagagagctgggagggaccaaggttgtaaggatggctaagtcccaccataagagctaaagggtcctgggagatgatggctcatttccacccaaccccaggatttccacagcacacacccacaggcctggacctgggatgaagatgaatgaagaacatggactcatgtggatgtggtttggctcagatgtccctgcaataaacaaggggtcagtacttagtccctgagtgtggttgaggtttgaggtcctggtcgagcagggcagtactggaccaggtctacgtcagcattcaggttcaatggggacaccagtggcttcaaacttcctgatctaattatgtttttagacacttagaagttattgaggactttaaagagcttttgtttatttgggttaatatttatgacatttgacattgaaacaaaaatttaaaatgttatcttttaatttatgttaaaatagcattaataaatcagttataggttaatgtagataggatgttttgtgaaaaagcaatctattgtgtccaaataaaaaaacaaaaagtgtgacactggttaactttttccagatctcatgtctggcttaataagagatatttgtattatcatatctgcctttgtattaaacctattggtatatcataggtcatgttagctcaaaaaaactttactgcacactactgagagaatgagatgaaaaacgattaatgtttcattattattattgtgaaaatattattaacactggggactccttaagagtacatcagagttctctctaggaatcccaaaaccacattttgaaactagaatagtggatcctggaagttaatccatgtgctggttaattttagatgtcaacctgactggattaaggaatacctagacagctggtacaacattatttctgggtgtgtctgtgagtgtgtttccagaagagattggcaagtgagtcagtgggaaattctctccttctgttggctgggtgcccaatacaacaaaaaggcagaggaaaggcaaattcttctctcctctggagctgagacactcttcttcttctgcccttggacatcagaactcctggctctccggcctttgaacttcaggacttgtaccaggaggccctgggttctcaggcctttggctttggactgagagttacacaatcagcttccctggttctgaggctttcagacttaaactgagccatgctaccagcatcccagggtctccagcctacagatgagctgttgtgcgatttcttagcctccataatcacatgagccaatctccttaataaatgcctgctcatagatctgtatctacatctatatctgtatgtgcatctatatctatgcctatatctatatctatatcatattgattttgtctctctggagaaccctgactaataaaatgaggcatctaaaaaaaaaaaaaaaa

SEQ ID NO: 339 - DNA, 2253 bp, Homo sapiens
atctaatgaggagcgaggtgcggtgccccgaagcgctcgcttcccgcggtgcgatctagtcctgcagtaggcggcccggggccacaccgcggccgcccaagccagtgcaaggcccaggggcctgacatcgctcccagcgctcgaggaccgaggcctgctgtggaggacaccgtgctccctcgggacctgctctggattccggcccggacgtccccttggagctctgcatctccaacctggaacccaacccagaagtctcaagtttgacgcatcacgtggcgtgcggatccactgagggtccacagagaggggcgcccatctcctgcgtctcagttatcctggtgttgggaattctgtgccctaaagaattccgactcagatccgaacggggatctggtggaatcgagggtgaaagaccagagggacaatgttctactatcccaacgtgcttcagcgccacaccggctgctttgccaccatctggctggcggcgactcgcggcagccggttggtgaagcgcgaatacctgagggtgaatgtggtgaaaacctgcgaggaaatcctcaattacgtgctggtacgagtgcaacccccgcagcccggcctgccgcggccccgcttctccctctatctctcagcccaacttcagatcggtgtgatccgcgtctattctcaacaatgccagtacctcgtggaggacatccagcacatcttggagcgcctccaccgtgcccagctgcagatccgaatagatatggagactgagctacccagcctgctgcttcctaaccacctggccatgatggagaccctagaagatgctccagatcccttttttgggatgatgtctgtggatcccagacttcctagtcctttcgatatccctcagattcgacacctcttagaggctgcaatcccagagagagttgaagagatccctcctgaagttcctacagagcccagggagccagagaggattccggtcactgtgctgccacctgaggccatcacgatcctggaggcagagcccatacggatgctggagattgagggtgaacgggagctcccagaggtcagccgccgagaactggacctgctgatcgcagaggaagaagaagctatcttgttagaaatcccgcggctcccacctccagctcctgcagaggtggaaggaataggagaggcactgggtcctgaggagctgaggctgacaggctgggaacctggggccctactcatggaggtgacccccccggaggagctgcgtctgccagccccacccagcccagagaggaggcccccagtccccccacctcctcgccgccgccgtcgtcgccggttactgttctgggacaaggagactcagatctccccggagaaattccaggaacaactgcaaaccagagcccactgctgggaatgtcctatggtgcagccgcccgagaggaccatcagaggccctgcggagttgttcagaaccccaactctctctggctggctaccccctgaactactgggtctctggacccattgtgcccagccacccccaaaagccctcaggcgagagctgcctgaggaggcagccgctgaggaggaaaggagaaagattgaagttccaagtgagattgaggtcccgagggaggccctggagcccagtgttccccttatggtgtctttagagatctccctagaggcagctgaagaggagaagtcccgcatcagcctcatcccaccagaagaacggtgggcctggcctgaggtggaggcgccagaagctcctgcattgcccgtggtgcctgaactccctgaggtgcccatggagatgcctttggtgctgcccccagagctcgagctgctctcactggaagcagtgcacagggcagtggcactggagctgcaggctaacagggagcccgacttcagcagcctggtgtcacctctcagcccccgcaggatggctgcccgggtcttctacctgctcctggtgctctcagcgcaacagattcttcacgtgaaacaagaaaagccatatggtcgcctcctgatccagccggggcccagattccactgaggttagagtccatttacaaagctgccaggaaaccggccacttctagtaaaccacgtcgtgcctcactgggtcctgcttacctcatttctgaatgtgcatttccagccttcttgctctcagagctattgttcaagcagaaaacaagctgcttttattacagtaaaaaaaaaaaaaaaaaaaaa

SEQ ID NO: 340 - DNA, 5036 bp, Homo sapiens
gagctgtgccccacgctcccgctgcaacagtcccgggcatcgcagctgccagtcaaggctaggaggcggtcggggactccgcctcctcccgacccgtaggtctgggagcgcaagtcctgttgcagtcttgcaaagtgtaaagctgtcagccgcagagcacggaggaaagacggagagaatggaagagctcctgtccggtgtgccagcagcccggactggcggtgagcgcgagggaggctactgagaagcccggcgacggaggaacgcaggtctgctgccagggattgaggagactgaagaatgctgaagacaggctgatgggctcagctggtaggctccactatctcgccatgactgctgaaaatcccactcctggagacctggctccggcccccctcatcacttgcaaactctgcctgtgtgagcagtctctggacaagatgaccacactccaggaatgccagtgcatcttttgcacagcttgcctgaaacagtacatgcagctggcaatccgagaaggatgtgggtctcccatcacttgccctgacatggtgtgcctaaaccacgggaccctgcaggaagctgagattgcctgtttggtacctgtggaccagtttcaactttatcagaggttaaaatttgaaagagaagttcatctggacccctaccgaacatggtgtcctgttgcagactgtcagacagtgtgccctgttgcctcgagtgacccaggacagcctgtgctggtggaatgcccttcttgccacctgaaattctgctcgtgttgcaaggatgcttggcatgcagaggtctcctgtagagacagtcagcctattgtcctgccaacagagcaccgagccctctttgggacagatgcagaagcccccattaagcagtgcccagtttgccgggtttatatcgaacgcaatgaaggctgcgctcagatgatgtgcaaaaactgcaagcatacattttgctggtactgcctccagaacttggataatgacattttcctcagacattatgacaaagggccatgcaggaataaacttggccactcaagagcatcagtgatgtggaaccgaacacaggtggtggggattctcgtaggcttgggcatcattgccttggttacttcacccttgttactcctggcctccccatgtataatctgttgtgtctgcaagtcctgtcggggcaagaagaaaaagcacgacccatccacaacctaaagatctctgtgttcatacgccccagatatgtgagttacatgagatggcacagtgataaagccccatttagtgaccttgcctccttctccttgccaactttgaaagtgcctccgtgtccagactttgaacttgcctgccagccttcagcatcaggaaaggccaagtcctgggtgtgagtgttcctgtgtaacaagaactgggctcaacggtccagctgtttctatggagctttggggttccttgagatgaatgaacatatcattttatcatccaaaggatctcactggactgttcaacttccagccaaattcaaggagcttgcgggaacatttgatataacaaatgtgttgtcattgttggcaacatacaagataaccaagaagctggagtctgttctgtgttgatttgactgccatgagaaacacaggggaaacctgatgaggagaaggataagactgcgtaaggagaaatcctcataggagctataaagcaggctgctgatctcagcagttgatatggtggttgtgcctctgctggctactgggtgtgctgtccccatgttcccgctgtgatttggcagaaacacaataggcttctccttgtgtgatctcagcttcaagcaggtgaaactgctgtgcagagggagttgccccttcccagtaaaagagttgcagcctgttaaacaatgtggtctaatttagtgtctctcccttggcaaatgtaagttttctaagttggccaacttgtctcttacagccagtggctgtggtctacagaattgtttcatataaaatacgggtagagtggtagagtttcaaaactttcgtcatagatatctgggacctttctcaggatctgtgttcacacagccaatagatttggaatcaggcctaagagtacacatggagggtaaatattaaagtgcgtattatgtacatctagaatccatgtgacttgcagcctacctgtaatttctatccattgagcatgcatggatatacccaatagtacacacaaaataaatgtttacttaagagccattctatccttttgtgactgaaatggtttattgtaaatctgcctaaagattttttgcatattatatatgtgaattttggttgtaagttcataacttacccaagggtatagactcataactcttttaaaacagtgcttagtacaatatcctgccatctctgtaaaaacgctaattgataaccgagtcatttacatgttttcgaacacagaatagctcttttctcagcatcattattgctctttcagcatctgttaggacagtctgaatactttctgtttcaaggcactgataaaaccgcaacaaaaacatgtaagaaataaaatagaaatgctttatataatttagtttaaatttatgtatcacctcattgtgacttattttttccattataccattagtcagatttgaataacgaggttttgaaaggataaaaccttttctccaatgacaggattatataattgctattggcaatgtagcctggtgcttcatgagacctatgctaaatgttactggagagttcttgaagccagggataccatatcaggaactattcaggatctatgatattttctgaggtaactgggtaatagaatatcaaattgctgctatctcggacctattgttaaaggatgatgctttgcctatgtaataggatatatcctaagtggggatgtgtatatttcaggaactttaattcacaagtatatattgatatctgatgtgtgtatagtacatctgttggttatgtacattttaatttacatgttgtgtagaacatagatgagaactctgggaaaacttgggaatggcaaccaaccaaaatcatttttaatcatttattagaaatttctcaatattgtgtctttttcttttgaaactctaaacacttcagaaaaaaacactatcagtgtagttcatgttagtataattatagatttacatatatttgaatagttaatttgctttgttttacacgtagcccactgcctcattataggtaaaaggcatttataactgctcaggggattacgagaactcaactgaaactgaatttttgtaacaagaatgttaatagtggcaaagtcctctgtcagtaaactctttaagcttggtgctgcaaagagtctttaaatgggggctgatttcaagtaacctaaaagactgtgttatcagaggaagaggtcccaaatttggagtaaagatgggagaaaataaatatgtgctatttccttggcgagttgagggaatttgccaccttacagagtttgtatcactgaattagctgcttttgtttttttttttttttttttgccagggctatggagtgggggttgtttgtcaaactgattttcaataattggatttaattttttttaacattgaaaagtgcctgaaaaatggtaaattcttaaatgtgtgtgagattgtcagaatcaacaaaactaggttggttaaacatatctctggtacatcaaggggcatgatacaaaccagtctaaagactgtttataaaggagagagctggcgacttatttttatttttattttttggacagagtctccctttgtcacccaggccggagtgcagtggcatgatcatggttcacttcaacccctacctcctgggctcaagtgttcctctcaccttatcctcctgagcagctgggactacaggcacacaccaccacacctggctaagttttgtattttttgtagagatggggtttctctgtgttgcccagtcttgtctcaaactcctgggctcaagcgatccacccaccttgggctcccaaagtgttgggattacaggtgtgtgtcactgtgcctgacagctgacagttttaactgacaactttgataacagaggctgctatttttgttttagataattggccagtgacagagtttacccttgcctcctttcttggtctgccagctttgtcctttctgagtgattctctttctgtattgagaggaagtgtgggtctacatagggatgtttggatgctatggcaagaatctttttgtgtttggagtgtagtccatttgcaatagaaataaaaaaatccgtcaccaaattgtaacctggatgttatagcccagcatctagaaatcctatgaaacgtattagcacaatatcttgccattgtcccatctaggaaattttttcttgttgtgaggtagggaagtgaggaggaaagccatgccgaagcaaatgttagaatcttaggcatcctatttgttcatgccatgggtatttgctttggacttggagtctgtactttgaaagaggcctttgaaaaacaaataattctgtgtgaattttcttgtagcgtgcttcatgaaaatatctacttatccaggtttgcaaatgtacatgttcatttgaatgtaaatcaccatttcttggaaccccacgttttttcttaaaaattattctgaattaaatgtatatttctttagccttccctacacagtactaataaaagacttttctttctgttcatgaatggatgcctttatgtgatatagagtcatgtgtgtatgtgtagctttaagggcaatttcagaaatgcattagatgaatgacattttataaagcgatcacaattgatatctacaggctattatgtctcatgttgattcatgatccaggaagttttatgtatttaaaaaattgctatcgtgttatatttttccaatttttggagaagaaaatagctgtttaggctctctagccacaataaatgtaagcaggaaatcaa

SEQ ID NO: 341 - DNA, 5565 bp, Homo sapiens
ggcgcggcgctcgcggctgctgcctgggagggaggccgggcaggcggctgagcggcgcggctctcaacgtgacggggaagtggttcgggcggccgcggcttactaccccagggcgaacggacggacgacggaggcgggagccggtagccgagccgggcgacctagagaacgagcgggtcaggctcagcgtcggccactctgtcggtccgctgaatgaagtgcccgcccctctaagcccggagcccggcgctttccccgcaagatggacggtttcgccggcagtctcgatgatagtatttctgctgcaagtacttctgatgttcaagatcgcctgtcagctcttgagtcacgagttcagcaacaagaagatgaaatcactgtgctaaaggcggctttggctgatgttttgaggcgtcttgcaatctctgaagatcatgtggcctcagtgaaaaaatcagtctcaagtaaaggccaaccaagccctcgagcagttattcccatgtcctgtataaccaatggaagtggtgcaaacagaaaaccaagtcataccagtgctgtctcaattgcaggaaaagaaactctttcatctgctgctaaaagtggtacagaaaaaaagaaagaaaaaccacaaggacagagagaaaaaaaagaggaatctcattctaatgatcaaagtccacaaattcgagcatcaccttctccccagccctcttcacaacctctccaaatacacagacaaactccagaaagcaagaatgctactcccaccaaaagcataaaacgaccatcaccagctgaaaagtcacataattcttgggaaaattcagatgatagccgtaataaattgtcgaaaataccttcaacacccaaattaataccaaaagttaccaaaactgcagacaagcataaagatgtcatcatcaaccaagaaggagaatatattaaaatgtttatgcgcggtcggccaattaccatgttcattccttccgatgttgacaactatgatgacatcagaacggaactgcctcctgagaagctcaaactggagtgggcatatggttatcgaggaaaggactgtagagctaatgtttaccttcttccgaccggggaaatagtttatttcattgcatcagtagtagtactatttaattatgaggagagaactcagcgacactacctgggccatacagactgtgtgaaatgccttgctatacatcctgacaaaattaggattgcaactggacagatagctggcgtggataaagatggaaggcctctacaaccccacgtcagagtgtgggattctgttactctatccacactgcagattattggacttggcacttttgagcgtggagtaggatgcctggatttttcaaaagcagattcaggtgttcatttatgtgttattgatgactccaatgagcatatgcttactgtatgggactggcagaagaaagcaaaaggagcagaaataaagacaacaaatgaagttgttttggctgtggagtttcacccaacagatgcaaataccataattacatgcggtaaatctcatattttcttctggacctggagcggcaattcactaacaagaaaacagggaatttttgggaaatatgaaaagccaaaatttgtgcagtgtttagcattcttggggaatggagatgttcttactggagactcaggtggagtcatgcttatatggagcaaaactactgtagagcccacacctgggaaaggacctaaaggtgtatatcaaatcagcaaacaaatcaaagctcatgatggcagtgtgttcacactttgtcagatgagaaatgggatgttattaactggaggagggaaagacagaaaaataattctgtgggatcatgatctgaatcctgaaagagaaatagaggttcctgatcagtatggcacaatcagagctgtagcagaaggaaaggcagatcaatttttagtaggcacatcacgaaactttattttacgaggaacatttaatgatggcttccaaatagaagtacagggtcatacagatgagctttggggtcttgccacacatcccttcaaagatttgctcttgacatgtgctcaggacaggcaggtgtgcctgtggaactcaatggaacacaggctggaatggaccaggctggtagatgaaccaggacactgtgcagattttcatccaagtggcacagtggtggccataggaacgcactcaggcaggtggtttgttctggatgcagaaaccagagatctagtttctatccacacagacgggaatgaacagctctctgtgatgcgctactcaatagatggtaccttcctggctgtaggatctcatgacaactttatttacctctatgtagtctctgaaaatggaagaaaatatagcagatatggaaggtgcactggacattccagctacatcacacaccttgactggtccccagacaacaagtatataatgtctaactcgggagactatgaaatattgtactgggacattccaaatggctgcaaactaatcaggaatcgatcggattgtaaggacattgattggacgacatatacctgtgtgctaggatttcaagtatttggtgtctggccagaaggatctgatgggacagatatcaatgcactggtgcgatcccacaatagaaaggtgatagctgttgccgatgacttttgtaaagtccatctgtttcagtatccctgctccaaagcaaaggctcccagtcacaagtacagtgcccacagcagccatgtcaccaatgtcagttttactcacaatgacagtcacctgatatcaactggtggaaaagacatgagcatcattcagtggaaacttgtggaaaagttatctttgcctcagaatgagactgtagcggatactactctaaccaaagcccccgtctcttccactgaaagtgtcatccaatctaatactcccacaccgcctccttctcagcccttaaatgagacagctgaagaggaaagtagaataagcagttctcccacacttctggagaacagcctggaacaaactgtggagccaagtgaagaccacagcgaggaggagagtgaagagggcagcggagaccttggtgagcctctttatgaagagccatgcaacgagataagcaaggagcaggccaaagccacccttctggaggaccagcaagacccttcgccctcgtcctaacaccctggcttcagtgcaactcttttccttcagctgcatgtgattttgtgataaagttcaggtaacaggatgggcagtgatggagaatcactgttgattgagattttggtttccatgtgatttgttttcttcaatagtcttattttcagtctctcaaatacagccaacttaaagttttagtttggtgtttattgaaaattaaccaaacttaatactaggagaagactgaatcattaatgatgtctcacaaattactgtgtacctaagtggtgtgatgtaaatactggaaacaaaaacagcagttgcattgattttgaaaacaaacccccttgttatctgaacatgttttcttcaggaacaaccagaggtatcacaaacactgttactcatctactggctcagactgtactacttttttttttttttttcctgaaaaagaaaccagaaaaaaatgtactcttactgagataccctctcaccccaaatgtgtaatggaaaatttttaattaagaaaaacttcagttttgccaagtgcaatggtgttgccttctttaaaaaatgccgttttcttacactaccagtggatgtccagacatgctcttagtctactagagaggtgctgccttttctaagtcataatgaggaacagtcccttaatttcttgtgtgcaactctgttttatcctagaactaagagagcattggtttgttaaagagctttcaatgtatattaaaaccttcaatactcagaaatgatggattcctccaaggagtcctttactagcctaaacattctcaaatgtttgagattcaagtgaatggaaggaaaaccacatgcctttaaaactaaactgtaataattacctggctaatttcagctaagccttcatcataatttgttccctcagtaataggagaaatataaatacagtaagtttagattattgaattggtgcttgaaatttattggttttgttgtaattttatacagattatatgagggataagatactcatcaaattgcaaattcttttttttacagaagtgtgggtaacagtcacagcagttttttttaccaacagcatacttaacagacttgctgtgtagcagtttttttctggtggagttgctgtaagtcttgtaagtctaatgtggctatcctactcttttgggcaatgcatgtattatgcattggaaaggtattttttttaagttctgttggctagctatggttttcagtacatttcctactttaagagtaattactgacaaatatgtatttcctatatgtttatactttgattataaaaaagtattttgttttgattttttaacttgctgcattgttttgatactttctatttttttggtcaaatcatgtttagaaactttggatgagttaagaagtcttaagtatgcaggcgtttacgtgattgtgccattccaaagtgcatcagaactgtcattcccttctaatatcttctcaggagtaatacaaatcaggtatttcatcatcatttggtaatatgaaaactccagtgaactcccaaggacatttacaacatttatattcacacgctgtatggaagggtgtgggtgtgtgtgaaggggcgagtggagacactgtgtgtatctctagataagaagatatgcaccacgttgaaaatactcagtgtagatctctatgtgtataggtatctgtatatctttccttttgtttacaactgttaaaaaacctcaaaatagttctcttcaaaagaagagagattccaagcaacccatctttcttcagtatgtatgttctgtacatacttatcggagcgcgccagtaagtatcaggcatatatatctgtctgttagcaatgattattacatcatcagatcagcatgtgctatactccctgcaagaaatatactgacatgaacaggcagttcttggagaagaaagagcatttctttaagtacctggggaatacagctctcagtgatcagcagggagtttatttgaggacatcagtcacctttggggttgccatgtacaatgagatttataatcatgatactcttcggtggtagtttcaaaagacactactaatacgcaggaagcgttccagctatttaatgctggcaactactgtttaatggtcagttaaatctgtgataatggttggaagtgggtggggttatgaaattgtagatgtttttagaaaaacttgtgaatgaaaatgaatccaagtgtttcatgtgaagatgttgagccattgctatcatgcattcctgtctcatggcagaaaattttgaagattaaaaaataaaataatcaaaatgtttcctctttctaaaaaaaaaaaaaaaaaa

SEQ ID NO: 342 - DNA, 2604 bp, Homo sapiens
atgttacttacatacttcctcaccagacaccaccaggagttctcagcccccaaaacctgtcaccgatcctcaccaggctgtttgctctaccctctcccccaactcaagggctcccgtcctcacctccctgcaacactgctcctagaaccatgtctgtctacctggagacagccaggcctattcccttctgggtctccagtgtccctttttctcacaggtgacagtgctggctacaatgctatccagccggtggtggccaagttcctgggggatcctagggctgggcccccgaagccctcctcggggatcccagctctgtgccctctatgcctttacttatactggggcagatggccagcaggtgtctctggctgaaggggataggttcctactgcttcgaaagaccaactccgactggtggttggcaagacgcctagaagctccctccacctctcgacccatcttcgtcccagcagcctatatgatagaggaatccatcccttcccagagtccaactaccgtcatccccggccaattgctctggactcctgggccgaagttgtttcatggttccctggaggagttgtctcaggccctcccaagcagggctcaggctagctcggagcagcctcctccacttccccgcaaaatgtgtaggagcgtcagcactgacaatctgagccccagccttctgaagcctttccaggaaggaccaagcggaagatccctctcccaggaagacttgccgtcagaagccagtgccagcacagcaggcccccagcccctcatgtcagagccccctgtgtactgtaacctggtggaccttcgccgctgtcctcggtccccacccccaggccctgcatgccccctgctgcagaggctggatgcctgggagcagcacctggaccccaactctggacgctgcttctacataaattcactgactggctgcaagtcctggaagcccccgcgccgcagtcgcagcgagacgaaccctggctccatggaggggacacagaccctgaagaggaacaatgatgtcctgcaacctcaggcaaagggcttcagatctgacacagggaccccagaaccgcttgacccacagggttcactcagcctcagccaacgcacctcgcagcttgaccctccagccttgcaggcccctcgacctctgccgcagctcctggacgacccccatgaggtggaaaagtcgggtctgctcaacatgaccaagattgcccaaggggggcgcaagctcaggaagaactggggcccgtcttgggtggtgttaacgggtaacagcctggtgttctaccgagagccaccgccgacagcgccctcctcaggctggggaccagcgggtagccggcccgaaagtagcgtggacctgcgcggggcggccctggcgcacggccgccacctgtccagccgccgcaacgtcctgcacatccgcacgatccctggccacgagttcctgctgcagtcggaccacgagacagagctgcgagcctggcaccgcgcgctgcggactgtcatcgagcggctggatcgggagaaccccctggagctgcgtctgtcgggctctggacccgcggagctgagcgccggggaggacgaagaagaggagtcggagctggtgtccaagccgctgctgcgcctcagcagccgccggagctccattcgggggcccgaaggcaccgagcagaaccgcgtgcgcaacaaactaaagcggctcatcgcgaagagaccgcccttacaaagcctgcaggagcggggtctgctccgagaccaggtgttcggctgccagttggaatcactctgccagcgggaaggagacacggtgcccagctttttgcggctctgcattgctgctgtggataaaagaggtctagatgtggatggcatttatcgggtgagcgggaacttggcagtggtccagaagcttcgctttctggtggacagagagcgtgcggtcacctccgatgggaggtatgtgttcccagaacagccaggacaagaaggtcggttagatttggacagtactgagtgggatgacattcatgtggtcaccggagccctgaagctttttctccgggagctgccccagcctctggtgccaccactgctgctgccccatttccgtgctgcccttgggtgatagcacactcagataagaatcgcatgacaccccacaacctgggaattgtgtttggaccaaccctgtttcggccagagcaggagacatctgacccagcagcccatgctctctacccagggcagctggtccagctgatgctcaccaacttcaccagcctcttcccctgatgcagggaaggaagaagagaaaacatatttccggtcatctctggtggtgagaggctggtgttctgttttgaggatatccctttaaatctcccaaatgactgtctctatcttcatgagtgtgacttgaggtgttgggatgggtgagggagcttctctaaagaggaaagtgagtggattaacccctgcttctcttcttgttccctgttatcattcctccccaacataataatacataaagtggcatggtattttttctgatgcaaaaaaaaaaaaaaaaaa

SEQ ID NO: 343 - DNA, 4435 bp, Homo sapiens
cattttggtcaacaccctgcttactgcgcacggccaatcctatgagaactcagcatcccagctcatctgagcagatcctggaagtgatttctgcagctcaggattttttttttaagctacattgaaaatataggtttattttttgttcaggtttttcttttatattttttttctgcacaaaggaggaggatttttcacttactcatatcgaggccagatttttaaagccagctaaggcagcatcagctgtgcgggatttaaagcctatagctcagctgaaaaaaaaggtggggggcagggaagggaagataaaaggagaggaagctgggagaagacaagcatcatcttattttgctatgtggtaggaactgtctataagatagtgtagaattgtttatcttgagcagtttgttcttaacctataaggtatttttccttttttttttttttaaacctcccccacccttttcctgaaagctttgtttcagagctttgtattgggtttttttggtgaggaggttgtatttatttttttggtgtgtgtgtgtgagtgtgtgtgtgtctgtgtgtgtgttgtggtcccagctgagtcatcatgtctgctctgacgcctccgaccgatatgccaacccccaccactgacaagatcacacaggctgccatggagaccatctacctttgcaaattccgagtgtccatggatggagaatggctctgcctgcgagagctggatgacatctcacttacacctgacccagagcctacccatgaagatcctaattatctcatggctaatgaacgcatgaacctcatgaacatggccaagctgagtatcaagggcttgattgaatcagctctgaacctggggaggactcttgactctgactatgcacctctccagcaattctttgtggtgatggagcactgtctgaaacatggcttgaaagctaaaaaaacttttctcggacaaaataaatccttctgggggcctctagaactggtagaaaagcttgttccagaagccgcagagataacagcaagtgttaaagatcttccaggacttaagacaccagtaggtagaggaagagcctggcttcgtttggcattaatgcaaaagaaactttcagaatatatgaaagctttgatcaataagaaagaacttctcagtgaattctacgaacccaatgccctcatgatggaagaagaaggagccataattgctggtctgttggtgggtctgaatgtcattgatgccaatttctgtatgaaaggagaagacttggactctcaggttggagttatagatttttcaatgtatctcaaggacgggaacagcagtaaaggtactgaaggagacggtcagattactgcaattctggaccagaagaactatgtagaagaactgaacagacatttgaatgctactgtaaacaaccttcaggcaaaagtagatgcattagaaaaatccaacactaaactgacagaggagcttgcagttgcaaacaacaggatcattaccttacaagaagaaatggaacgagttaaagaggaaagttcctacatactggaatccaatcggaagggtcccaagcaagacagaactgcagaagggcaagcactaagtgaagcaagaaagcatttaaaagaagagacacaattacgattggatgttgagaaagaactggagatgcagatcagcatgaggcaggagatggaattggctatgaagatgctggagaaggatgtctgtgagaagcaggatgccctggtatctcttcggcagcagctggatgacctcagagctctcaagcatgaacttgcctttaagctgcagagttcagacttaggagtaaaacagaaaagtgaactaaacagtcgcttggaagagaagactaatcagatggctgctaccattaaacaacttgaacaaagattgcgccaggctgagcgaagccgccaatctgctgagttggacaaccggctcttcaaacaggactttggagacaagatcaacagtctgcagctggaagtcgaggagctcaccaggcagcggaaccagcttgagttagaactaaaacaggaaaaagaaagaagattacaaaacgacaggagcatcccaggaaggggttcccagaagtcagaatccaagatggatgggaagcacaaaatgcaagaggaaaatgttaaactaaaaaagcccctggaagaaagccacaggctgcaaccccaccctatggatgaacaggatcagctgctgctctctgaaaagccacagttgtgtcagctatgccaggaagacggcagcctaacaaagaatgtgtgtaagaactgcagcggaaccttctgtgatgcctgttcaacaaatgaactgcctcttccttcaagtatcaagcttgagcgagtttgcaatccctgtcacaagcatctgatgaagcaatattctaccagcccatcataagactggaggccaagacctggaccaaaacgtttatgcaggctcctctgtacctgtgttttagctgtcaggatctcatagagcccagttcttagagtcaactaaagagttgataggaatttactaggtccagggagaaaaggcagtggttggggttactggaaattttgctcattttctctaatgactgtatgaataaaagtgaacttacttgagcctttctcttctaaatctaaacaacctgatattgaaggtttgctttatagcatatctttggaaaggcaactcatttttatgattagtgatactggggtggatttaataggagagagaatccaggcagataagaataaaaaggaaaatgatcatctccttctatagcatttgcagattcaagggggagaggtagatgctgagatcaaaatgacagttgttacttatttttccaggtgctgttagtataaacattgtttcctcttcacccctgctaactacctctttaaagtatttctaccaaactgtgaacccaatctcagggaaaagaaattaaaaagtaatataaattctgcatatattaaaaacaatattgtaatatgttataatttcaggaccagaattttctggtctttacctacaagggttttcattatcaaaaaaaagaacatttgtttttctactttatgacttcaaagtaaataactgcccttttcagaatctccttccacaaaacaagccaactcttccccattccctccatcttcctttccaagtcataatggaaattgtaaggagttttaaaaatagggtttggcttttgcaaatagaagatattgattaaagcaaagtcaaatatagagtaaaataagtttaatttgttttcttaagacagggtcttgctctgttgcacaagctggagggcagtagtgcaatcacagctcactgaatccctgttctcccgggcctcaagcaatcttcccaccttagcctcccaagtagctgggactggctttttttttttttttttggccggggagggggtctcattggttgctcagcctggtctcaaactcctgggcttaagcagtcctcccaccttgacttccacagtgccgagattacaggcatgagccaccacacctggccaagtttaatttgttcatggctgagaacagttagctcggaatacttacattgttttttgaataaggaattccttattctgagtgagtcacgaatgagagctgatagatgctttcttgaaaagggcaatacagtcatcccttggtatccatgggggattggttccaggaacccaacttgatatcagaatccatgggtgctcaagtcccattatagagaatgggttatatggtatttgcatataacctacatacatcctcctgtgtactttaaatcatctgaagatgattacttatacctaataaaatacctacacatcacttcatttgcatggattcaacatagtgcttggtgttcagtaaattcaagttttgcttttttggaactttgtggaatttttctttttctgaatatttttgattggcagttggttgaagccatggatgcagaacccatggatatggagggctgactgtacttacttacatatctatctatctttgagtaacaaactctttgggggaaaagagggaagtgtattgagcaagagaaggcaaaaaacattacataatattttgattctgttacgtgtgtctatagattgtttcattctaatcaagacctaagaaggtatgattctgtgactgatttagaattctggggtggaaatatcctggaaccatgttttttaataaattctgtctcttggaaagagttaacaacagcctgggaaagagttgttattccaaaagtcagcctgttacttggtgaagctgaagtttaagagttctggggaaaaataaaatctagtaattccagcctaaaaaaaaaaaaaaaaaa

SEQ ID NO: 344 - DNA, 4551 bp, Homo sapiens
gtaccctgcatgcatatagctgctgattctactcctgctattgctcacaaccctcagagtcaaactttgtgaccggcctaggagagatggagccatctcagtgtgtggaggagctggaggatgatgtgttccaaccagaggatggggagccggtgacccaacccgggagcttgctctctgctgacctgtttgcccagagcctactggactgccccctcagccgacttcagctcttccctctcacccactgctgtggccctggccttcgacccaccagccaggaagacaaagctacccagactctcagcccagcctcccccagccaaggtgtcatgctgccttgtggggtgactgaggaaccccagcgactcttttatggcaatgctggctatcggcttcctctccctgccagtttcccagcagtcttgcccattggggagcagccccccgaagggcagtggcaacatcaagcagaggtacagattgcccgaaagcttcagtgcattgcagaccagttccaccggcttcatgtgcagcaacaccagcagaaccaaaatcgtgtgtggtggcagatcctcctcttcctgcacaaccttgctttgaatggagaagagaacaggaacggggcaggccctaggtgagggtgggctgccctcttcacatggggcaccaggaacaccgtctggaacaggaaggacatcgggcaggactgacactgtgtcttgtgaaattgtttttttgttgttattttgtgttttaattttttttaatttctctctgagtgtacatacaacatactcaagcgggaccttctttctctgtcaggcccttgacctggaatgggggcctttgtcaaacactgttgaaggagaggctgatgtgtctgtgatggtgagaattcccaagggctctgacaagtagattcttcgactgaggaatctaccagttgtcgaagatgatccgttagtgatgttctctgggaagtggactgtggtttttccagaggaactcagttaagaaatcgagagtggattagactcccagttccaccaaacctatgagccttccactgtggatgggggccgtgatcctgatggtcacattgctttaacccagcagggcttcggccaggggctttccacttgaggatagcagcttcactaggctggccggccagctccacatctgactgggttcttacttctcagccagtacctgccccatgggctcaaggattcctggccagctcctgccacctccagcagacctcagggagggttgggtttctctaaggacccctcaaacatgtcgcaaaatgaaccaaacttctggctaggcctcaaaactgacttggtcccacttggaggccccaggattggtcctgaggtacagagccactgccaccactggcggcctgggaccagctgggtgtcagccacggatgagccgaatagccagtcagcatgttgctgctggcagcctgtgcctttgtcagctcttctttcaaaagaccccaccgacagaccgcattccacccccaacatcggcactgagggacatcgggggcaagtttgcagtggggccggaaaatatggtggccaccctaccatgagagtcagccgtaggggaccccagaccccttggtttccttggaaacaacatacctcttcccccttatccccagtcctttttcatacctagtgggatacagaagaagccaggacagtggctttgccagctaagtgacttttagagtaacagataacgattagagtggggaaccgtcaaagctgggtacacatttcctatcttcctccagcttccagctaggccagaagggcatgctctggaacccagcaggatcacagctgcctgtgcacgtcttcccttctctccctgctgcggcacttatggagaggatctaaagcagccggtgtggcagctccgatagcaggcacagggaatctgttaaccagacgctagaaactaaattataacttttgcatatgtgagaaaagacaacattggtgctaacagtgaagtaaggcccaaaggaaagacggcttccctggacaaagaagacctcagggctacccaaggaaataggaggagtctagagtagactcacaaatctgaacaagcccaagtcttccagttctgaggagaggaggtcttcagtactattgaaggagacattgatcttctggatgtacagttgtgcaggttgttcactgcacaagggcacctgcagctaatggaggctggaattcagcttgtgttctgctcactaagctgtgtgcgtgccctggtgtggggctacttctcccaagaagaaggggtgcctttcctaatttgcaaaggtgccatatgggctcacagcaccctggaggagaagggcctcaaactgtgcatgtaagcctttgttttgttctgctcagatattctggatattacctcttcttggtcagaattctattctcagggtgtgtaccatgatttgtctgctaagaagacgggttcctgctttgcagagaaggagccggggaccagcttgaagactggctctgggacacactgaccattgtgaaattcagccttccctgtgggtctccataccattttatgatgtgtatgggacatacgttgttctcccctctctggatcaaggtggtgacaggcagcctgctgccgtatgcttcagtggcacacaccaaaaaaccgggattatttacagcagccactattcaccccttttggcagactctccacctgagttcagtgagagagaaaatgatttagatcttggtgctggggcaaggccatcagcttcagagaccttgccaggcccaggctgggtgccctgtggcctgagaactgagcccagactttgacaaacccacctcaacatcaagcctggggcaggtggaaggtggtctgactgcactgtctccatcttatgcaaagccaggaactcactcactgtcttaagtgagccagggcaaaatttacacccctcacgtttccctctcccttcttccccaccaacaaaacccaggaggtagctggcagagtagctgtcaggaaggagaaaggttctttctggctggttgtttttaattggcttagtgatctaaactggccccttcctcctctgcctggtgagttggcctaaacattcctcaagtctagcctcaggagacctgcccctcccccccgacctccaccccctcagactccatcccccacccccaggagcctggctgtctctagcgaggggtggagaatcagatttagagggagggagagtctgacctggatcctgacctgtaaccagctgaagacggtggaggctttgtggcttgctgagggtgggggttgggagagggactggaaaccttcctcctcgggaaagaaatgcctgggaggaagggaagcctgatattcagggtcaaaacagcccttctaattcacaaccccaaagcaggggtttctagaagttggtcaacagatctggtgagggaagtccccaggccagacgctggactcctgcaatgagggtggaggactcagcctggcctctgcctggcctgtttcaaagtctgggccactggcagccttctcttgctcaatccgaggtggaaaaagatcacctcccagtgacctccctcagcccccaggggagtaggtctgtgtccaaagctatgtggcaggcttgtttgaaggacccagaggggcccagctgacctgtctcactgctcctggcagcccagccccatcggcaggtggcccctgcctgggggttattcgggatggttcagccagggcctcccaggaagagtgctgtggagccacggtgactgtcctggacagcaaggagcatgctaccccagtgagcacttctttttgagggacttgatggggaggtggggtaggcagaagggacgtggcagaagcgggaagactttggtcaccatggctctgcaggccttctgcaaatcagtgctggcctgggctggaaacagctctgtgtgtgaaggtgaggactcttggaagcaggccatcctggccagacaccctagcaggaaggggctcacctgtcacccttaggcagcctgagggctggtggggacttttgagtcttgaggggatagcggaaaaagctgagctcataggtgcccagccagcctcccagctaaaggtgctcagagccccactgccccctctctctgtgcaggtggccagtgcccctccctgctctgggagcattgctagccttctaccccatccctggatccacaggggctatcgaggagacccagtgagaatgtagcattttgttcatccccagggtagctgccctggggtctgggcactctgcctctgggagagaggaagaagaaaggggccccattttttaaaaaactgtacagagcctttggctttatgtgtttatgttcttcacatgcatatgtgtgtatgtgtgtatatctttccccccatcaattggtacaatttttaataaaatcatttaaagcaaaaaaaaaaaaaaaa

SEQ ID NO: 345 - DNA, 1516 bp, Homo sapiens
tgccccaccaccgctgctcctcagcaggcgcctcaccagcctccacaccccttgcgcccgcagaaacgcgcctggccctgagctgtcaccaccgacactctccaggctccggacacgatgcaggccatcaagtgtgtggtggtgggagatggggccgtgggcaagacctgccttctcatcagctacaccaccaacgcctttcccggagagtacatccccaccgtgtttgacaactattcagccaatgtgatggtggacagcaagccagtgaacctggggctgtgggacactgctgggcaggaggactacgaccgtctccggccgctctcctatccacagacggacgtcttcctcatctgcttctccctcgtcagcccagcctcttatgagaacgtccgcgccaagtggttcccagaagtgcggcaccactgccccagcacacccatcatcctggtgggcaccaagctggacctgcgggacgacaaggacaccatcgagaaactgaaggagaagaagctggctcccatcacctacccgcagggcctggcactggccaaggagattgactcggtgaaatacctggagtgctcagctctcacccagagaggcctgaaaaccgtgttcgacgaggccatccgggccgtgctgtgccctcagcccacgcggcagcagaagcgcgcctgcagcctcctctaggggttgcaccccagcgctcccacctagatgggtctgatcctccaggatccccacccaaagcctgatggcaccccggctggccatgctgtcccctccctgtggcgtttcttagcagatggctgcagagcttcgttgatggtcttttctgtactggaggcctcctgaggccaggaacgtgcaaatttgcaggtgctgcatcccaagcccctcatgctcctgccttcctgagggccagaggggagccccaggacccattaagccacccccgtgttcctgccgtcagtgccaactgccgcatgtggaagcatctacccgttcactccagtcccaccccacgcctgactcccctctggaaactgcaggccagatggttgctgccacaacttgtgtaccttcagggatggggctcttactccctcctgaggccagctgctctaatatcgatggtcctgcttgccagagagttcctctacccagcaaaaatgagtgtctcagaagtgtgctcctctggcctcagttctcctcttttggaacaacataaaacaaatttaattttctacgcctctggggatatctgctcagccaatggaaaatctgggttcaaccagcccctgccatttcttaagactttctgctgcactcacaggatcctgagctgcacttacctgtgagagtcttcaaacttttaaaccttgccagtcaggacttttgctattgcaaatagaaaacccaactcaacctgcttaagcagaaaataaatttattgattcaaaaaaaaaaaaaaaaaaaaaaaaaaaaaaaaaaaaaaaaaaaaaaaaaa

SEQ ID NO: 346 - DNA, 3503 bp, Homo sapiens
gttgtcatgggggaggtggtggcgcttggtggccactggcggccgaggtagaggcagtggcgcttgagttggtcgggggcagcggcagatttgaggcttaagcaacttcttccggggaagagtgccagtgcagccactgttacaattcaagatcttgatctatatccatagattggaatattggtgggccagcaatcctcagacgcctcacttaggacaaatgaggaaactgaggcttggtgaagttacgaaacttgtccaaaatcacacaacttgtaaagggcacagccaagattcagagccaggctgtaaaaattaaaatgaacaaattacggcaaagttttaggagaaagaaggatgtttatgttccagaggccagtcgtccacatcagtggcagacagatgaagaaggcgttcgcaccggaaaatgtagcttcccggttaagtaccttggccatgtagaagttgatgaatcaagaggaatgcacatctgtgaagatgctgtaaaaagattgaaagctgaaaggaagttcttcaaaggcttctttggaaaaactggaaagaaagcagttaaagcagttctgtgggtctcagcagatggactcagagttgtggatgaaaaaactaaggacctcatagttgaccagacgatagagaaagtttctttctgtgccccagacaggaactttgatagagccttttcttacatatgccgtgatggcaccactcgtcgctggatctgtcactgcttcatggctgtcaaggacacaggtgaaaggttgagccatgcagtaggctgtgcttttgcagcctgtttagagcgcaagcagaagcgggagaaggaatgtggagtgactgctacttttgatgctagtcggaccacttttacaagagaaggatcattccgtgtcacaacagccactgaacaagcagaaagagaggagatcatgaaacaaatgcaagatgccaagaaagctgaaacagataagatagtcgttggttcatcagttgcccctggcaacactgccccatccccatcctctcccacctctcctacttctgatgccacgacctctctggagatgaacaatcctcatgccatcccacgccggcatgctccaattgaacagcttgctcgccaaggctctttccgaggttttcctgctcttagccagaagatgtcaccctttaaacgccaactatccctacgcatcaatgagttgccttccactatgcagaggaagactgatttccccattaaaaatgcagtgccagaagtagaaggggaggcagagagcatcagctccctgtgctcacagatcaccaatgccttcagcacacctgaggaccccttctcatctgctccgatgaccaaaccagtgacagtggtggcaccacaatctcctaccttccaagggaccgagtggggtcaatcttctggtgctgcctctccaggtctcttccaggccggtcatagacgtactccctctgaggccgaccgatggttagaagaggtgtctaagagcgtccgggctcagcagccccaggcctcagctgctcctctgcagccagttctccagcctcctccacccactgccatctcccagccagcatcacctttccaagggaatgcattcctcacctctcagcctgtgccagtgggtgtggtcccagccctgcaaccagcctttgtccctgcccagtcctatcctgtggccaatggaatgccctatccagcccctaatgtgcctgtggtgggcatcactccctcccagatggtggccaacgtatttggcactgcaggccaccctcaggctgcccatccccatcagtcacccagcctggtcaggcagcagacattccctcactacgaggcaagcagtgctaccaccagtcccttctttaagcctcctgctcagcacctcaacggttctgcagctttcaatggtgtagatgatggcaggttggcctcagcagacaggcatacagaggttcctacaggcacctgcccagtggatccttttgaagcccagtgggctgcattagaaaataagtccaagcagcgtactaatccctcccctaccaaccctttctccagtgacttacagaagacgtttgaaattgaactttaagcaatcattatggctatgtatcttgtccataccagacagggagcagggggtagcggtcaaaggagcaaaacagactttgtctcctgattagtactcttttcactaatcccaaaggtcccaaggaacaagtccaggcccagagtactgtgaggggtgattttgaaagacatgggaaaaagcattcctagagaaaagctgccttgcaattaggctaaagaagtcaaggaaatgttgctttctgtactccctcttcccttacccccttacaaatctctggcaacagagaggcaaagtatctgaacaagaatctatattccaagcacatttactgaaatgtaaaacacaacaggaagcaaagcaatctccctttgtttttcaggccattcacctgcctcctgtcagtagtggcctgtattagagatcaagaagagtggtttgtgctcaggctggggaacagagaggcacgctatgctgccagaattcccaggagggcatatcagcaactgcccagcagagctatattttgggggagaagttgagcttccattttgagtaacagaataaatattatatatatcaaaagccaaaatctttatttttatgcatttagaatattttaaatagttctcagatattaagaagttgtatgagttgtaagtaatcttgccaaaggtaaaggggctagttgtaagaaattgtacataagattgatttatcattgatgcctactgaaataaaaagaggaaaggctggaagctgcagacaggatccctagcttgttttctgtcagtcattcattgtaagtagcacattgcaacaacaatcatgcttatgaccaatacagtcactaggttgtagttttttttaaataaaggaaaagcagtattgtcctggttttaaacctatgatggaattctaatgtcattattttaatggaatcaatcgaaatatgctctatagagaatatatcttttatatattgctgcagtttccttatgttaatcctttaacactaaggtaacatgacataatcataccatagaagggaacacaggttaccatattggtttgtaatatgggtcttggtgggttttgttttatcctttaaattttgttcccatgagttttgtggggatggggattctggttttattagctttgtgtgtgtcctcttcccccaaacccccttttggtgagaacatccccttgacagttgcagcctcttgacctcggataacaataagagagctcatctcatttttacttttgaacgttggccttacaatcaaatgtaagttatatatatttgtactgatgaaaatttataatctgctttaacaaaaataaatgttcatggtagaagcttttaaa

SEQ ID NO: 347 - DNA, 1442 bp, Homo sapiens
cgtgcggccagggtcccgtggccggaggtgtccgaccgggagcggctggagccggacgcgagcggggcgcgcgagttcgagcccagagccgacacgcagcaacaaagcttggggcttccttggtcgcacccaccacctgcctgcccactggtcagccttcagggaccctgagcaccgcctggtctctttcctgtggccagcccagaactgaagcgctgcggcatggcgcgcgcctgcctccaggccgtcaagtacctcatgttcgccttcaacctgctcttctggctgggaggctgtggcgtgctgggtgtcggcatctggctggccgccacacaggggagcttcgccacgctgtcctcttccttcccgtccctgtcggctgccaacttgctcatcatcaccggcgcctttgtcatggccatcggcttcgtgggctgcctgggtgccatcaaggagaacaagtgcctcctgctcactttcttcctgctgctgctgctggtgttcctgctggaggccaccatcgccatcctcttcttcgcctacacggacaagattgacaggtatgcccagcaagacctgaagaaaggcttgcacctgtacggcacgcagggcaacgtgggcctcaccaacgcctggagcatcatccagaccgacttccgctgctgtggcgtctccaactacactgactggttcgaggtgtacaacgccacgcgggtacctgactcctgctgcttggagttcagtgagagctgtgggctgcacgcccccggcacctggtggaaggcgccgtgctacgagacggtgaaggtgtggcttcaggagaacctgctggctgtgggcatctttgggctgtgcacggcgctggtgcagatcctgggcctgaccttcgccatgaccatgtactgccaagtggtcaaggcagacacctactgcgcgtaggccgcccaccgcccgcttctctgccaaaaggacgcccacggggagatggccgcacccacagctgcctttcccaccaccagcctcggtgctctgccccatgctgggaggagggagggagggacaggtgcctggagcccccggaaccctgtttctggaaggccctagctcaggtggcttcagggcctccggaccccccctgggaggggtggccacgtgctggctgcggaacccagggcaggggtgggaggggcctccagcactttttatatttacgtattctccaaagcagtgttcacacgggagccagcctgtggcccccagcctcctggaaaacaggttggcgctggaggagccgggtcttggcatcctggaggtggccccactggtcctggtgctccaggcggggccgtggacccctcacctacattccatagtgggcccgtggggctcctggtgcatcttaataaagtgtgagcagcaaccttgaaaaaaaaaaaaaaaaa

SEQ ID NO: 348 - DNA, 595 bp, Homo sapiens
gggcaaggctgggccgggaagggcgtgggttgaggagaggctccagacccgcacgccgcgcgcacagagctctcagcgccgctcccagccacagcctcccgcgcctcgctcagctccaacatggcaaaaatctccagccctacagagactgagcggtgcatcgagtccctgattgctgtcttccagaagtatgctggaaaggatggttataactacactctctccaagacagagttcctaagcttcatgaatacagaactagctgccttcacaaagaaccagaaggaccctggtgtccttgaccgcatgatgaagaaactggacaccaacagtgatggtcagctagatttctcagaatttcttaatctgattggtggcctagctatggcttgccatgactccttcctcaaggctgtcccttcccagaagcggacctgaggaccccttggccctggccttcaaacccaccccctttccttccagcctttctgtcatcatctccacagcccacccatcccctgagcacactaaccacctcatgcaggccccacctgccaatagtaataaagcaatgtcacttttttaaaacatgaaa

SEQ ID NO: 349 - DNA, 5079 bp, Homo sapiens
acactgggaggaagtgcgggccgcctgcccgggcgcgttaaggaagttgcccaaaatgaggaagagccgcgggcccggcggctgaggccaccccggcggcggctggagagcgaggaggagcgggtggccccgcgctgcgcccgccctcgcctcacctggcgcaggtggacacctgcgcaggtgtgtgccctccggcccctgaagcatggccagcagcggcatggctgacagcgccaaccacctgcccttctttttcggcaacatcacccgggaggaggcagaagattacctggtccaggggggcatgagtgatgggctttatttgctgcgccagagccgcaactacctgggtggcttcgccctgtccgtggcccacgggaggaaggcacaccactacaccatcgagcgggagctgaatggcacctacgccatcgccggtggcaggacccatgccagccccgccgacctctgccactaccactcccaggagtctgatggcctggtctgcctcctcaagaagcccttcaaccggccccaaggggtgcagcccaagactgggccctttgaggatttgaaggaaaacctcatcagggaatatgtgaagcagacatggaacctgcagggtcaggctctggagcaggccatcatcagtcagaagcctcagctggagaagctgatcgctaccacagcccatgaaaaaatgccttggttccatggaaaaatctctcgggaagaatctgagcaaattgtcctgataggatcaaagacaaatggaaagttcctgatccgagccagagacaacaacggctcctacgccctgtgcctgctgcacgaagggaaggtgctgcactatcgcatcgacaaagacaagacagggaagctctccatccccgagggaaagaagttcgacacgctctggcagctagtcgagcattattcttataaagcagatggtttgttaagagttcttactgtcccatgtcaaaaaatcggcacacagggaaatgttaattttggaggccgtccacaacttccaggttcccatcctgcgacttggtcagcgggtggaataatctcaagaatcaaatcatactccttcccaaagcctggccacagaaagtcctcccctgcccaagggaaccggcaagagagtactgtgtcattcaatccgtatgagccagaacttgcaccctgggctgcagacaaaggcccccagagagaagccctacccatggacacagaggtgtacgagagcccctacgcggaccccgaggagatcaggcccaaggaggtttacctggaccgaaagctgctgacgctggaagacaaagaactgggctctggtaattttggaactgtgaaaaagggctactaccaaatgaaaaaagttgtgaaaaccgtggctgtgaaaatactgaaaaacgaggccaatgaccccgctcttaaagatgagttattagcagaagcaaatgtcatgcagcagctggacaacccgtacatcgtgcggatgatcgggatatgcgaggccgagtcctggatgctggttatggagatggcagaacttggtcccctcaataagtatttgcagcagaacagacatgtcaaggataagaacatcatagaactggttcatcaggtttccatgggcatgaagtacttggaggagagcaattttgtgcacagagatctggctgcaagaaatgtgttgctagttacccaacattacgccaagatcagtgatttcggactttccaaagcactgcgtgctgatgaaaactactacaaggcccagacccatggaaagtggcctgtcaagtggtacgctccggaatgcatcaactactacaagttctccagcaaaagcgatgtctggagctttggagtgttgatgtgggaagcattctcctatgggcagaagccatatcgagggatgaaaggaagtgaagtcaccgctatgttagagaaaggagagcggatggggtgccctgcagggtgtccaagagagatgtacgatctcatgaatctgtgctggacatacgatgtggaaaacaggcccggattcgcagcagtggaactgcggctgcgcaattactactatgacgtggtgaactaaccgctcccgcacctgtcggtggctgcctttgatcacaggagcaatcacaggaaaatgtatccagaggaattgattgtcagccacctccctctgccagtcgggagagccaggcttggatggaacatgcccacaacttgtcacccaaagcctgtcccaggactcaccctccacaaagcaaaggcagtcccgggagaaaagacggatggcaggatccaaggggctagctggatttgtttgttttcttgtctgtgtgattttcatacaggttatttttacgatctgtttccaaatccctttcatgtctttccacttctctgggtcccggggtgcatttgttactcatcgggcccagggacattgcagagtggcctagagcactctcaccccaagcggccttttccaaatgcccaaggatgccttagcatgtgactcctgaagggaaggcaaaggcagaggaatttggctgcttctacggccatgagactgatccctggccactgaaaagctttcctgacaataaaaatgttttgaggctttaaaaagaaaatcaagtttgaccagtgcagtttctaagcatgtagccagttaaggaaagaaagaaagaaaaaaaaaaaaggcctggatactgcttttgctgtctctgttatgagatggaagacttacatgtttgtgataaaaggggaccatgagaatgaattggcttggcttactttccccctgaaatcctctctcctgcagactgtcttgaagacctggtgactggtaaataaagccctgcatggaggctgcacagcaggggcaagaggcccatcccccagcatctcactgaggacagcttcaggctgccttcctctgaacgtggtccacaccttcctctcctccacagagagggtgccgccagaatcccctgtcgctttctgtgtctgcaatggggggcagcacagggatcaaagccatctaaagagtttccaaagaaagtattaattcagaacaagccaaagaccctgagcctcaccacaaacaggccttttggagtgtgaatttgagttgaagatacaagatcggagaatgattttctggtcttaactaatcctcatcttcatgtttgatctttaagaagtcatcacccattgatttcagttttgctgtacctcttgaaagttaaagagacatctcagcactttaggaggccgaggcgggtggatcacttgaggtaaggagtttgagactagcctggccaatatggtaaaaccccatctctactaaaaatacaaaaattagccgggcatggtggcatgtgtctgtagtcccagctactcgggaggctgaggcaggagaatcgcttgaacccaggaaacggaggtcgcagtgagccaagatcatgccactgcactccagcttgggcatcacagcgagactctgtcaaaacaaacaaacaaaaaaacaacttaaagaggtaatttagccatcattcttatgccagcagatataaataaacttggacccatctggtcttcagctaaacctgagacattttaaagtgcatggacagccatggacagcaggccctcctctaacaggggatgcaaggcatggagaaagacaatcagtacccaagctcagccacagaagacaggagtcactcatataacttgtgtttagaagtttttggtagccacgcacactttctgaaatcacactatctggtggtttaatcatatttttaaagacagaatccctgagtgctgagcagattctcaaaacacatttagaatccctgaaattagaaagatcaatgacaaaatatctgtcagccaggccacaaacaggtgtaaaattatgaaaggagtggttggatgtgccaagtttggtaaagtggtgactgcatctgagaaagaggctgtgaggctgaactcttggtggcttccttctgtaacttccagagggagtcttcaacacaggccccgtgctcgtaggaatacggtagcacctatgtaggaagtgcgtggagttttctgtcttctttctgtgtgatttttggcctttttatcagcacttctcccctcccaggagcctggggatgccaaacatccagaatgtgatgggacaagatgggggcaggggcctcacctccctgcagaggtccggccaggtctccttgtccctggacaatctcctgagcctctctgcttggtggagcaggcacctgtgtgcagaattcccactgtggccagcacgaggaagtcttttctagtgaaaatgtgtcttgtggtcaggaataattatcctttcccctgtagccaccaaggagggcaaatagagaaaggtaacctaattgaaggattggtcatgtgaaaagggctacatttgggaagctgggaaaggcctccaggcttctagagcagctagcttgggctggattctcatacccaggctgccccttggattgttctacccaagcttttccctggggtctgggctcactccataaggtaaggtgccttttaccttatggtccttctttagcaggtaacaaaggagcatcaggggcaggctgccctggtggcatcacactggctagtgaggccgtgaatatcttgtcccccagcagggccgacagtttctatcacagaaaacagtgtgttcagtggtgaaaatcgttgcatgcatgttttcatctgagcgtgtccttctcccatactccctatcagccagccctgcctgtagctgctgtatggtgattgcacttggacatcagtccaatgactgcaagtcggcctggattttcacttgcagaggctacagctgcattgtcaggtctcccagccctgcagagagctccctccactggttagcagtgtgttgtgttttccattcatttcagaagagctacattgtgtcactggacatttttaaaaactgtgatttttaataaaaatttaaaatttgctttgtgatgaaaaaaa

SEQ ID NO: 350 - DNA, 2259 bp, Homo sapiens
gtaggcgcaaagctgaggaaaggagagtgtggagaggggcctggtgtggtggggcccggtgtttgggaccggagggtgttgacggctgatgagttccttgggtttgctctttcttcacctgaaaagaagactccaggaagggcagcacatgccggagaaagatgaattccagcttgaccgcccagaggcgcggcagtgacgccgagttgggaccctgggtgatggctgcgaggtccaaggacgcggcgccgtcccaacgcgacggacttttgcccgtgaaagtggaggaagactcacccggaagttgggagcccaactatcccgcggcttcgccggaccccgaaacttctcgactgcactttaggcagctgcgttaccaggaggtggctggaccggaagaggcgctgagccggctccgagaactctgtcgtcggtggctgagacccgagctgctctccaaggagcagatcctggagctgctggtgctggagcagttcctcaccatcctgcccgaggagcttcaagcctgggtgcgagagcactgcccagagagcggggaggaggcggtggccgtggtgcgggctctgcagcgagcgctcgatggaacctcatcccaggggatggtgactttcgaggacacggctgtgtctctaacctgggaggagtgggagcgcctggacccagcacggagggacttctgcagagagagtgcgcagaaggattccgggagcacagttccgccgagtttggaaagcagagtggagaacaaagagttgattccaatgcaacaaattttagaagaagcggagccacaggggcaactacaagaagcgttccaggggaagcgccccctgttttctaagtgtggcagtacccatgaggacagggtggaaaagcagtccggagaccccttgcccctgaaacttgaaaattctcctgaagcagaaggactcaacagcatctcagatgtcaataagaatggttccatagaaggggaagactctaaaaataatgaattgcagaacagtgccaggtgttccaaccttgttctatgtcagcacatcccgaaagcagagaggcccactgacagtgaggaacacgggaacaagtgcaagcaaagtttccacatggtgacgtggcacgtgctgaaacctcacaagtctgacagtggagacagtttccatcattccagcctttttgagacccagaggcagctccatgaagaaagaccttataaatgtggtaactgtgggaagagtttcaaacaacgctctgacctctttagacaccagagaatccacacaggtgagaaaccctatggctgccaagaatgtgggaaaagcttcagccagagtgctgccctgaccaagcaccagaggacacacacaggcgagaagccgtacacctgtctgaaatgtggggagcgcttcaggcagaattcacacctaaatcgtcatcaaagtacccacagtagagacaaacattttaaatgtgaggaatgcggggaaacctgtcatatttccaacctttttagacatcagagactacataaaggggaaagaccctataagtgtgaagaatgcgagaagagcttcaaacagcgctctgacctctttaaacaccacagaatccacactggggagaagccctatggatgttccgtctgtgggaaacgcttcaatcagagtgcaaccctcattaaacaccagagaattcacactggggaaaagccttacaaatgtcttgaatgtggggaaagatttagacaaagtacacaccttatccgacaccaaagaattcatcaaaataaagtgctgtcggctgggcgtggtggctcacgcctataatcccagcactttgggaggccaaggcaggcagatcatttgagatcaggagtttgaaaccagcctggccaacatggtaaaatcctgtctctactaaaaatacaaaaatgagccgggcatggtggtgcatgcctgtaagcccagctattcgggaggctgaggtaggagaatcacttgaacccaggaggcggaagttgcagtgagctgagatcatgccactgcactccagcctgggcaacagagcgagactccatctcaaaaaagaaataaagtgctgtcattttgatatgtttctatgtgaaaaaaaaaaaaaaaaaaaaaaaaaaaaaaaaaaaaaaaaaaaaaaaaaaaaaaaaaaaaaaaaaaaaaaaaaaaaaaaaaaaaaaaaaaaaaaaaaaaaaaaaaaaaaaaaaaa

SEQ ID NO: 351 - DNA, 1690 bp, Homo sapiens
aacgccagcgcctgcgcactgagggcggcctggtcgtcgtctgcggcggcggcggcggctgaggagcccggctgaggcgccagtacccggcccggtccgcatttcgccttccggcttcggtttccctcggcccagcacgccccggccccgccccagccctcctgatccctcgcagcccggctccggccgcccgcctctgccgccgcaatgatgatgatggcgctgagcaagaccttcgggcagaagcccgtgaagttccagctggaggacgacggcgagttctacatgatcggctccgaggtgggaaactacctccgtatgttccgaggttctctgtacaagagatacccctcactctggaggcgactagccactgtggaagagaggaagaaaatagttgcatcgtcacatgatcacggatacacgactctagccaccagtgtgaccctgttaaaagcctcggaagtggaagagattctggatggcaacgatgagaagtacaaggctgtgtccatcagcacagagccccccacctacctcagggaacagaaggccaagaggaacagccagtgggtacccaccctgcccaacagctcccaccacttagatgccgtgccatgctccacaaccatcaacaggaaccgcatgggccgagacaagaagagaaccttccccctttgctttgatgaccatgacccagctgtgatccatgagaacgcatctcagcccgaggtgctggtccccatccggctggacatggagatcgatgggcagaagctgcgagacgccttcacctggaacatgaatgagaagttgatgacgcctgagatgttttcagaaatcctctgtgacgatctggatttgaacccgctgacgtttgtgccagccatcgcctctgccatcagacagcagatcgagtcctaccccacggacagcatcctggaggaccagtcagaccagcgcgtcatcatcaagctgaacatccatgtgggaaacatttccctggtggaccagtttgagtgggacatgtcagagaaggagaactcaccagagaagtttgccctgaagctgtgctcggagctggggttgggcggggagtttgtcaccaccatcgcatacagcatccggggacagctgagctggcatcagaagacctacgccttcagcgagaaccctctgcccacagtggagattgccatccggaacacgggcgatgcggaccagtggtgcccactgctggagactctgacagacgctgagatggagaagaagatccgcgaccaggacaggaacacgaggcggatgaggcgtcttgccaacacggccccggcctggtaaccagcccatcagcacacggctcccacggagcatctcagaagattgggccgcctctcctccatcttctggcaaggacagaggcgaggggacagcccagcgccatcctgaggatcgggtgggggtggagtgggggcttccaggtggcccttcccggcacacattccatttgttgagccccagtcctgccccccaccccaccctccctacccctccccagtctctggggtcaggaagaaaccttattttaggttgtgttttgtttttgtataggagccccaggcagggctagtaacagtttttaaataaaaggcaacaggtcatgttcaatttcttcaacaaaaaaaaaaaaaaa

SEQ ID NO: 352 - DNA, 678 bp, Homo sapiens
ggcagggacccgcagctcagctacagcacagatcaggtgaggagcacaccaaggagtgatttttaaaacttactctgttttctctttcccaacaagattatcatttcctttaaaaaaaatagttatcctggggcatacagccataccattctgaaggtgtcttatctcctctgatctagagagcaccatgaagcttctcacgggcctggttttctgctccttggtcctgggtgtcagcagccgaagcttcttttcgttccttggcgaggcttttgatggggctcgggacatgtggagagcctactctgacatgagagaagccaattacatcggctcagacaaatacttccatgctcgggggaactatgatgctgccaaaaggggacctgggggtgcctgggctgcagaagtgatcagcgatgccagagagaatatccagagattctttggccatggtgcggaggactcgctggctgatcaggctgccaatgaatggggcaggagtggcaaagaccccaatcacttccgacctgctggcctgcctgagaaatactgagcttcctcttcactctgctctcaggagatctggctgtgaggccctcagggcagggatacaaagcggggagagggtacacaatgggtatctaataaatacttaagaggtggaatttgtggaaa

SEQ ID NO: 353 - DNA, 2344 bp, Homo sapiens
acactactgggctccaagactgctcaaggtctcactgatagtcaaggcttgtgctcctttttttcagaagagtaagattaaagaaaaccactgtgaattaaaaagtgtgggtgccaacatgggacgggagtcccccctcactccatggatgacatagagggggcagaagattacagaattggcattgtcctgcgtggaagctgggccacccacagtggcgtgggaagcctctcagatgctggattctaatgggctcttgatcaccttggattgggctatttcattgttatcacaaaataaacaggatgctccaagtcatgttatggcagagaaccaaccagcttcacactggtcctctaaaccaatcctcacaacaggactgggagacaggtgttacctttcccactttacagagaatgaaacagagtggcaaagcctccgaaggaccctacacttcggacatcgcaaagcaggatctgagtcccggctcctctgtccaaacctacttgctaggctttctttcccatgtctactctatagctggaaaggtcgtggaggacacattttaggccaaccctctcggtttacaatccagagaggggagaccctcagaagccaagcgacatgtccacggctacgcggcgagtgtgtggcaacgtggaaggggagcccgagacgccctggtctctcccttctctcgcaggttcctttctccccgaacgcagcccgcaggggacgctggaggaggagctgagctggagttgccggggccccgggaccgggcgttccgggggcggtccccagcagccgcgcattccagagccagcagcgcgtcctggccgctcctgcgctctcccgcctcccggggctcggaggagccggggcacgttccaggagctgcctagggctgaggttccaggcctgggggtcgcttccagctgccagatcccgtgcagtcctggggaccctgagaagcaccgagccatccctgacccaggaactttccgcagactcgccgccatctgggagtgaagcaacatggatgcagtcagccaagtccccatggaagtcgtgcttcccaagcacatcctggatatctgggttattgtcctcatcatcctggccaccattgtcatcatgacctcgttgttgctgtgcccagccactgcagtaatcatctatcgcatgcggactcatccgatccttagtggggctgtttgagagcctcccaagagggccgggtgagggatgaggacaggcatcctatccccagcctcttcctgtcttcagaaaagcagcaggagggactttggggcatggacctgagttctggttttgattctgccacgagccagctgtgtgaatttggtcaagggacctaactctctgagttccaggttccttatctttcaaatggggatggtgatccctgccctttctacctcatagggatgtgagaaccacctgacttagtggatgtgaaagctgtttgtgatcagtaaagctaccacagatataagggtgttatgctgaatcctgagaagctttcaagaaccagagaacctgattgctgatgatggccttaaaggtggtgagggagatactgggggcagagcagactttgccagtgcccctcaggtcaaaccaagccaagagcaccctgtccccattccaaggggccagcagcactttggcccaaagtattttctttaaggtgccattccttcatgttttctcagtttggagggtgatgggtagagctttccagaaccttctccattccagaatctctgcccctgtgtaatctgaaggaaggctgtgccatctttgggcactgccaagggagttggggtgatgggcttctttctgcactggagtctcacatctgttagctttgacactcaagcaatgttggaaaatgcagggtgactgagttccctgcccagctttcgggatctctggcccccatccccttgtgtgtgtccctctgcccagctcctgctgtaattagctccacgtgtacccccttcactccctcccaccagctctgcagccagcctatggcaattatattttaagaggtgttcccaggacttttgggacctactaaaacaatgatggttattttagatgtgatgatttatatttatgtagagatatttctggaccactcaagctcttcgataccaaaatcaggagcatcttgggatttattaaattatgtaagaagatagcacagatatcgggatattattgtgtgaaaatgctgcttttactttgatgtgatctcattgatgtacacaaccaagttccaataaagtgctagaatgtgcaaaaaaaaaaa

SEQ ID NO: 354 - DNA, 2592 bp, Homo sapiens
cgcccacccatccggggcaagagccgcgccgcaggagaggcaggctggaccgggggctccccgggcccgcgacccccgccgtgaccccgcagcccccagctcgcccccaagatgatgaagaggcagctgcaccgcatgcggcagctggcccagacgggcagcttgggacgcaccccggagaccgctgagttcctgggtgaggacctgctgcaggtagaacagcggctggagccggccaagcgggcagcccacaacatccacaagcggctgcaggcctgtctgcagggccagagcggggcagacatggacaagcgggtgaagaagcttcccctcatggctctgtccaccacgatggctgagagcttcaaggagctggaccctgattccagcatggggaaggccttggagatgagctgtgccatccagaatcagctggcccgcatcctggccgagtttgagatgaccctggagagggacgtcctgcagccactcagcaggctgagtgaggaggagctgccagccatcctcaaacacaagaaaagcctccagaagctcgtgtccgactggaacacactcaagagcaggctcagtcaggcaaccaagaattcaggcagcagtcaaggcctaggaggcagcccgggtagtcacagccatacgaccatggccaacaaggtggagacgctgaaggaggaggaggaggagctgaagaggaaagtggagcaatgcagggacgagtacttggctgacctgtaccactttgttaccaaggaggactcctatgccaactacttcattcgtctcctggagattcaggccgattaccatcgcaggtcactgagctcgctggacacagccctggctgagctgagggagaaccacggccaagcagaccactccccttcgatgacagccacccacttccccagggtgtatggggtgtcgctggcaacccacctgcaagagctgggccgggagattgccctgcccatcgaggcctgcgtcatgatgctgctttctgagggcatgaaggaagagggtctcttccgtctggctgctggggcctcggtgctgaagcgtctcaagcagacaatggcctcggacccccacagcctggaggagttctgctccgacccgcacgctgtggcaggtgccctcaagtcctatctgcgggagctgccagagcctctgatgaccttcgacctctatgatgactggatgagggcagccagcctgaaggagccaggggcccggctgcaggccctccaagaggtgtgcagccgcctaccccccgagaacctcagcaacctcaggtacctgatgaagttcctggcacggctggccgaggagcaggaggtgaacaagatgacacccagcaacatcgccatagtcctgggacccaacttgctgtggccacctgagaaagaaggggaccaggcccagctggatgcagcctccgtgtcttccatccaggtggtgggcgtcgtcgaggcgctgatccagagcgcagacaccctcttccctggagacatcaacttcaacgtgtcaggcctcttctcagctgttaccctccaggacacagtcagtgacaggctggcctctgaggaacttccgtccactgccgtgcccaccccagccaccaccccggctccggctccggctccagctccagctccggccccagccttggcttcagcagctaccaaggaaaggacagagtctgaggtgcctcccagaccagcctcccccaaggtcaccaggagtcccccggagacagctgccccagtggaggacatggctcggaggaccaagcgcccggcgccagcccggcccaccatgccgcccccccaggtctccggctcccgctcctcccctccagccccgcccttgccccctggctctggcagccctgggaccccccaagccctgccccgacgtctggttggcagcagcctccgagcccccacagtgccacccccgttaccccccacaccccctcagcctgcccggcgccaaagccggcgttcaccagcctcccccagcccggcctccccaggtccagcctcccccagcccagtctctttgagtaaccctgcacaggtggacctgggggctgccacagcagagggaggagcccctgaggctatcagtggggtccccactcccccagctatcccccctcagccccgccccaggagccttgcctcagagaccaactgagtggctggtttctccctaagcagccctcagcaccccctccctccccacctggccctcccaggacagctctcgccccccacaaaggggcatgggcctccagcctttgcccacaagtgcctcagtgcccactgggtcggcccccatggccaggagggctcaggacaatcctctatttcctgaccttttcctcgtccaccctgggcttggggacccccccaccggactctccactctccggcaggtcctaggggagccaccggaaggaaggagaggtttgcctgctcctacgggactgattcttctcttgccgacatgttttttgtaaggctggtaaataaattattttggacaaaactggaaaaaaaaaaaaaaaaa

SEQ ID NO: 355 - DNA, 1868 bp, Homo sapiens
agtttcggaaccccagccagctcacctctgcgccgctgaacccgatccgagcctccggcaaaggtttttccctcctcccccggccgagggcttctgcagcccgggcacccccgccccgcggcgccccacattcccccagcccggggcccttggcgcgtgcgctccgtgcggctgtgctccgcgggactttgtttgtttcctcctcgtccctctttgttgggctgaacaccagcctcgtcaaagccccccactccggagggagttcggcttctccagcagggcggctgcagcgcgctgccccgaccccgcctgcggcccctcacgccgctagtgctcccaccccgccctcctggcaccccgcctgcgtccgttcgcccgaggaagccaaccgcgacttcattgatgcacccattccagtggtgtaacgggtgtttctgtggcctgggactggttagcaccaacaagtcctgctcgatgccacccatcagtttccaggaccttccgctcaacatctatatggtcatcttcggcacaggcatctttgtcttcatgctcagccttatcttctgctgctattttatcagcaaactgcggaaccaggcacagagtgagcgatacggatataaggaggtggtgcttaaaggtgatgccaagaagttacaattatatgggcagacctgcgcagtctgtctggaagacttcaaggggaaggatgagttaggcgtgctcccgtgccaacacgcctttcaccgcaagtgtctggtgaaatggctggaagttcgctgtgtctgccccatgtgtaacaagcccattgctagtccctcagaggccacgcagaacattgggattctattggatgagctggtgtgagtgctgccgctacaccgagacctggagaagacctcttgcctcatggatgtctggtccctctgcacagctccaaccaacaggactgtagggtgatgacgatcactttcccagtgatgagaagggtggtctaggactgggcttctaccctcagtgcaagaccagtgccagatgtgcccccacttcctgcctcctgaagccttcttccctgctactccatgctggtggcctcacccatcaagaccactgtctcctggtactggactatctacctgccttgtccctgttctgggggaaggtgtccaccccgatcaagaacatggagaaagtcctctttcaaggctcccattaggaggatgagctgccttgacccagaagggatgagacgggctcttacctctctacaaccttccctccccttcccactccttccggagtaaggttagaagggaaggaaggaaagatcaaggaaccaagcgcctccacgggaggcgagggaggctctgtatgaaacagaagagcagggacataaaggaaaatgtcagtgtttacatgggacctatggaaacaaaggctggcgggcgccagctgactccagagtaagagagggcccttcccctgccaggacccacggtgctatccattcagtctcttcctcagttaatctcggagcttcctattccatgttgaggtttgtgggcccctctagaggagggctagttctatacttaaattgattcccaggggccttttttttttttttttttttttttttgatcaaaaggggtgtggggatgggggtgtctacggttaagcaacagatacctccttccctttgtaaatagtatttttatacttcatcctcgcctctcaggctttagatacgaaatctccagaatggaagggggtggggattttctgttcctccctggagtgggtgagggtgggagaaagttacatatttaaagaaaaataaatttaataacaagtttctctaacct

SEQ ID NO: 356 - DNA, 702 bp, Homo sapiens
cgcagaaaggcacaggactcgctaagtgttcgctacgcggggctaccggatcggtcggaaatggcagaggtggaggagacactgaagcgactgcagagccagaagggagtgcagggaatcatcgtcgtgaacacagaaggcattcccatcaagagcaccatggacaaccccaccaccacccagtatgccagcctcatgcacagcttcatcctgaaggcacggagcaccgtgcgtgacatcgacccccagaacgatctcaccttccttcgaattcgctccaagaaaaatgaaattatggttgcaccagataaagactatttcctgattgtgattcagaatccaaccgaataagccactctcttggctccctgtgtcattccttaatttaatgccccccaagaatgttaatgtcaatcatgtcagtggactagcacatggcagtcgcttggaacccactcacaccaatccagtgaccgtgtgtgggctggcggctcttctcccccaccaacggaacccctgtgtgcaccaaccttccccagagctccggagcgccctctcctcacttccaggttttggagcaagagcttgcaggaagcccgcacccagcttccttctgaccttcagttcactttgtcgcccttggagaaagctgtttttctttaactaaaaataaccaaaatgcttaaaaaaaaaaaaaaaaaa

SEQ ID NO: 357 - DNA, 4886 bp, Homo sapiens
gcaggcgcgccctggcacccgggccaagacgcccggagcggctgctgcagccagtagcggccccttcaccggctgccccgctcagacctagtcgggaggggtgcgaggcatgcagctgggggcccagctccggtgccgcaccccgtaaagggctgatcttccacctcgccacctcagccacgggacgccaagaccgcatccaattcagacttcttttggtgcttgtgaaactgaacacaacaaaagtatggatatgggaaaccaacatccttctattagtaggcttcaggaaatccaaaaggaagtaaaaagtgtagaacagcaagttatcggcttcagtggtctgtcagatgacaagaattacaagaaactggagaggattctaacaaaacagctttttgaaatagactctgtagatactgaaggaaaaggagatattcagcaagctaggaagcgggcagcacaggagacagaacgtcttctcaaagagttggagcagaatgcaaaccacccacaccggattgaaatacagaacatttttgaggaagcccagtccctcgtgagagagaaaattgtgccattttataatggaggcaactgcgtaactgatgagtttgaagaaggcatccaagatatcattctgaggctgacacatgttaaaactggaggaaaaatctccttgcggaaagcaaggtatcacactttaaccaaaatctgtgcggtgcaagagataatcgaagactgcatgaaaaagcagccttccctgccgctttccgaggatgcacatccttccgttgccaaaatcaacttcgtgatgtgtgaggtgaacaaggcccgaggggtcctgattgcacttctgatgggtgtgaacaacaatgagacctgcaggcacttatcctgtgtgctctcggggctgatcgctgacctggatgctctagatgtgtgcggccggacagaaatcagaaattatcggagggaggtagtagaagatatcaacaaattattgaaatatctggatttggaagaggaagcagacacaactaaagcatttgacctgagacagaatcattccattttaaaaatagaaaaggtcctcaagagaatgagagaaataaaaaatgaacttctccaagcacaaaacccttctgaattgtacctgagctccaaaacagaattgcagggtttaattggacagttggatgaggtaagtcttgaaaaaaacccctgcatccgggaagccaggagaagagcagtgatcgaggtgcaaactctgatcacatatattgacttgaaggaggcccttgagaaaagaaagctgtttgcttgtgaggagcacccatcccataaagccgtctggaacgtccttggaaacttgtctgagatccagggagaagttctttcatttgatggaaatcgaaccgataagaactacatccggctggaagagctgctcaccaagcagctgctagccctggatgctgttgatccgcagggagaagagaagtgtaaggctgccaggaaacaagctgtgaggcttgcgcagaatattctcagctatctcgacctgaaatctgatgaatgggagtactgaaataccagagatctcacttttgatactgttttgcacttcatatgtgcttctatgtatagagagctttcagttcattgatttatacgtgcatatttcagtctcagtatttatgattgaagcaaattctattcagtatctgctgcttttgatgttgcaagacaaatatcattacagcacgttaacttttccattcggatcattatctgtatgatgtggtgtggtttgtttggtttgtccttttttttgcgtttttaatcagaaaacaaaatagaggcagcttttgtagattttaaatgggttgtgcaagcattaaaatgcaggtctttcagaatctagaactaggcataaccttacataatactaggaaaattatgagaaaggggaaatttttggttaaataagagtaaggttcaaacacaagcagtacatgttctgtttcattatgctcgatagaaggcttttttttcacttataaggcctgattggtcctacccagcttaacggggtggggtttttttgtttgttcagacagtctgttcttttgtaaacatttttagttggaaaaacagcatctgcattttccccatcctctacgttttagagaggaatcttgtttttgtgtgcaacataagaaaattatgaaaactaatagccaaaaaacctttgagattgcattaaagagaagggataaaggaccagcaataataccttgtaagttgcttttgtttgtaaaatctgagcttatagttttccttagtgagtaaattcataaggatgggaacatttaaattaagttaatgggcctttaaaaaaaaaaaaaggaaacactcatacctgtagttggaggatgaatactggagacgggttaccaatgtcaggttatactaaaactaaatcagaaagtctgaatgtagcacataatggttctcttctgttgtccaaggctgtaaaatggacagccttgtcacacctccccggtgctgttttacaacgtgagggtagacgctgtcagtaacccagagggaccaggccttcctaggttttctaggcagtcagctgttaaccactcacttagtaaatgtcataactacacctgctccaggaccaatcagtgaaacctgctcggaattaaaggcttcctctgggtgcctgctgaacaactgagctcatgtcatgggcatgtggtggtttctctgttgcctgaaagagccattaaagtcagtcgtgcgtgaagcatctctcttctaaaggatgtgtatttccataaatgctttctgaggatccggtacaaaatgatttcccaaagttctgaagtgccttgagaacatgtgggtccgagtgttataacagactcctcccccgggtcaccttttgcctggtcatcctgttagagtacatctttggaaatccagggtaatattctctttcagagatgctcattgtgtaactctgtgtagggagatagtcactttaaacagctcaaagtagctagctaaaggagtagccttaaatacctaaaagatgacagaagcatagcccttaacaaatcttcagcttgtctctcagtatttcccaatcatgaaaatcccttgctatgtctttcctactagaaatgttctagaatcgctggacggtggggtcagagggcagtcggtatttaggccgtgagcttcccatactactgcaggtccaactcctggcaaccgcgggctcaaggcaggtcattggaatccacgttttggccacagtagttgtaggattgcttttctgtatcataattttagaatgctcttaaaatcttgaggaagagtttttattttttatttatttttgagatggagtctctgttgcccaggctgcagtgcagtggtgccatctcagctcactgcaacctccacctcccaggttcaagcgattctcctgcctcagccacctgagtagctgggagtacaggcatgtggcaccatgcctggctaatttttgtatttttaatagagttgagatttcaccatgatggtcaggctggtctcgaactcctgacctcgtgatccgcccgcctcggccccccaaagtgctgggattaacgggtgtgagccacggcgcccagcccaggaagagtttttaaattagagctctgtttaattataccactgggaaatcatggttacgcttcaggcatattcttccccagagtactacttacattttaaatttcattttgtaaagttaaatgtcagcattccctttaaaagtgtccattgttctttgaaagtagacgtttcagtcattcttttcaaacaagtgtttgtgtaccttttgccaagctgtgggcatcgtgtgtgagtacagggtgctcagctcttccaccgtcattttgaattgttcacatgggtaattggtcatggaaatgatcagattgaccttgattgactgtcaggcatggctttgtttctggtttcaatctgttctcgttccttgtaccggattattctactcctgcaatgaaccctgttgacaccggatttagctcttgtcggccttcgtggggagctgtttgtgttaatatgagctactgcatgtaattcttaaactgggcttgtcacattgtattgtatttttgtgatctgtaatgaaaagaatctgtactgcaagtaaaacctactccccaaaaatgtgtggctttgggtctgcattaaacgctgtagtccatgttcatgccaaaaatggctgggaacgtttgctttatttacattcagtcagcgttgctttcagatcacactttatccacacaggaaagccagtcagcctataatgaagtagttattaaaataaatgtaatgaatatgtctacaaagtatagtttagtggtttattttgctaaaatgcacatatatttgatataatttagtttgagaagttcagctagtttttctcctttgtttgactttgtcaatttctatctggtttttaagggtctgagcttagcttgtgcatgcaaggttttgggtttttttattttttttttgagcacagcttttcaccttttaatttgttgggtatttttctcttaataagagaaatattggccatcgatttttacatataatacaagtgtgtttttccagtacattggttcctgtcccctctctgtgaactgtttgagtattggaacagtatgtcttcaataattcaatgttactttgagatacatgtgttaatatacccttagttattcttgaaataaaaccagtctcttacgcttgcagtggagaaaggcaaaaaaaaaaaaaaaaaa

SEQ ID NO: 358 - DNA, 4544 bp, Homo sapiens
cccttccctccgcccacctccctgaagcggagccgccgtcgccaccagcgccgtcatgtcggcccccgccgggtcctctcacccggccgccagcgcccggatcccgcccaagttcggcggagcggccgtctcaggagccgcagcgcccgcgggcccgggtgcgggcccggcgccgcaccagcagaacggtccagcccagaatcaaatgcaggttccatctggatatggattgcatcatcaaaactatattgctccctcaggacattactctcaaggacctgggaaaatgacctcattgccattggatacccagtgtggtgattactactctgctctctatacagtaccaacacaaaatgtgactcctaacacagtgaaccagcaaccaggagcacagcagttgtacagcaggggtcctcctgcccctcatattgtgggatccactctaggatctttccaaggtgctgcatcgtcagcatcccatttgcatacgagtgcctcccaaccatactcctcttttgtgaatcactacaatagtccagccatgtactctgccagctcttctgttgcgtctcagggatttccctctacttgtggtcattatgctatgtcaactgtttctaatgccgcgtatcctagtgtttcatatccctctctgcctgctggtgatacatatgggcaaatgtttacctcacagaatgctccgactgttaggccagttaaagataattcattctctggtcaaaatacagctatcagccatccatcgccacttccacctctaccatcacaacagcaccaccagcagcaaagtctttcaggatacagtactctaacgtggtcatctccaggccttccatcgactcaagacaatctcatccgaaaccacacaggatccctggctgtagcgaacaacaacccaaccattactgttgcagattctttatcctgtcctgttatgcaaaatgttcagcctcccaagtccagcccagtggtatccactgttttatcaggatcctcaggatcctcatcaacaagaacacctcccactgcaaatcacccagttgagcctgtgacctcagttacacagccatcagagctattacaacaaaaaggtgttgacagctcttctaccacaagcagtgcttctccaatgcccaacagttatgatgccctggaaggaggcagttacccagatatgctttcttcatcagcaagcagtcctgctcctgatcccgcccctgaacctgatcctgcttctgctccagctccagcttcagctccagctcctgtcgtccctcagccttcaaaaatggctaagccttttggctatggctatccaacacttcagcctggttatcagaatgctacagcaccacttatttctggagtacagcccagtaacccggtatattctggattccagcagtatcctcaacagtatcctggtgtgaaccagctatcctccagtataggaggattgagtcttcagagttctccacaaccagaaagcctgagacctgtaaaccttactcaggagaggaatattttacctatgactcctgtttgggctcctgtacctaacttgaatgcagacctcaaaaaattaaactgtagcccagattcatttcggtgtactttgacaaatattccacagacacaggctttactgaataaagctaagcttcctttaggattgttgttacatcccttcagagacctaacgcaattaccagtgataacatcaaataccattgtgaggtgccgatcctgtcgaacgtatattaacccctttgtatccttcattgatcaacgtagatggaaatgcaatttgtgctatagagtaaacgatgttcctgaagaatttatgtataacccccttacccgatcttatggagagcctcataaacgaccagaagttcagaattcaactgtggagttcattgcttcttcagattacatgctgcgtcctcctcaacctgcagtttacttgtttgttttagatgtgtctcataatgcagtggaagctggatatttgacaattttgtgccagtcactcctagaaaatctagacaagcttcctggagattcacgaacaagaataggattcatgacctttgatagcactattcatttctacaatttacaagaaggattatcacagcctcaaatgttgattgtgtctgatatagatgatgtttttctacctacaccggatagtttacttgtgaatctatatgaaagtaaagagcttataaaagacttactgaatgcattaccaaacatgttcaccaatacaagagaaacacacagtgcccttggtcctgcacttcaggctgcctttaaattaatgtctccaacaggtggccgtgtgtctgtatttcagacacagttaccttccttgggtgcaggacttctgcaatccagagaagatcctaatcagagatcaagtacaaaggtggtacaacatcttggccctgcaactgatttttataagaaacttgcattagattgctcgggacagcaaactgcagtggatttgttccttttaagttcacagtattctgatcttgcttctctagcttgcatgtccaagtattctgcagggtgcatctattattatccatcattccactatactcacaatccttcacaagcagaaaagttacaaaaagacctaaaacggtatctcacaagaaaaattgggtttgaagctgttatgagaataaggtgtactaaaggtctttcaatgcacacttttcacggtaacttctttgtccgttctactgatttgttatcccttgccaacatcaatcctgatgctggatttgcggtgcagttgtcaattgaagaaagtttaacagatacttccttagtatgttttcaaacagccctattatatacatcaagcaaaggtgagcggagaattagagtacatacactttgtttgccagtggtaagttcactagcagatgtatatgcgggagtggatgtacaagctgccatctgccttctggcaaacatggctgtggatcggtccgtttcatcaagtctgtcagatgcaagagatgccttagtgaatgctgtagtggactcattgtctgcatatggctcaactgtctcaaatttacagcactctgcattgatggcgcccagctccctcaagttgtttcctctctatgttttggcccttctcaaacagaaagcatttagaacgggtacaagcacacggctggatgatcgtgtatatgccatgtgtcagataaagtctcagccacttgttcatctaatgaaaatgattcatcccaacttatacaggatagacagattgacagatgagggtgcagtacatgttaatgacaggattgtaccacagccacctcttcaaaaattgtctgcagagaagctgacaagagaaggtgctttccttatggactgtggctctgttttttacatttgggttgggaaaggctgtgacaataacttcatagaggatgtgcttggatatactaattttgcatcaataccacagaaaatgacacatcttccagagctagatacactttcatcagaaagagccagatccttcataacttggcttagagacagcagaccattaagtccaatccttcacatagtaaaagatgagagtcctgccaaagcagaattttttcagcatttgattgaagaccggacagaggctgcattttcttactatgaatttttgcttcatgttcagcagcagatttgtaagtgaagtagaataaaattgaataagaaaaagatctataacctaggtaaagcataatctgtcagagaagcgcgtgagaaatttgaaatgaaggcatttgttaatacaagatgcaacgcacagcactctgtctgaggctttggtaaaaagtaaaggggaagaaagaacttgacagatctttttcaactcaaattaatggtaacgatgatgctgtttcaccaagtatattttgaattggtttctacacatttccagtagtatggcagtacagtgctctgttcattgcaagctggcaaatttatgtagctatgtggaatgatatgtcataatgtaaaattagataaattcttttttcttataattaatataacatttctggacttgaactctggcaagagatgccaaaaggcattggtaccgtgttatttgtttatatgaattactttttaacaaggaatgtttcttattcattaaatgaattcaacattttctctgtaaaaacaatagagtttcagtacatgaactatagaaaaaaatctatatataatgtacataaatgttacatttgtaaagaaaatgtaaaaatgtaactatagcatatgaattgcttaaactgtgctgcattgttggatgacaactctttttgtcacagttagagaatgaggttgactaatgcatattatgaattgagtccacaaaggaacacaaaactctttgtaattctgttaaatcttttatgtagatttatttatgatcagcctactaattaaaactatttcgcttgacagtaaaa

SEQ ID NO: 359 - DNA, 2678 bp, Homo sapiens
agcgcggcagcaagcgtgggaacgcgggcggcgagacggcggcaggacggcggcaggatgtgtgaccggaatggtggtcggcggcttcgacagtggctgatcgagcagattgacagtagcatgtatccaggactgatttgggagaatgaggagaagagcatgttccggatcccttggaaacacgctggcaagcaagattataatcaggaagtggatgcctccatttttaaggcctgggcagtttttaaagggaagtttaaagaaggggacaaagctgaaccagccacttggaagacgaggttacgctgtgctttgaataagagcccagattttgaggaagtgacggaccggtcccaactggacatttccgagccatacaaagtttaccgaattgttcctgaggaagagcaaaaatgcaaactaggcgtggcaactgctggctgcgtgaatgaagttacagagatggagtgcggtcgctctgaaatcgacgagctgatcaaggagccttctgtggacgattacatggggatgatcaaaaggagcccttccccgccggaggcctgtcggagtcagctccttccagactggtgggcgcagcagcccagcacaggcgtgccgctggtgacggggtacaccacctacgacgcgcaccattcagcattctcccagatggtgatcagcttctactatgggggcaagctggtgggccaggccaccaccacctgccccgagggctgccgcctgtccctgagccagcctgggctgcccggcaccaagctgtatgggcccgagggcctggagctggtgcgcttcccgccggccgacgccatccccagcgagcgacagaggcaggtgacgcggaagctgttcgggcacctggagcgcggggtgctgctgcacagcagccggcagggcgtgttcgtcaagcggctgtgccagggccgcgtgttctgcagcggcaacgccgtggtgtgcaaaggcaggcccaacaagctggagcgtgatgaggtggtccaggtcttcgacaccagccagttcttccgagagctgcagcagttctataacagccagggccggcttcctgacggcagggtggtgctgtgctttggggaagagtttccggatatggcccccttgcgctccaaactcattctcgtgcagattgagcagctgtatgtccggcaactggcagaagaggctgggaagagctgtggagccggctctgtgatgcaggcccccgaggagccgccgccagaccaggtcttccggatgtttccagatatttgtgcctcacaccagagatcatttttcagagaaaaccaacagatcaccgtctaagtgcgtcgcttgggcgccccaccccgtctgcgtcctgcatccatctccctgttacagtggcccgcatcatgattaaagaatgtggatccctctgtctggggtgggatgccttactttgcacttaatttaataagggcattctcggaggagtagacgtttaatacgaagtggcggcatagccctgccgagatgtcggtgatggcctggatgctgtaaccacaacctgtggctaaaaattttattttctatcctttacccgtcattatcattagttgctatgattctttctgcattttcggttaactatcatttccaaagacttgtcattcagtaatattagcagatagctgcttcgataaaggaatttggagtttaaaaatcaacttgtgaaaacaaggttgtttttgtctttatcgtttgttagagttatagatttatgatttcataggcttgattctatgtgaaatatctttttacttttatgcattttaataagatttaaaaatatttagattaaagccccctttaatgagtacaagaaaaactcttggcttgttagaagaaagtatattctttctagaatttggtgcaggaatatgtgttcatatccaggcaaacgggtgtgtttttatcttcagacaatgaaaccttctcctctggggctttgttgccaggaagattagaactaaatttatttttttcatttctgtcatgaaatcattccagatacctcttttcttctttccaaatggttttcacatgtgtttgaaatatttgtacttcgaattgtcggattttccatgtcctcctttctcctttgtgcccagcctgagtcagcaccaatcccgcattcagaacctcccagtgaaagggcagccttcattttgagaaggtggaaggtgttagggtttgggagacagctcatccaatctcccaagtctcatggtggatttgtgactgtgagagtttccggtttaaaatctgaaaagccagatatgcctgtttccttttcccagcaccatgcctgtggaggggacagtcagacccagaggtcctttacgtgtggatggagttcacaggcgaatagaggagaggaccaggggacgtggcttgtcccttttgtccaacaaagcattatatttttaagaatggcagacctgtttgctgaagtgttcataagataacaataggcttgaatctccaattcaaatgaatgtcaaagcacatatctttaatatgctgaatgaatatttatttttgtatccattaaaacagtatattgatctcttttattctttattaaaataaaatgctcttttttaaaaaaaaaaaaaaaaaaa

SEQ ID NO: 360 - DNA, 4670 bp, Homo sapiens
gctggggcccgacccgggattagttggtttcggagcggaggagggagccccgaccgtcacgagcgtcgaagagacaaagccgcgtcagggggcccggccggggcgggggagcccggggcttgttggtgccccagcccgcgcggagggcccttcggacccgcgcgccgccgctgccgccgccgccgcctcgcaacaggtccgggcggcctcgctctccgctcccctcccccgcatccgcgaccctccggggcacctcagctcggccggggccgcagtctggccacccgcttccatgcggttcgggtccaagatgatgccgatgtttcttaccgtgtatctcagtaacaatgagcagcacttcacagaagttccagttactccagaaacaatatgcagagacgtggtggatctgtgcaaagaacccggcgagagtgattgccatttggctgaagtgtggtgtggctctgaacgtccagttgcggataatgagcgaatgtttgatgttcttcaacgatttggaagtcagaggaacgaagttcgcttcttccttcgtcatgaacgcccccctggcagggacattgtgagtggaccaagatctcaggatccaagtttaaaaagaaatggtgtaaaagttcctggtgaatatcgaagaaaggagaacggtgttaatagtcctaggatggatctgactcttgctgaacttcaggaaatggcatctcgccagcagcaacagattgaagcccagcaacaattgctggcaactaaggaacagcgcttaaagtttttgaaacaacaagatcagcgacaacagcaacaagttgctgagcaggagaaacttaaaaggctaaaagaaatagctgagaatcaggaagctaagctaaaaaaagtgagagcacttaaaggccacgtggaacagaagagactaagcaatgggaaacttgtggaggaaattgaacagatgaataatttgttccagcaaaaacagagggagctcgtcctggctgtgtcaaaagtagaagaactgaccaggcagctagagatgctcaagaacggcaggatcgacagccaccatgacaatcagtctgcagtggctgagcttgatcgcctctataaggagctgcagctaagaaacaaattgaatcaagagcagaatgccaagctacaacaacagagggagtgtttgaataagcgtaattcagaagtggcagtcatggataagcgtgttaatgagctgagggaccggctgtggaagaagaaggcagctctacagcaaaaagaaaatctaccagtttcatctgatggaaatcttccccagcaagccgcgtcagccccaagccgtgtggctgcagtaggtccctatatccagtcgtctactatgcctcggatgccctcaaggcctgaattgctggtgaagccagccctgccggatggttccttggtcattcaggcttcagaggggccgatgaaaatacagacactgcccaacatgagatctggggctgcttcacaaactaaaggctctaaaatccatccagttggccctgattggagtccttcaaatgcagatcttttcccaagccaaggctctgcttctgtacctcaaagcactgggaatgctctggatcaagttgatgatggagaggttccgctgagggagaaagagaagaaagtgcgtccgttctcaatgtttgatgcagtagaccagtccaatgccccaccttcctttggtactctgaggaagaaccagagcagtgaagatatcttgcgggatgctcaggttgcaaataaaaatgtggctaaagtaccacctcctgttcctacaaaaccaaaacagattaatttgccttattttggacaaactaatcagccaccttcagacattaagccagacggaagttctcagcagttgtcaacagttgttccgtccatgggaactaaaccaaaaccagcagggcagcagccgagagtgctgctatctcccagcataccttcggttggccaagaccagaccctttctccaggttctaagcaagaaagtccacctgctgctgccgtccggccctttactccccagccttccaaagacaccttacttccacccttcagaaaaccccagaccgtggcagcaagttcaatatattccatgtatacgcaacagcaggcgccaggaaaaaacttccagcaggctgtgcagagcgcgttgaccaagactcataccagagggccacacttttcaagtgtatatggtaagcctgtaattgctgctgcccagaatcaacagcagcacccagagaacatttattccaatagccagggcaagcctggcagtccagaacctgaaacagagcctgtttcttcagttcaggagaaccatgaaaacgaaagaattcctcggccactcagcccaactaaattactgcctttcttatctaatccttaccgaaaccagagtgatgctgacctagaagccttacgaaagaaactgtctaacgcaccaaggcctctaaagaaacgtagttctattacagagccagagggtcctaatgggccaaatattcagaagcttttatatcagaggaccaccatagcggccatggagaccatctctgtcccatcatacccatccaagtcagcttctgtgactgccagctcagaaagcccagtagaaatccagaatccatatttacatgtggagcccgaaaaggaggtggtctctctggttcctgaatcattgtccccagaggatgtggggaatgccagtacagagaacagtgacatgccagctccttctccaggccttgattatgagcctgagggagtcccagacaacagcccaaatctccagaataacccagaagaaccaaatccagaggctccacatgtgcttgatgtgtacctggaggagtaccctccatacccacccccaccatacccatctggggagcctgaagggcccggagaagactcggtgagcatgcgcccgcctgaaatcaccgggcaggtctctctgcctcctggtaaaaggacaaacttgcgtaaaactggctcagagcgtatcgctcatggaatgagggtgaaattcaacccccttgctttactgctagattcgtctttggagggagaatttgaccttgtacagagaattatttatgaggttgatgacccaagcctccccaatgatgaaggcatcacggctcttcacaatgctgtgtgtgcaggccacacagaaatcgttaagttcctggtacagtttggtgtaaatgtaaatgctgctgatagtgatggatggactccattacattgtgctgcctcatgtaacaacgtccaagtgtgtaagtttttggtggagtcaggagccgctgtgtttgccatgacctacagtgacatgcagactgctgcagataagtgcgaggaaatggaggaaggctacactcagtgctcccaatttctttatggagttcaggagaagatgggcataatgaataaaggagtcatttatgcgctttgggattatgaacctcagaatgatgatgagctgcccatgaaagaaggagactgcatgacaatcatccacagggaagacgaagatgaaatcgaatggtggtgggcgcgccttaatgataaggagggatatgttccacgtaacttgctgggactgtacccaagaattaaaccaagacaaaggagcttggcctgaaacttccacacagaattttagtcaatgaagaattaatctctgttaagaagaagtaatacgattatttttggcaaaaatttcacaagacttattttaatgacaatgtagcttgaaagcgatgaagaatgtctctagaagagaatgaaggattgaagaattcaccattagaggacatttagcgtgatgaaataaagcatctacgtcagcaggccatactgtgttggggcaaaggtgtcccgtgtagcactcagataagtatacagcgacaatcctgttttctacaagaatcctgtctagtaaataggatcatttattgggcagttgggaaatcagctctctgtcctgttgagtgttttcagcagctgctcctaaaccagtcctcctgccagaaaggaccagtgccgtcacatcgctgtctctgattgtccccggcaccagcaggcccttggggggctcacctgaaggctcgaaggcactgcacacttgtatattgtcagtgaagaactgttagttggttgtcagtgaacaataactttattatatgagtttttgtagcatcttaagaattatacatatgtttgaaatattgaaactaagctacggtaccagtaattagatgtagaatcttgtttgtaggctgaattttaatctgtatttattgtcttttgtatctcagaaattagaaacttgctacagacttacccgtaatatttgtcaagatcatagctgactttaaaaacagttgtaataaactttttgatgctagctgtttactggtttttgtttttgatgtcataaatagaccttgtttaatagtcacaagccgttgggatatcatacccagctgaaaaagaacaaactgcttaacataagtatatgtatcgtaataagagttttttaccagctaagtgattcaatgtaagtggtttttaaaataaaatactgtagagatcatggtgaaaaaaaaaaaaaa

SEQ ID NO: 361 - DNA, 7018 bp, Homo sapiens
ggcgggcgcgccgggcggcaggtgtcggcgtcggcggcattcggcggcgatggagcggccctggggagctgcggacggcctctcgcgctggccccatggcctcggcctcctcctcctcctgcagctgctgccgccgtcgaccctcagccaggaccggctggacgcgccgccgccgcccgctgcgccgctgccgcgctggtctggccccatcggggtgagctgggggctgcgggcggccgcagccgggggcgcgtttccccgcggcggccgttggcgtcgcagcgcgccgggcgaggacgaggagtgcggccgggtccgggacttcgtcgccaagctggccaacaacacgcaccagcatgtgtttgatgatctcagaggctcagtatccttgtcctgggttggagatagcactggggtcattctagtcttgactaccttccatgtaccactggtaattatgacttttggacagtccaagctatatcgaagtgaggattatgggaagaactttaaggatattacagatctcatcaataacacctttattcggactgaatttggcatggctattggtcctgagaactctggaaaggtggtgttaacagcagaggtgtctggaggaagtcgtggaggaagaatcttcagatcatcagattttgcgaagaattttgtgcaaacagatctcccttttcatcctctcactcagatgatgtatagccctcagaattctgattatcttttagctctcagcactgaaaatggcctgtgggtgtccaagaattttgggggaaaatgggaagaaatccacaaagcagtatgtttggccaaatggggatcagacaacaccatcttctttacaacctatgcaaatggctcctgcaaagctgaccttggggctctggaattatggagaacttcagacttgggaaaaagcttcaaaactattggtgtgaaaatctactcatttggtcttgggggacgtttcctttttgcctctgtgatggctgataaggataccacaagaaggatccacgtttcaacagatcaaggggacacatggagcatggcccagctcccctccgtgggacaggaacagttctattctattctggcagcaaatgatgacatggtattcatgcatgtagatgaacctggagacactgggtttggcacaatctttacctcagatgatcgaggcattgtctattccaagtctttggaccgacatctctacactaccacaggcggagagacggactttaccaacgtgacctccctccgcggcgtctacataacaagcgtgctctccgaagataattctatccagaccatgatcacttttgaccaaggaggaaggtggacgcacctgaggaagcctgaaaacagtgaatgtgatgctacagcaaaaaacaagaatgagtgcagccttcatattcatgcttcctacagcatctcccagaaactgaatgttccaatggccccactctcagagccgaatgccgtaggcattgtcattgctcatggtagcgtgggggatgccatctcagtgatggttccagatgtgtacatctcagatgatgggggttactcctggacaaagatgctggaaggaccccactattacaccatcctggattctggaggcatcattgtggccattgagcacagcagccgtcctatcaatgtgattaagttctccacagacgaaggtcaatgctggcaaacctacacgttcaccagggaccccatctatttcactggcctagcttcagaacctggagctaggtccatgaatatcagcatttggggcttcacagaatctttcctgaccagccagtgggtctcctacaccattgattttaaagatatccttgaaaggaactgtgaagagaaggactataccatatggctggcacactccacagaccctgaagattatgaagatggctgcattttgggctacaaagaacagtttctgcggctacgcaagtcatccgtgtgtcagaatggtcgagactatgttgtgaccaagcagccctccatctgcctctgttccctggaggactttctctgtgattttggctactaccgtccagaaaatgactccaagtgtgtggaacagccagaactgaagggccacgacctggagttttgtctgtacggaagagaagaacacctaacaacaaatgggtaccggaaaattccaggggacaaatgccagggtggggtaaatccagttcgagaagtaaaagacttgaaaaagaaatgcacaagcaactttttgagtccggaaaaacagaattccaagtcaaattctgttccaattatcctggccatcgtgggattgatgctggtcacagtcgtagcaggagtgctcattgtgaagaaatatgtctgtgggggaaggttcctggtgcatcgatactctgtgctgcagcagcatgcagaggccaatggtgtggatggtgtggatgctttggacacagcctcccacactaataaaagtggttatcatgatgactcagatgaggacctcttggaatagctcttcagaggagctggacccagcatggatggtggaaccacagtacctcttacactccctgtggctccaacttcaggaaataaatttcccattgcgagggacccagctctgtttctgctgcttccatcaaagccaaaaggacctacactaaagaaatgcagggtgggggtggggaaccctgagcacttttttacaattggctctgagaaaaagggagacattttaaattctttaacttcttatttctcgtcctgtctctttgcaaagtatgggcttttttgtttttgttttttaagggaaacgaaatggaattcgaagggaccttttcactaaccccacttctgtgtgttctgcatggcgcctgccccagggcatctgccaactccagtatcagctctcacagtgtacttggtaccatccctgggctctgctggcgagacgaaacagctgtagagatgaaaacaggctgcagaggctggcacagcctggccggcttttctccatctggggacagtcctactccaagaacactgcacaccagctcctcacacagatcccacttactctttttttttttttcagagaccacagaccacagtgatttttcttttcccttgtttaattaggcaatacccttgttaattgccctttggcaactaacttaaccatgtgcttcccacacagtacatcaggaaaacttacagggcaatatttttaacttggggcaggaagaagggagcagcagagaattgactagatatagcacctattaaaagagaactcttgcttcttctgagatttttcaagctgtgctttgtgtgtgtgccagtagacttacgcaaggacagggtacaaacttagctggaagtctgcccaggctgaatgatctcttccctagagttgattgtcgggtacacagtgtgaacccccgaagacggaacctcacagtcttccatgttcccttcttaactgtcgtgtggctcgttgctaaatcatgacaatggctgcctatctgctgcttcttaggttgctgttgtacatggaaccaggactagagattttttcagatttatagacttaaaaaattagaattttattaccaggctttccttctcaccccttttttctgactttgccaagtaatttgttgacacgaaaattttggaggaaccaattgaaaacacacttccagtctagatgatgctttgtgtgatacattaagttcttattttggattaaaagaagttttccatttgatacttctctaaattaaataaattatagaatgtagttgggtggattttggggtggccatatagtaatggaaagctgcaataattagttttaatacagcttgaatatttgctatatagaaatatagtatggaaagtttttggtcttaatgtagctactgtgcgggtcacagtttctcccaatgattatgactgggacattctttggtagataccatttgctactagtttattttgtggctagaaagtcagttttgtgtgtttttttttttttttatttgaagtgccaaattaactttagtcagaatgtgagcagatggctaagttctctcctccccagaatggattaacagctgcgtggaaagtgggggagagagtggatggagacttttagagatgttaaaactgcagtagaatgaaatgagtcagggagcttcagttagaaaataaagttgaggcagtttttgtgaagataatatggttagggctggagtgcactagtctttttgcttattcattttgcatggttttaaaattaaaaataattccgaagatacaccagctcacaaatgaaaacgtcagcctctgccccaccctccctcctgcccaaagtgaatttggtactcagaaaagaactgtttataccactcacctttctcccagcatgtactcactgtgggcagatgcaccaatacatggtaatcctcttactcattttaagacgtaggaaactcaatattcttctctaaccatatacgatagggctcttcgcttttaatgatatctgggatttctgtggaacttggcaaattttcagagcaccttcactcacataatgtcatttgaacctcacaatgttcttgggatggagtcagttgttcagggtccccgtgtgtgtgataagcagtgctggctggctgtcttcagaactcttggaaatctttacacatgcgagtgctaaccactttgagcaaggctgccttcttgtagatgacttgctgttctttatgacagggatcagtggcatttgtttcctagcagtatttagcacctttttgccaccttggtgaacagaaaattgtattttcctgtctttcatggctgaaaacaaaagtaatgggaattttaaatacgtttgcagaaactgcccctcccctcattgagggtcactgctcaagagtgcaggagtggactctccactgatgggtctccctccccatcctggtttccaccccgggctggctagctctgttggtttgaagactgacagccagcctggctcattctcattattggctagttagctttctttatcaacctgctcactcacaaatgtgtgccctcagccagagagtaagaaagcccaaatctgttacagcttctaaaaaaatagatttctaatttgtcctactcatgttaggagcattatctttgaaggtaaaacatagtgtatcattgtgtaaactcccaggcttgatgtagcagaagagatcatttctggaggcttcagcaatggaatttagcattataagagagattggacaaaccagtccaaagtggtccgagttcttaaatccaggtagggaactcactcttctttcttctctggacctaattgggcattgggctttagtgagaccacagaccaggcccgtctctcctgtaggcttttaattcaatggcaactctatttcaaagaataaaagcctttggagagttgcggcagttctgggggcgggctcaggagagtccatagatcagccgtaactggaacgtagaatctacgtctgcctctgaatggacttcccacctcctctctcttgctctgatgcttgcctctgggcctctccatgcccaaggtggtctttcatccttgacaggctggtaatgtgctggccacctccagctcctgcatcgagtctgtaaaccagagctggttctcatggccttcgtcacgataccaggatacggaggggagcccagggccatccatacccaccccagggtaacggggctggcctggcattagtcattatttagtttccaggccaaccatccagatagagattccctctttcctttgagcagtgctctcaagagctccgtgcctgtccacaatgacctagagtgcatcctgctcattgtcagtgtagcccctcgcccctatattcatccaggatacttggaagtgctaaaataggaagggattcggctttcaactttgctaccatcttccctgaagcaggaaaatgaacatggacttaaatgttctttgaaaaaaccaaagttttaagatttgctgtgtgatgaagtgacagggagggccggagtcagcaggtgccagactttctgttctgtctgccatgggtttgtccagctcaggtagctctaggagcaccatcctgccctagcagagcccaggccttgccctcatgaagcatcattgaaatagcaggagcatgttgatttcttggttaggttgcattataataacaagagtcagaacattaattcgaaacaacttgcagtatgcatttcttcacaccagtacattcttaagtgtacttgtttataaggaataacataaactaatctgtacctttatatatatgtgtgtgtacatatatacatatataaactgtatagtgtacatggtaatgatttattgctatgccccagatccttaatgtagttctcatcctccgcatgccctcagccacaagcgggtgactgactgttccctgatgatttggcccacctcctgtgtttggacctctagggaggagggttttggtcatactctccttatcctcgtgcacagaaatgctcagggtccccatgtgcctgttgttcagccctctctcttgttccctttctgagcatgtggtccttccccaggctgtgggacagctgccttcccacgaaagtgtaaagcagtattaagatcattactgcatgtgccctaaaaacccaagttttctattcccttaggacagaaaattgcatgtgaggtgggataatcgagtttcagtgacccacgtcagttacacattaaagccagaccccatgataaaattccacaaaatggaaataaaactcaaatttctttagcattgtgtaaataaatctgaatgtgtttaactttgtactggtaattttctgtatatttggaatatttgggttaaaaataaaacagactggactttgttacctgacctac

SEQ ID NO: 362 - DNA, 3416 bp, Homo sapiens
cagtttcagggtctcgccggcagccccagccggcgggcgcggagcgggcagcggggcccggatcgcaggctcctctgggggccccggagttgggaagcggcgtccgggagcccccggaggaggatgggctgcagacacagcaggctgagcagctgcaaacccccgaaaaagaagcgccaagaaccagaaccagaacagccacccagaccagagccccatgaattaggtcccctcaatggggacacagctataactgtccagctctgtgcatcagaggaggctgagcggcaccagaaggatataaccagaattctccagcaacatgaggaggaaaagaagaaatgggcacaacaggtggagaaggaaagggagctagagcttcgagacagactggatgagcagcaaagggtcctggaaggaaagaatgaagaggccctgcaagtcctccgggcctcatatgaacaggagaaagaagcgcttacccactctttccgggaggccagttctacccagcaggagaccatagacagactgacctcacagctggaggctttccaggccaaaatgaagagggtggaggagtccattctgagccgaaactataagaaacatatccaggattatgggagccccagccagttctgggagcaggagctggagagcttacactttgtcatcgagatgaagaatgagcgtattcatgagctggacaggcggctgatcctcatggaaacagtgaaagagaaaaatctgatattggaggaaaaaattacgaccctgcaacaggaaaatgaggacctccatgtccgaagccgcaaccaggtggtcctgtcaaggcagctgtcagaagacctgcttctcacgcgtgaggccctggagaaggaggtgcagctgcggcgacagctccagcaggagaaggaggagctgttgtaccgggtccttggggccaatgcctcgcctgccttccctctggcccctgtcactcccactgaggtctctttcctcgccacatagggtgcagggcctgggcccaccacgacgcctgaagtcacagctccttccaaggtttttctggagaagacagcaggagcctctcagttcttttccaggaaggaacgagggtgggagcgagatggagatcctgggtgtgtgcccagtgagccctggggccttgagttacatggaatcacccacagggttttggaggccccgagaagcgtcttcccttgagttggccaagggaataagcaagaggagacatttcctccctgccccagcactctgtcccaatccgagaagttccgaggctttcccaggggcagtctgtgtcacgctggccatttgacataaaggagacagcccctggtcccagcttgtcagctctgctgccgacttgctgacttatcaacttcctctaggtgtttccactccaccctggcctgctcagagcctcagtttacccctgcattaaaatggtggggggactggtcaaaggactcttatgtcactgcagtgtcccattctaggattgtctgaaggccagagtaggggttggggggagtgtggacaaaccccgcaaatcagagtggggaaggtgagtggtagagagggggtctctgaaggcccttggggctgacagggccaggcagcctccccagctgaggcatcattcctgggccagagtcgtgtccaccaagggacagtagccagagctcctcttcctttaccaggcaaggtgcatcccctcagccctcctggcccttcagtcttggtgccacctgggcacaggggcaagcttggtggttgtgagtccattcatctatcagagctggaacctcatccctgcacagatgaggaaaccaaggcatggagcagttcccagagtcgaatctagatctcatctgtcatccgggtcttatcctttgctctgtttttctcttcaggctctggaaaatcagatctgtgacttaatcttcctctccctggccctcacccacttagtttctttttcattcctgctccctgccttaactcctcctcccactgcccctgatcccaggcccaggcttttacaacctggtgctcagcttccccatcagtgaaaaggggtggctagagtaactaacctcagcaggccgtccagtcctgatagtctgtggatttcggatccttctcaggaagcttcatgtctaatggagactataattataactcctgttctgcatagagcatttgcatcaaaggctttccatacccctccctcccctggtcctcataagatccttgaagcaggttcctattcctcattggcaacatggcaaacagatcacaggagtcaaagggccttgctcaaggtccccagcttcagccccaggccctaagccagcgtcagaacagtcaatctgcatttttcatcagtcattctatagtgacatcatcccagactgccttctgtattcccctgtgtacagtctccttctgtttctaggtttagaagttcagaggtgactgtgtttctccatttccacagccaaatgggggaagaggtgaggctaggggagtgctgtgctgattctccagccatggtcagacaggtcacccaggagcctcgaggaaagccctggagggaatcacatgtgtactttttcatgaagctttttgcaaagcacatctgcgatacactagtttattgaactaatgtccaggagtagacatgattggtggccaagttatttggggacacctaaacagatcagtgacctgaatgacttctcagaacctttaatatgccaatgtgtgtggcaaacttacaagaagggagctaagtatccagcctctcccaaacctctttgaacaaagcttctgtccctcccacacctctcacctcacaggcacatcaggctgcagaatgcgctttagaaagcattgttttagtccaggcacagtggctcacgcctgtaatcccagcactttgggaggccgaggtgggtggatcacaaggttgggagattgagaccatcctggctaacacagtgaaaccctgtctctactaaaaaaatacaaaaaattagcttggcgtggtggtgggcgcctgtagtcccagcagcttgggaggctgaggctggagaatggtgtgaacccaggaggcggagcttgcagtgagccaagatcgcgccactgcactccagcccgggtgacagagcaagactccgtctcaaaaaaaagaaaagaaaaaagaaagcattgttttaattgagaggggcagggctggagaaggagcaagttgtggggagccaggcttccctcacgcagcctgtggtggatgtgggaaggagatcaacttctcctcactctgggacagacgatgtatggaaactaaaaagaacatgcggcaccttaaaaaaaaaaaaaaaaaa

SEQ ID NO: 363 - DNA, 2789 bp, Homo sapiens
tgggttctgggacaggtgacccggcggcggggcgaggcagctggcggcgtcgcatggagggctctgggggcggtgcgggcgagcgggcgccgctgctgggcgcgcggcgggcggcggcggccgcggcggcggctggggcgttcgcgggccggcgcgcggcgtgcggggccgtgctgctgacggagctgctggagcgcgccgctttctacggcatcacgtccaacctggtgctattcctgaacggggcgccgttctgctgggagggcgcgcaggccagcgaggcgctgctgctcttcatgggcctcacctacctgggctcgccgttcggaggctggctggccgacgcgcggctgggccgggcgcgcgccatcctgctgagcctggcgctctacctgctgggcatgctggccttcccgctgctggccgcgcccgccacgcgagccgcgctctgcggttccgcgcgcctgctcaactgcacggcgcctggtcccgacgccgccgcccgctgctgctcaccggccaccttcgcggggctggtgctggtgggcctgggcgtggccaccgtcaaggccaacatcacgcccttcggcgccgaccaggttaaagatcgaggtccggaagccactaggagattttttaattggttttattggagcattaacctgggagcgatcctgtcgttaggtggcattgcctatattcagcagaacgtcagctttgtcactggttatgcgatccccactgtctgcgtcggccttgcttttgtggtcttcctctgtggccagagcgttttcatcaccaagcctcctgatggcagtgccttcaccgacatgttcaagatactgacgtattcctgctgttcccagaagcgaagtggagagcgccagagtaatggtgaaggcattggagtctttcagcaatcttctaaacaaagtctgtttgattcatgtaagatgtctcatggtgggccatttacagaagagaaagtggaagatgtgaaagctctggtcaagattgtccctgttttcttggctttgataccttactggacagtgtatttccaaatgcagacaacatatgttttacagagtcttcatttgaggattccagaaatttcaaatattacaaccactcctcacacgctccctgcagcctggctgaccatgtttgatgctgtgctcatcctcctgctcatccctctgaaggacaaactggtcgatcccattttgagaagacatggcctgctcccatcctccctgaagaggatcgccgtgggcatgttctttgtcatgtgctcggcctttgctgcaggaattttggagagtaaaaggctgaaccttgttaaagagaaaaccattaatcagaccatcggcaacgtcgtctaccatgctgccgatctgtcgctgtggtggcaggtgccgcagtacttgctgattgggatcagcgagatctttgcaagtatcgcaggcctggaatttgcatactcagctgcccccaagtccatgcagagtgccataatgggcttgttctttttcttctctggcgtcgggtcgttcgtgggttctggactgctggcactggtgtctatcaaagccatcggatggatgagcagtcacacagactttggtaatattaacggctgctatttgaactattacttttttcttctggctgctattcaaggagctaccctcctgcttttcctcattatttctgtgaaatatgaccatcatcgagaccatcagcgatcaagagccaatggcgtgcccaccagcaggagggcctgaccttcctgaggccatgtgcggtttctgaggctgacatgtcagtaactgactggggtgcactgagaacaggcaagactttaaattcccataaaatgtctgacttcactgaaacttgcatgttgcctggattgatttcttctttccctctatccaaaggagcttggtaagtgccttactgcagcgtgtctcctggcacgctgggccctccgggaggagagctgcagatttcgagtatgtcgcttgtcattcaaggtctctgtgaatcctctagctgggttcccttttttacagaaactcacaaatggagattgcaaagtcttggggaactccacgtgttagttggcatcccagtttcttaaacaaatagtatcacctgcttcccatagccatatctcactgtaaaaaaaaaattaataaactgttacttatatttaagaaagtgaggatttttttttttttaaagataaaagcatggtcagatgctgcaaggattttacataaatgccatatttatggtttccttcctgagaacaatcttgctcttgccatgttctttgatttaggctggtagtaaacacatttcatctgctgcttcaaaaagtacttactttttaaaccatcaacattacttttctttcttaaggcaaggcatgcataagagtcatttgagaccatgtgtcccatctcaagccacagagcaactcacggggtacttcacaccttacctagtcagagtgcttatatatagctttattttggtacgattgagactaaagactgatcatggttgtatgtaaggaaaacattcttttgaacagaaatagtgtaattaaaaataattgaaagtgttaaatgtgaacttgagctgtttgaccagtcacatttttgtattgttactgtacgtgtatctggggcttctccgtttgttaatactttttctgtatttgttgctgtatttttggcataactttattataaaaagcatctcaaatgcgaaatcca

SEQ ID NO: 364 - DNA, 3805 bp, Homo sapiens
tccgaggcgtcacctcctcctgtcgcctggccctcgccatgcagaccccgcgagcgtcccctccccgcccggccctgctgcttctgctgctgctactggggggcgcccacggcctctttcctgaggagccgccgccgcttagcgtggcccccagggactacctgaaccactatcccgtgtttgtgggcagcgggcccggacgcctgacccccgcagaaggtgctgacgacctcaacatccagcgagtcctgcgggtcaacaggacgctgttcattggggacagggacaacctctaccgcgtagagctggagccccccacgtccacggagctgcggtaccagaggaagctgacctggagatctaaccccagcgacataaacgtgtgtcggatgaagggcaaacaggagggcgagtgtcgaaacttcgtaaaggtgctgctccttcgggacgagtccacgctctttgtgtgcggttccaacgccttcaacccggtgtgcgccaactacagcatagacaccctgcagcccgtcggagacaacatcagcggtatggcccgctgcccgtacgaccccaagcacgccaatgttgccctcttctctgacgggatgctcttcacagctactgttaccgacttcctagccattgatgctgtcatctaccgcagcctcggggacaggcccaccctgcgcaccgtgaaacatgactccaagtggttcaaagagccttactttgtccatgcggtggagtggggcagccatgtctacttcttcttccgggagattgcgatggagtttaactacctggagaaggtggtggtgtcccgcgtggcccgagtgtgcaagaacgacgtgggaggctccccccgcgtgctggagaagcagtggacgtccttcctgaaggcgcggctcaactgctctgtacccggagactcccatttctacttcaacgtgctgcaggctgtcacgggcgtggtcagcctcgggggccggcccgtggtcctggccgttttttccacgcccagcaacagcatccctggctcggctgtctgcgcctttgacctgacacaggtggcagctgtgtttgaaggccgcttccgagagcagaagtcccccgagtccatctggacgccggtgccggaggatcaggtgcctcgaccccggcccgggtgctgcgcagcccccgggatgcagtacaatgcctccagcgccttgccggatgacatcctcaactttgtcaagacccaccctctgatggacgaggcggtgccctcgctgggccatgcgccctggatcctgcggaccctgatgaggcaccagctgactcgagtggctgtggacgtgggagccggcccctggggcaaccagaccgttgtcttcctgggttctgaggcggggacggtcctcaagttcctcgtccggcccaatgccagcacctcagggacgtctgggctcagtgtcttcctggaggagtttgagacctaccggccggacaggtgtggacggcccggcggtggcgagacagggcagcggctgctgagcttggagctggacgcagcttcggggggcctgctggctgccttcccccgctgcgtggtccgagtgcctgtggctcgctgccagcagtactcggggtgtatgaagaactgtatcggcagtcaggacccctactgcgggtgggcccccgacggctcctgcatcttcctcagcccgggcaccagagccgcctttgagcaggacgtgtccggggccagcacctcaggcttaggggactgcacaggactcctgcgggccagcctctccgaggaccgcgcggggctggtgtcggtgaacctgctggtaacgtcgtcggtggcggccttcgtggtgggagccgtggtgtccggcttcagcgtgggctggttcgtgggcctccgtgagcggcgggagctggcccggcgcaaggacaaggaggccatcctggcgcacggggcgggcgaggcggtgctgagcgtcagccgcctgggcgagcgcagggcgcagggtcccgggggccggggcggaggcggtggcggtggcgccggggttcccccggaggccctgctggcgcccctgatgcagaacggctgggccaaggccacgctgctgcagggcgggccccacgacctggactcggggctgctgcccacgcccgagcagacgccgctgccgcagaagcgcctgcccactccgcacccgcacccccacgccctgggcccccgcgcctgggaccacggccaccccctgctcccggcctccgcttcatcctccctcctgctgctggcgcccgcccgggcccccgagcagccccccgcgcctggggagccgacccccgacggccgcctctatgctgcccggcccggccgcgcctcccacggcgacttcccgctcaccccccacgccagcccggaccgccggcgggtggtgtccgcgcccacgggccccttggacccagcctcagccgccgatggcctcccgcggccctggagcccgcccccgacgggcagcctgaggaggccactgggcccccacgcccctccggccgccaccctgcgccgcacccacacgttcaacagcggcgaggcccggcctggggaccgccaccgcggctgccacgcccggccgggcacagacttggcccacctcctcccctatgggggggcggacaggactgcgccccccgtgccctaggccgggggccccccgatgccttggcagtgccagccacgggaaccaggagcgagagacggtgccagaacgccggggcccggggcaactccgagtgggtgctcaagtcccccccgcgacccacccgcggagtggggggccccctccgccacaaggaagcacaaccagctcgccctccccctacccggggccgcaggacgctgagacggtttgggggtgggtgggcgggaggactttgctatggatttgaggttgaccttatgcgcgtaggttttggttttttttgcagttttggtttcttttgcggttttctaaccaattgcacaactccgttctcggggtggcggcaggcaggggaggcttggacgccggtggggaatggggggccacagctgcagacctaagccctcccccacccctggaaaggtccctccccaacccaggcccctggcgtgtgtgggtgtgcgtgcgtgtgcgtgccgtgttcgtgtgcaaggggccggggaggtgggcgtgtgtgtgcgtgccagcgaaggctgctgtgggcgtgtgtgtcaagtgggccacgcgtgcagggtgtgtgtccacgagcgacgatcgtggtggccccagcggcctgggcgttggctgagccgacgctggggcttccagaaggcccgggggtctccgaggtgccggttaggagtttgaaccccccccactctgcagagggaagcggggacaatgccggggtttcaggcaggagacacgaggagggcctgcccggaagtcacatcggcagcagctgtctaaagggcttgggggcctggggggcggcgaaggtgggtggggcccctctgtaaatacggccccagggtggtgagagagtcccatgccacccgtccccttgtgacctcccccctctgacctccagctgaccatgcatgccacgtggctggctgggtcctctgccctctctggagtttgcctcccccagccccctccccatcaataaaactctgtttacaaccaccggcaaaaaaaaaaaaaaaaaaaaaaaaaaaaaaaaaaaaaaaaaaaaaaaaaaaaaaaaaaaaaaaaaaaaaaaaaaaaaaaaaaaaaaa

SEQ ID NO: 365 - DNA, 3033 bp, Homo sapiens
aacacaactggcacatctcttttctcatctcttgaaaaaaaccaacagagaaaaaagtaccttgagaataaaggtaatgattaatctgtcaggcacaaaagggattgttttggggatttcgggttctaagtcgcagattcaaacaaatagcagcgaacagggaatgacagttccaccagaagacgattaagccacagcctctaattggaacggcatttgtacagtcagagactcttaccagacatctccaggaatctgtgagccattgtcaaaacgtccattttcatctggctgtgaaagtgaggaccacaacaggtaggtattggtagaaacaggagtcctcagagaagccccaagatgcagcctgagggagcagaaaagggaaaaagcttcaagcagagactggtcttgaagagcagcttagcgaaagaaaccctctctgagttcttgggcacgttcatcttgattgtccttggatgtggctgtgttgcccaagctattctcagtcgaggacgttttggaggggtcatcactatcaatgttggattttcaatggcagttgcaatggccatttatgtggctggcggtgtctctggtggtcacatcaacccagctgtgtctttagcaatgtgtctctttggacggatgaaatggttcaaattgccattttatgtgggagcccagttcttgggagcctttgtgggggctgcaaccgtctttggcatttactatgatggacttatgtcctttgctggtggaaaactgctgatcgtgggagaaaatgcaacagcacacatttttgcaacatacccagctccgtatctatctctggcgaacgcatttgcagatcaagtggtggccaccatgatactcctcataatcgtctttgccatctttgactccagaaacttgggagcccccagaggcctagagcccattgccatcggcctcctgattattgtcattgcttcctccctgggactgaacagtggctgtgccatgaacccagctcgagacctgagtcccagacttttcactgccttggcaggctgggggtttgaagtcttcagagctggaaacaacttctggtggattcctgtagtgggccctttggttggtgctgtcattggaggcctcatctatgttcttgtcattgaaatccaccatccagagcctgactcagtctttaagacagaacaatctgaggacaaaccagagaaatatgaactcagtgtcatcatgtagtggcatgctcagctctggatttgcagtcagtttgggattctcttcagaaagatggcatctaagtgtctgtgttcttgtaagcctgaggtggaatccacccagttttgtctgctagccatatgggacatctaattggaaaagcatctgcataaaagtttggaaacaatgaccacttctctaccattgtcccccacccccaccccccagaataacgctgactgtcccctgaaacagccttctctcctgccctgtttatttcatcctcgatgggaattcttgctaggtaagcactaataactcggcatcttgacgatagtcccatttgggtggtttcagctgcactatctgtatgaaatggtgtcaccaaaacccttttcttcagtatcgacaaagattacattctgagtaccaaccaaaccctaaattgaaagacaaaactatggtttcagtcaacatattcatgaattagggagctaatgggttaagcttccagttcccgctatgctactggatttgtataaatactgatattctccaaacctagtggtgtagggagcaagagaatgcagctggaaggcacaaggggaggacattgtggcattcagaaactgcaggagacaagatgaatttgagaagccaaatggaatttttaatggaaaccatttatcagattaatctcttgctctcctgcattttagaggacaccaattaatttcctggtctttagtatataataacctaaaataccattgtaacctcagtcatgaaaaatacatcactctgtctttttagctcaaatgtattttcctaattgcccacttgagaacagacatttgacaagttatatcaacgactgtgcttgtccattattttacacatgccctagaagccaaaactgaaagccactggatcctggtctagctgaatcttcagagtgggaggtctccaaaaagatattaccttattgggcttaacaattcacaaggcactttcacacccattatctaatttaatcctcataatgactatgtgaggcaaatgccacattgcccatttttcagataaagaaacaaaatcttagggaagataagttgagttgtccaagagcacactgaaagttgaatgttatctaatgcattcctctacctttcagaagatcagtagctggctgagaatctttgccaaatcttccttgctagccagaagtggaattggcagcttctagaatatgtacacctctggacaaaatgttcctcaatcttaagatacaaagaccctcattgtctgggtctattcccacacttactgagtacagatgaaggaaagtggtagcaatttaatcataactttcatttgctgaaaaacattatgagaaggcctcccttcctaagccacctctggtcttgctaagtcttgatcttgcttcctgccagcaccaaacattacattcaggggatttcctctggctcagtcttttccccttgaagttctctaatagatgttacttttgacaaaagatcgcctatgagttacaagcaccaggggatgctctacatcaagggatgcaccttcagtcaaactgtcaaaaagcccagaattcccaaaggcattaggtttcccaactgctttgtgctgatatcagaacagcagaaattaaatgtgaaatgtttctgatgacttatgttctacaatctatggacatacgggatttttttttcttgctttgaagctacctggatatttcctatttgaaataaaattgttcggtcattgttgaaaaaaaaaaaa

SEQ ID NO: 366 - DNA, 3246 bp, Homo sapiens
cgccgtttgggccgggaagcgatgtagtagctgccaggctgtcccccgccctgcccggcccgagccccgcgggccgccgccgccaccgccgccatgaagaagcagttcaaccgcatgaagcagctggctaaccagaccgtgggcagagctgagaaaacagaagtccttagtgaagatctattacagattgagagacgcctggacacggtgcggtcaatatgccaccattcccataagcgcttggtggcatgtttccagggccagcatggcaccgatgccgagaggagacacaaaaaactgcctctgacagctcttgctcaaaatatgcaagaagcatcgactcagctggaagactctctcctggggaagatgctggagacgtgtggagatgctgagaatcagctggctctcgagctctcccagcacgaagtctttgttgagaaggagatcgtggaccctctgtacggcatagctgaggtggagattcccaacatccagaagcagaggaagcagcttgcaagattggtgttagactgggattcagtcagagccaggtggaaccaagctcacaaatcctcaggaaccaactttcaggggcttccatcaaaaatagatactctaaaggaagagatggatgaagctggaaataaagtagaacagtgcaaggatcaacttgcagcagacatgtacaactttatggccaaagaaggggagtatggcaaattctttgttacgttattagaagcccaagcagattaccatagaaaagcattagcagtcttagaaaagaccctccccgaaatgcgagcccatcaagataagtgggcggaaaaaccagcctttgggactcccctagaagaacacctgaagaggagcgggcgcgagattgcgctgcccattgaagcctgtgtcatgctgcttctggagacaggcatgaaggaggagggccttttccgaattggggctggggcctccaagttaaagaagctgaaagctgctttggactgttctacttctcacctggatgagttctattcagacccccatgctgtagcaggtgctttaaaatcctatttacgggaattgcctgaacctttgatgacttttaatctgtatgaagaatggacacaagttgcaagtgtgcaggatcaagacaaaaaacttcaagacttgtggagaacatgtcagaagttgccaccacaaaattttgttaactttagatatttgatcaagttccttgcaaagcttgctcagaccagcgatgtgaataaaatgactcccagcaacattgcgattgtgttaggccctaacttgttatgggccagaaatgaaggaacacttgctgaaatggcagcagccacatccgtccatgtggttgcagtgattgaacccatcattcagcatgccgactggttcttccctgaagaggtggaatttaatgtatcagaagcatttgtacctctcaccaccccgagttctaatcactcattccacactggaaacgactctgactcggggaccctggagaggaagcggcctgctagcatggcggtgatggaaggagacttggtgaagaaggaaagtcctcccaaaccgaaggaccctgtatctgcagctgtgccagcaccagggagaaacaacagtcagatagcatctggccaaaatcagccccaggcagctgctggctcccaccagctctccatgggccaacctcacaatgctgcagggcccagcccgcatacactgcgccgagctgttaaaaaacccgctccagcacccccgaaaccgggcaacccacctcctggccaccccgggggccagagttcttcaggaacatctcagcatccacccagtctgtcaccaaagccacccacccgaagcccctctcctcccacccagcacacgggccagcctccaggccagccctccgccccctcccagctctcagcaccccggaggtactccagcagcttgtctccaatccaagctcccaatcacccaccgccgcagccccctacgcaggccacgccactgatgcacaccaaacccaatagccagggccctcccaaccccatggcattgcccagtgagcatggacttgagcagccatctcacacccctccccagactccaacgccccccagtactccgcccctaggaaaacagaaccccagtctgccagctcctcagaccctggcagggggtaaccctgaaactgcacagccacatgctggaaccttaccgagaccgagaccagtaccaaagccaaggaaccggcccagcgtgcccccacccccccaacctcctggtgtccactcagctggggacagcagcctcaccaacacagcaccaacagcttccaagatagtaacagactccaattccagggtttcagaaccgcatcgcagcatctttcctgaaatgcactcagactcagccagcaaagacgtgcctggccgcatcctgctggatatagacaatgataccgagagcactgccctgtgaagaaagccctttcccagccctccaccacttccaccctggcgagtggagcaggggcaggcgaacctctttctttgcagaccgaacagtgaaaagctttcagtggaggacaaaggagggcctcactgtgcgggacctggccttctgcacggcccaaggagaacctggaggccaccactaaagctgaatgacctgtgtcttgaagaagttggctttctttacatgggaaggaaatcatgccaaaaaaatccaaaacaaagaagtacctggagtggagagagtattcctgctgaaacgcgcataggaagcttttgtccctgctgttaatgcgggcagcacctacagcaacttggaatgagtaagaagcagtgcgttaactatctatttaataaaatgcgctcattatgcaagtcgcctactctctgctacctggacgttcattcttatgtattaggagggaggctgcgctccttcagacttgctgcagaatcattttgtatcatgtatggtctgtgtctccccagtcccctcagaaccatgcccatggatggtgactgctggctctgtcacctcatcaaactggatgtgacccatgccgcctcgttggattgtcggaatgtagacagaaatgtactgttcttttttttttttttaaacaatgtaattgctacttgataaggaccgaacattattctagtttcatgtttaatttgaattaaatatattctgtggtttatatgaaaa

SEQ ID NO: 367 - DNA, 2166 bp, Homo sapiens
cggacagaggttccgggaaccagccgggccggggcggggcggggcgagggagaggggcggccgcgcggatcactgaggctgtggcggcactgcgcccggcgctcgcgtccgtccgcccgtccgcccgcccagccatgactgcgccggtccccgcgccgcggatcctgttgccgttgctgttgctgctgctgctaacgccgcctccgggtgcacgtggtgaggtgtgtatggcttcccgtggactcagcctcttccccgagtcctgtccagatttctgctgtggtacctgtgatgaccaatactgctgctctgacgtgctgaagaaatttgtgtggagcgaggaaaggtgtgctgtgcctgaggccagcgtgcctgccagtgtagagccggtggagcagctgggctcggcgctgaggtttcgccctggctacaacgaccccatgtcagggttcggagcgaccttggccgttggcctgaccatctttgtgctgtctgtcgtcactatcatcatctgcttcacctgctcctgctgctgcctttacaagacgtgccgccgaccacgtccggttgtcaccaccaccacatccaccactgtggtgcatgccccttatcctcagcctccaagtgtgccgcccagctaccctggaccaagctaccagggctaccacaccatgccgcctcagccagggatgccagcagcaccctacccaatgcagtacccaccaccttacccagcccagcccatgggcccaccggcctaccacgagaccctggctggaggagcagccgcgccctaccccgccagccagcctccttacaacccggcctacatggatgccccgaaggcggccctctgagcattccctggcctctctggctgccacttggttatgttgtgtgtgtgcgtgagtggtgtgcaggcgcggttccttacgccccatgtgtgctgtgtgtgtccaggcacggttccttacgccccatgtgtgctgtgtgtgtcctgcctgtatatgtggcttcctctgatgctgacaaggtggggaacaatccttgccagagtgggctgggaccagactttgttctcttcctcacctgaaattatgcttcctaaaatctcaagccaaactcaaagaatggggtggtggggggcaccctgtgaggtggcccctgagaggtgggggcctctccagggcacatctggagttcttctccagcttaccctagggtgaccaagtagggcctgtcacaccagggtggcgcagctttctgtgtgatgcagatgtgtcctggtttcggcagcgtagccagctgctgcttgaggccatggctcgtccccggagttgggggtacccgttgcagagccagggacatgatgcaggcgaagcttgggatctggccaagttggactttgatcctttgggcagatgtcccattgctccctggagcctgtcatgcctgttggggatcaggcagcctcctgatgccagaacacctcaggcagagccctactcagctgtacctgtctgcctggactgtcccctgtccccgcatctcccctgggaccagctggagggccacatgcacacacagcctagctgcccccagggagctctgctgcccttgctggccctgcccttcccacaggtgagcagggctcctgtccaccagcacactcagttctcttccctgcagtgttttcattttattttagccaaacattttgcctgttttctgtttcaaacatgatagttgatatgagactgaaacccctgggttgtggagggaaattggctcagagatggacaacctggcaactgtgagtccctgcttcccgacaccagcctcatggaatatgcaacaactcctgtaccccagtccacggtgttctggcagcagggacacctgggccaatgggccatctggaccaaaggtggggtgtggggccctggatggcagctctggcccagacatgaatacctcgtgttcctcctccctctattactgtttcaccagagctgtcttagctcaaatctgttgtgtttctgagtctagggtctgtacacttgtttataataaatgcaatcgtttggagctgctgccccctttcttcctggcctcggctgctggaattggaatcaggctgtactctttccatccatttgggcttct

SEQ ID NO: 368 - DNA, 807 bp, Homo sapiens
gcgctcgggctgccgctggctcttcgcacgcggccatggccgactccgagctgcagctggttgagcagcggatccgcagcttccccgacttccccaccccaggcgtggtattcagggacatctcgcccgtcctgaaggaccccgcctccttccgcgccgccatcggcctcctggcgcgacacctgaaggcgacccacgggggccgcatcgactacatcgcaggcctagactcccgaggcttcctctttggcccctccctggcccaggagcttggactgggctgcgtgctcatccgaaagcgggggaagctgccaggccccactctgtgggcctcctattccctggagtacgggaaggctgagctggagattcagaaagacgccctggagccaggacagagggtggtcgtcgtggatgatctgctggccactggtggaaccatgaacgctgcctgtgagctgctgggccgcctgcaggctgaggtcctggagtgcgtgagcctggtggagctgacctcgcttaagggcagggagaagctggcacctgtacccttcttctctctcctgcagtatgagtgaccacagggcctcccagcccaacatctccagctggatcccagggaaatatcagccttgggcaactgcagtgaccaggggcaccggctgcccacagggaacacattcctttgctggggttcagcgcctctcctggggctggaagtgccaaagcctggggcaaagctgtgtttcagccacactgaacccaattacacacagcgggagaacgcagtaaacagctttcccacaa

SEQ ID NO: 369 - DNA, 5199 bp, Homo sapiens
agggacgggaagtgggcggggccggccggcagcagcttgcgggacacggagccgcgaggagacagctgaggcccgcggagaccagggggtgaagcctggagaccctcttgccctggcctagctgcaggcccccgggatgctttgggcatgtcctctggagccccacagaagagcagcccaatggccagtggagctgaggagaccccaggcttcctggacacgctcctgcaagacttcccagccctgctgaacccagaggaccctctgccatggaaggccccagggacggtgctcagccaggaggaggtggagggcgagctggctgagctggccatgggctttctgggcagcaggaaggccccgccaccacttgctgctgctctggcccacgaagcagtttcacagctgctacagacagacctttccgaattcaggaagttgcccagggaggaagaagaagaggaggaggacgatgacgaggaggaaaaggcccctgtgaccttgctggatgcccaaagcctggcacagagtttctttaaccgcctttgggaagtcgccggccagtggcagaagcaggtgccattggctgcccgggcctcacagcggcagtggctggtctccatccacgccatccggaacactcgccgcaagatggaggaccggcacgtgtccctcccttccttcaaccagctcttcggcttgtctgaccctgtgaaccgcgcctactttgctgtgtttgatggtcacggaggcgtggatgctgcgaggtacgccgctgtccacgtgcacaccaacgctgcccgccagccagagctgcccacagaccctgagggagccctcagagaagccttccggcgcaccgaccagatgtttctcaggaaagccaagcgagagcggctgcagagcggcaccacaggtgtgtgtgcgctcattgcaggagcgaccctgcacgtcgcctggctcggggattcccaggtcattttggtacagcagggacaggtggtgaagctgatggagccacacagaccagaacggcaggatgagaaggcgcgcattgaagcattgggtggctttgtgtctcacatggactgctggagagtcaacgggaccctggccgtctccagagccatcggggatgtcttccagaagccctacgtgtctggggaggccgatgcagcttcccgggcgctgacgggctccgaggactacctgctgcttgcctgtgatggcttctttgacgtcgtaccccaccaggaagttgttggcctggtccagagccacctgaccaggcagcagggcagcgggctccgtgtcgccgaggagctggtggctgcggcccgggagcggggctcccacgacaacatcacggtcatggtggtcttcctcagggacccccaagagctgctggagggcgggaaccagggagaaggggacccccaggcagaagggaggaggcaggacttgccctccagccttccagaacctgagacccaggctccaccaagaagctaggtggtttccaggcccctgccctccccttcctcccatccttgtccttctctccctcagaagcctcaggacccaacaggtggcaggcagtggacagggtgcccgccccacagtgctttccccagcaccccagagccagtcgggacaccccccgcagcccgtcctggtggctgtggaactgcactgggtggcgggcagatggtggaaggcagcttaggagacctcaccaaagagaagatggaccggctcttgctcccagctcctattaggcccggggtgggaccagaggtcataggtgcccaacggcagccaaaccaaagacactggtgtgcatggggcagcatggttgtgcacgtgggaccctggggcggacccaggagccaaactcttgaagcaccccctgggtcaggcccagcagcggagtggccagccccagtttcccattgctcctctctgcggccagggccaggtgggttcatatttacagatatgcccagccagtcctggtcggccacaccagtgtcccaaagaggagagcgcagcagagccaggggtctgttctgtagcagccacccccctgcccccactccagggcagccatgatgtgcttgggcccaccagggccttccgggctgctctcttccctgagcccggaaccggcgacgcacatgtgtcttttgttggtgtgtttgtttttttccagggaggtctaattccgaagcagtattccaggttttctctttgttttatcagtgccaagatgacctgttgtgtcatataatttaagcagagcttagcatttattttattctttagaaaacttaagtatttacttttttaaagctatttttcaaggaacctttttttgcagtattattgaatttattttctaaatcaggattgaaacaggaacttttccaggtggtgttaataagccattcaagtgccttacacagctttgaagaaactaggactgcagtgggctcggataggcccattgaggtttttagaaaagcaggatttgttttgttagggaggcatgattttggtgagatctttctggaagagttttccgcctctttgtgatgctgaacacccccaaggttctcccctccccccgctgcccaggtgactggcaggagctgcgactgccacgtagtggtgcctgggcccgacagcggggctctgggcatcccgggtgaccttggcccatctgcctgcattcccacccccttgggcctggctggatcccaggcagagggaccttgctgctgtgtgattggaacattcccaaatatcttgtgaatttgtaatcaaattggtctcattgggaaagactcttaattaagaggctcaggcaagcacagaggcagcccgtgggtctctgtctcagtctggaggcagcagggatgctgctgggagtccatggcacaggccacagcccctcaccttgccgcggtggctggcagcacgcctgccttgctctgccccatgccctgaacaggcatgagagctccacgtcccctagtgcaccctgagagggggctcacaagtgaccgatcctgggtgcctcagggagctcactgagggcgtgcaaagttgaaagtggcaaggctgggggagggtgtcgggtagagggaagagggcagggggctaggggaggactcagaggccatctgcagggccaagccacaggaagggctgagctggaggtgggcagggctgctccaggcaggtcagagcagtgcagggggaggagaggagaaagggaggaagctgggctgtgtggtccccatgaaggcattcagagtccacctgcagacagcgagagccccaggaaggtttgcacagctgtgccccaagcaccttggcctcctctcagctcgccgaggaggcacgctagagccgccttcccggtgggagccctctgtcccacagggagcggggagccagctttgctggggccctacctgcatgcccagccttacccctcattctcacagcacagatgaggttgagaccatgcagtcaatgcattgcttaaggtctcttatttacaaaaaaaaaccttaaacatagtcgctgtcattcagacattcagagaatggttggccacaaacaatgaccaagtattgcttggcttaacttgaaggcctgctgtctccttctgggggtcagggacgcagctccaccctcaccactagcccaccctgcccgtgggcataaccttgacgaagagagagaatgattggcatctgcttttctcttttctttgctaataattctgttcctggctgccgagagtgaagtttcaccatgtggaggtttggctcctatcacctggtggtctgattcataccctagcctgaggctccactggaagatctcgcagcctcagtgtatgggaaaccctttccccaggcttgtcccagcactgccgctccccacccctgagccaggaccccagaggatggccatgccccgtgcctggcagaggtctggtgccagcactgggagctgctccgcccttgccttggggccgagggagccctcgtccacccctgcacagcagctgggcacagaggagcgctcttccatcttgaccaggactgcaccaagaagcaccaggtgtcttcagcctccaacctccggggcgaccttctcttccagccacagtcccatgagggcccctagccagggacactggtctgtaaattgtaatcctttctccagcccagctctccacttgttccttgtgtgagctgagcaggcagtgcacctctgagtgtcccttttgtaaggcccaggggttgcactgagtctgcagaggccgcgacctcctagaacgctgtgggtgcaggtgagccggcgtgtcctggggagatgctgccagcacacaggggccctcctgctgccagcaggttggggtggttaagtcttattagtgtctattcttaaaattaagtgggctggagaagaatggagctccacatgccagcaccgtatatggaatacaaaagctggggaagcagggcctgccttacaggtgtggctgactctgagcccaggcctgcaggggtggagggcagtccctcagaatcccagaggcagtcccagcctcagaacccaggataggaaatgggtgtgtttagtggggaaagggacggggtgcagacggcagggccagtatggggccccctccctctcctctcctctcctatggtgagcccagcgtgggcaccgggccgtctcagccgtgttcccagggctgggaggacagctctggcccttcttaggcctagcctcgtcccaagctaaatgtaagccagttgggctgtgttaaaggaagcagtgtttttggttcgattctgcctctgtagctcaaggggggcagcccccagagtcctgtgcattctgccaaggctccatagctttgccaaatgcacggagctctgccattccggtgcagtgcaggccttgcgaagggtttatctgcgttcgtctcggtgggcttctcctgcatgggagttgtgttcctgtgcaagggggagctttgctccaggacaggatgactgtcttccctattcttagggacaagtcccaagatgccagaaaggcagtctcccaaggacccaccatgcagaagtgtcaataaaccacaagttctgaactctgtaaaaaaaaaaaaaa

SEQ ID NO: 370 - DNA, 3011 bp, Homo sapiens
gcagcagctgcggcggcggcggcgtttgagtggaggaagatggcggctccgggcggctcggggtcccgccagctgtgaggagccccgagcacggctgtcgcggcctgaggcagagcgcctctgctctggccctgtccctggctccctcattaccgtcgccagcggagcgaacccgagagcgtggagcgggctgggccagctgttgagtggaatgtcatggccagctcctcagacagtgaagatgacagtttcatggctgtggaccaggaagaaactgtgctggaagggacaatggatcaagatgaggagccccacccagtattggaggctgaggagactagacataataggtccatgtcggagctgccagaagaggttttggagtatatcctgtcctttctctcaccgtatcaggaacacaaaactgcggcccttgtctgcaaacagtggtatcgacttatcaaaggtgtagcccatcagtgttatcatggtttcatgaaggctgtccaggaaggaaacattcagtgggagagccgtacctatccttatcctggaaccccaatcactcagcgcttctcgcacagtgcatgctattatgatgctaatcagtctatgtatgtgtttggaggctgtacccagagcagctgcaatgctgctttcaatgacctctggagacttgacctaaacagcaaagagtggatccgacctttggcttcagggtcctatccttcccccaaagctggagcaactctggtcgtgtacaaggacttgctagtgctgtttggtggctggacgcggccaagcccttatcccctacaccagccagagagattctttgatgaaatacacacttactcaccctctaaaaattggtggaactgcattgtgacaacccatgggccacctcccatggctggccactcctcctgtgtgatagatgataaaatgattgtctttggtggctctttaggatcccggcaaatgagcaatgatgtctgggtccttgaccttgagcagtgggcgtggtccaagccgaacatctctggccccagtcctcatcctcgaggtggccaatctcagattgtcatagatgatgcaactatcttaatcctcggagggtgtggcggtcccaatgctctattcaaggatgcttggttgttgcacatgcattctggtccttgggcctggcagccactcaaggtagaaaatgaagagcatggggccccagaactgtggtgccatccagcttgccgggtgggacagtgtgtggtggtcttcagccaggctcctagtgggagagccccactcagccccagtttgaactctcgcccatcacctatcagtgccactcctccagctctcgttcctgaaacccgagagtaccgctctcagtctccagtaagaagcatggatgaagctccttgtgttaacggccgctggggaacactgagacccagggctcaaaggcagactccttcaggttcccgggaagggagcctttccccagccagaggagacggctctcctatcctcaatggtgggagtttgtctccaggaacggcagctgtgggtggctcttctttggacagtcctgtacaggccatatctccaagtactccatctgctcctgaaggatacgacctgaaaataggactttctttggccccccgacgaggatcactaccagatcagaaagatctgagattaggatccatagatctgaattgggatctgaaacccgcttccagtagtaatcccatggatggcatggacaataggacagttgggggaagtatgagacaccctcctgaacagacaaatggtgtgcataccccacctcacgtggccagtgcccttgcaggggccgtctccccaggtgccctgcgtcggagtctggaagccatcaaagcgatgtcctccaaaggcccctcggcctctgcagcactaagtcctcctcttgggtcttctccaggctctcctgggagccagagtttgagcagtggagaaacagtgcccatccctcgcccagggcctgcccaaggagatggacattccttacctcccattgctcgccgcctgggccaccaccctccacagtccctaaatgttggcaaacccctataccagagtatgaactgcaagcccatgcagatgtacgtgctggacattaaagacaccaaggagaaggggcgggtcaaatggaaagtatttaatagcagttctgtggttggacctcctgaaaccagcctgcataccgtggtacaaggcaggggtgaactcatcatatttggaggactcatggacaagaaacagaatgtgaagtactatccaaaaacaaacgccttgtactttgtacgagcaaagagataatgtgttctaaacccctttccttttctgtggcttttaatttggaattttccagtgtgtaagcatttggactgagaattgggaaaacaaaattactcccagaagccaaaactctttaattcccaaccgaagtcactccaggctgggatcaaatctccattaagaaaaaaaattatatataaatatatatatatatattatatagccaactctgttgacaaaaaaagggagagatttccatcctggttcagataaagttgttgctgtgttttaacaggggctgggctgcctttttctaccttgctggtaactagaccaagaagttagagaatagactaacatcagtaacttcccaaaagaaactgaagagccccctgtaaatctttatgtggccttcttggagttaaaaaatgaaagggcatatgtaagttgcaaaggtggagggttttagactctcatgcttcaggtgctgtcggggtaaaagtaactgtttttccccttctcttaaaaccacagaggacctgtgacagctctgcagaaatgccagtgcctggccccctcttgccttttatggctgaggaaagttacccaacaaaggattttattccaaaaaaaaaaaaaaaaaaaaaaaaaaaaaaaaaaaa

SEQ ID NO: 371 - DNA, 2435 bp, Homo sapiens
gcccgccgcgcagcttccccgagcgagaccaaaacaggtggaatccgggctggagccggagctccggcggcgcgggtggcggcacgtccctccagacagtaccacaggcacctggagtaccggcatcggtcgctgtggcccccgagtgtccgtcagagcctaggggagcctgccctcccgcgcctcgtcggggcccggccaggcaccttggccgccggcgcacggacgcgggcacgagcactagatcacggctgctggacctcggcacgttgacaagatttctctggggtaccgcggaggattactttgaatttcggtggtcgcctgtggtctggcatatttagaacttaagtctattatttcgggcaccatgactttgaggcttttagaagactggtgcagggggatggacatgaaccctcggaaagcgctattgattgccggcatctcccagagctgcagtgtggcagaaatcgaggaggctctgcaggctggtttagctcccttgggggagtacagactgcttggaaggatgttcaggagggatgagaacaggaaagtagccttagtagggcttactgcggagactagtcacgccctggtccctaaggagataccgggaaaagggggtatctggagagtgatctttaagccccctgacccagataatacatttttaagcagattaaatgaatttttagcgggagagggcatgacagtgggtgagttgagcagagctcttggacatgaaaatggctccttagacccagagcagggcatgatcccggaaatgtgggcccctatgttggcacaggcattagaggctcttcagcctgccctgcaatgcttgaagtataaaaagctgagagtgttctcgggcagggagtctccagaaccaggagaagaagaatttggacgctggatgtttcatactactcagatgataaaggcgtggcaggtgccagatgtagagaagagaaggcgattgctagagagccttcgaggcccagcacttgatgttattcgtgtcctcaagataaacaatcctttaattactgtcgatgaatgtctgcaggctcttgaggaggtatttggggttacagataatcctagggagttgcaggtcaaatatctaaccacttaccagaaggatgaggaaaagttgtcggcttatgtactaaggctggagcctttgttacagaagctggtacagagaggagcaattgagagagatgctgtgaatcaggcccgcctagaccaagtcattgctggggcagtccacaaaacaattcgcagagagcttaatctgccagaggatggcccagcccctggtttcttgcagttattggtactaataaaggattatgaggcagctgaggaggaggaggcccttctccaggcaatattggaaggtaatttcacctgagtctcagggaaccacgaagggatatggcaatgagtagagcatgaaggtagaacagtctatatactcttgtgacacatacaatccctaccttgtgctgccaagtaactcatttttgtgcaattctcagtataagccctttgtcgtttctgtgcctatttaaagtctcctaaaggtgtaattgactaggaaggatgtagttctacactgccatttacctatttaaattcatccttgtgaatatctttgttgttgttgttgagacagagtctcgctctgtcacccaggctggagtgcagtggcgtgatcttggctcactgcatcctccgccttccaggtttaagctattctcctgcctcagttgcccgagtagctgggactacaggcatgtgccaccacgcccagctaagttttgcattatcagtagagacggggtttcaccatgttggccaggctagtttcgaactcctgacctcaagtgatccacctgcttcggcctctgaaagtgctgggattacaggcgtgagacactgcgcccagcctcatccctgtgaatttcttattgtacacaagttctttcactatctgtgtgcagtgctctgaggggacagacaaggcttgggtgtatatgccaaccagatctcattgaagtatcagcttgtttggtactaggtgcaagtgtagcatgtcacatgtgaccatgttggatcattgacaatttttaggtatgtactgacctacatttatgatgaagatcctgagcggaggttaagatattaagttattttccatatgaatcagaattatattgattctgtgcaatcaaaacaaaaggcagaatagaatgctgagattggttaagtttgcaatgaccatcttgaaccacagatttctgctatgtgtcatcaaaacatctagttctgagtaacattttcacgattgttataaaattataggtgtgaacttctaaaataaaggaatgctaataaaatgaaaaaaaaaaaaaaaaaaa

SEQ ID NO: 372 - DNA, 1404 bp, Homo sapiens
atgcgcgatctcccggagcatgcgcagcagcggcgccgacgcggggcggtgcctggtgaccgcgcgcgctcccggaagtgtgccggcgtcgcgcgaaggttcagcagggagccgtgggccgggcgcgccggttcccggcacgtgtctcggcacgtggcagcgcgcctggccctgggcttggaggcgccggcgccctggatccgccggccgtggtcgccgagtcggtgtcgtccttgaccatcgccgacgcgttcattgcagccggcgagagctcagctccgaccccgccgcgccccgcgcttcccaggaggttcatctgctccttccctgactgcagcgccaattacagcaaagcctggaagcttgacgcgcacctgtgcaagcacacgggggagagaccatttgtttgtgactatgaagggtgtggcaaggccttcatcagggactaccatctgagccgccacattctgactcacacaggagaaaagccgtttgtttgtgcagccaatggctgtgatcaaaaattcaacacaaaatcaaacttgaagaaacattttgaacgcaaacatgaaaatcaacaaaaacaatatatatgcagttttgaagactgtaagaagacctttaagaaacatcagcagctgaaaatccatcagtgccagcataccaatgaacctctattcaagtgtacccaggaaggatgtgggaaacactttgcatcacccagcaagctgaaacgacatgccaaggcccacgagggctatgtatgtcaaaaaggatgttcctttgtggcaaaaacatggacggaacttctgaaacatgtgagagaaacccataaagaggaaatactatgtgaagtatgccggaaaacatttaaacgcaaagattaccttaagcaacacatgaaaactcatgccccagaaagggatgtatgtcgctgtccaagagaaggctgtggaagaacctatacaactgtgtttaatctccaaagccatatcctctccttccatgaggaaagccgcccttttgtgtgtgaacatgctggctgtggcaaaacatttgcaatgaaacaaagtctcactaggcatgctgttgtacatgatcctgacaagaagaaaatgaagctcaaagtcaaaaaatctcgtgaaaaacggagtttggcctctcatctcagtggatatatccctcccaaaaggaaacaagggcaaggcttatctttgtgtcaaaacggagagtcacccaactgtgtggaagacaagatgctctcgacagttgcagtacttacccttggctaagaactgcactgctttgtttaaaggactgcagaccaaggagcgagctttctctcagagcatgcttttctttattaaaattactgatgcagaacatttgattccttatcatttc

SEQ ID NO: 373 - DNA, 2096 bp, Homo sapiens
cccagtcttgctgtctttcaatggggcagccactgctcagttgctgccattcagaaatatgaacccagtatcaccagaacttttgatttttcaagagaaaccaagattccagatttgtaggtgatatcttccatttttcagataaaacaaaggaaccagaaccacatccactgatcggatttgcctggggaggaggggtgctctctcctttgatcttctcttctggaagagatggaccaaaagcctctccagcaataatccgaaatgattcttgaagactatctttccagcttgtcacatatgcaaggtgtatttacaggagacagcaatggaaacctggtcagttgagcaggtctgcagttggttggtggagaaaaatttaggagagctagttcatagatttcaagaggaagaagtaagtggggccgctcttcttgcacttaatgatcggatggttcagcaactggtaaagaaaattgggcaccaggctgttctgatggatttaattaaaaaatacaagcagaacactcaaggactgaagtccccagaaaaccccaaaaaggcagccctggtcatgcaaacagaagcagctcgagattacagggatgaagagtcctccagtccagccaggcatggggagcagatgccatctttctatccagctgaaaaccttgataatggactaattgaccaaagagtattgaaacagagaagaaatgtgaaacaaattctagcaagaagcaaagcattacagtggacgaagtcctatgttttaccagagtttccctatgatgtcaaatgcatgttagcagagcagaagtgcccggatcacagcatgaggataaggatcattgagtttctccaggccgacatgactaagtatctggaaggctcactgtaccccagcacccagcagtacaatgacgtggttaatgccctgctgcaggcccaccctttcctggatgaggatggctgtggcttctttttatggaaacgagccctcaaagatcgctttaaatatgttcgaagacccatagaagatgatgagcaagtgattagaaataagtgtaaatttggacaccgaagaggccagacaaggaaatctcttgctgatataagatttgatgaaattaaacttgtccagataaaagaagaagctgtttgttttgattctgagctagatgaacatattaagtggttccagcaagaatacgtgaaaacagaaaaggactggagagaaattgacaagagaatgagccaaactttggaaataagaagaaagatgattggcagccgaacacctctgaaggacattcttaaactgtttcctttcttgaagtgcccttatcagatgttcagagaattccaacttcttacaagaacagatatttataagaaaacaaggcacattttggaatcctattcagaaaatatactgacttctttttcagtggtggacaatccaatcaatattgtattgcaagaaaaaatgaaacattacacagatgaagacatgttgaaatacatgaagatgacagccacatgtttactcctcccagatgtttttggggatgatcccagcctttttgtcatcatgaatgaacaggtgcaagtgtccacacctgtgttggaagttaaaaaccctttcaacatggaggtctgcgaattttctttatatttagaaagggagaggctcacaaaggtggacgactgtgttacagccttggctgcgctagtagctgcctttcatgtatttaggattgagtgtccaagaagactgtcccaaactttcaacttcctagaaacgctgattttcgatatgcacagtccttattttccttctttgaaagaaaaggaaaacgaagtaggatttcagcacccactcacttaatagcatgccaaatattgtactggaatttacctctgggaaaactgaagcttcataagaaattgttttgatttagggttgtggtagaggtaggtatgagaaaatcatcttgtatttatagatgctaatgaatttcaatgctttctatctttacacttagatattaagttctttgtgaaattctgtaataaaattctacttcattaaa

SEQ ID NO: 374 - DNA, 2428 bp, Homo sapiens
gctgccgactccattttgtcggtagaggcagaaggagaaggtcgggttgtagaagctggggtggccggcagctcgctcatcggtgttcgtgggctttgtcggtccgtgcctcgtctctccctggaaagggagggaggcttcgacgtcgagagggagccgctgccgcgttagttccgagcttgaagtcactaggacttctctcaaacttgtgtgctgaggagactcagatgttggcctcagctcctaggctgaactcagcagatcggcccatgaaaacttctgtattgagacaaaggaagggatctgtcagaaagcaacacttgttatcttgggcttggcagcaaggaagaggacaggtagtggagatcctgcaatctgaaaagcagactgaaaggtgacaaagaagctgaagatgggtggtggagagaggtataacattccagcccctcaatctagaaatgttagtaagaaccaacaacagcttaacagacagaagaccaaggaacagaattcccagatgaagattgttcataagaaaaaagaaagaggacatggttataactcatcagcagctgcctggcaggccatgcaaaatggggggaagaacaaaaattttccaaataatcaaagttggaattctagcttatcaggtcccaggttactttttaaatctcaagctaatcagaactatgctggtgccaaatttagtgagccgccatcaccaagtgttcttcccaaaccaccaagccactgggtccctgtttcctttaatccttcagataaggaaataatgacatttcaacttaaaaccttacttaaagtacaggtataaaataagacaaatgtttaaatttagttatgttcacggatagttgtcaattggtctgaaacaaattcgctagggaatctatttgtgtagaactaattaatgtaaaaaaaatagaccatctcgtgttgtgtgcactgtgatataatggtagtatcagtgcaacttaaactaatgattgtacttgatattaagtgttctcaactgagtaacttttaagtggaaaccaagtttagatttggggagtggtaaaggaatcagctttttctattgttaggggaagacagtaatttatcattcatggaccagtagattgttgaaagttggtgaatcggattataagcttctagctaacacaaggattcagaattaggtaaacatctgaaggtttagtatattagaaacacccaaaccagtaatatgctaacctgatgcactgctgaaagaaaatgtgaatttttcgtaataattgcattttagtgaattgtacagtgggtggaaagggcatttggagctcattagaatgagacatagtacaccccaatggccctgtttattaaatgtagtggattaagtgtctgtcaacaaatacaccaaaaccattttttatagaaacagtatttaatggtcactcaatagctttcaaaatacatttttgtattacagcactgcacaagctattctaatagtgctctggcctcatcattcctgcaaagcttgctttggggagttggataatgtgaaaattttaagtacctaggggagaaagagccatgtaaatatctgtaataaacttgtagcatatgtaaagttttcttggcctttatcttacaaaaatggagtattttagtatgaatttgctgaatgtaagaccgtggactgttttttataatatggcctaattttaaaggtccaaaataacttgtttttaaagtttgcccttgtgctaaagtgccagtgtatgtatgttatacttgatttggttgtaaactatatttcaaagtaaaccctagtgtaataagttttataactaaaaaggtttaagctgctaaaactatttttaagagatgtgaaatgcagtatgggactatctttttttcctcctctaagcccaaagattaactagagtccctccaaccttatagattgttggctttcacaatcttataacctaggatacaggtagtttcgagtatggtgccagtgatgttttgtttttgtttggtcaaggggtaggtgcaacccaatggaccacttatgcaaaagatgtaaactcttgcataatacattgataacatgttttgccaactttaaatgcttaaacataagcgaaaccagtagcaagtatgtgggtcagcttaaaaattttgattgttaatgccctattttctaatttggcacctcttgatgcctaagcaggtaagcagatgcctaagctgtatttctccaaataaatcaagatgaagtactgcccaagttaaatattgatagcctaaagacaagtttatgtagtacttaatgtacatgatatgaatgtgaagcataaaattaaataaaatttttccccattggcttggttttattttaaaaaaaaaaaaaaaa

SEQ ID NO: 375 - DNA, 3689 bp, Homo sapiens
aagatctcataaaatctatgctgaggaatgagcgacagttcaaggaggagaagcttgcagagcagctcaagcaagctgaggagctcaggcaatataaagtcctggttcacgctcaggaacgagagctgacccagttaagggagaagttgcgggaagggagagatgcctcccgctcattgaatgagcatctccaggccctcctcactccggatgagccggacaagtcccaggggcaggacctccaagaacagctggctgaggggtgtagactggcacagcaccttgtccaaaagctcagcccagaaaatgacaacgatgacgatgaagatgttcaagttgaggtggctgagaaagtgcagaaatcgtctgcccccagggagatgcagaaggctgaagaaaaggaagtccctgaggactcactggaggaatgtgccatcacttgttcaaatagccatggcccttatgactccaaccagccacataggaaaaccaaaatcacatttgaggaagacaaagtcgactcaactctcattggctcatcctctcatgttgaatgggaggatgctgtacacattattccagaaaatgaaagtgatgatgaggaagaggaagaaaaaggaccagtgtctcccaggaatctgcaggagtctgaagaggaggaagtcccccaggagtcctgggatgaaggttattcgactctctcaattcctcctgaaatgttggcctcgtacaagtcttacagcagcacatttcactcattagaggaacagcaagtctgcatggctgttgacataggcagacatcggtgggatcaagtgaaaaaggaggaccacgaggcaacaggtcccaggctcagcagagagctgctggatgagaaagggcctgaagtcttgcaggactcactggatagatgttattcaactccttcaggttgtcttgaactgactgactcatgccagccctacagaagtgccttttacgtattggagcaacagcgtgttggcttggctgttaacatggatgaaattgaaaagtaccaagaagtggaagaagaccaagacccatcatgccccaggctcagcagggagctgctggatgagaaagagcctgaagtcttgcaggactcactgggtagatgttattcgactccttcaggttatcttgaactgcctgacttaggccagccctacagcagtgctgtttactcattggaggaacagtaccttggcttggctcttgacgtggacagaattaaaaaggaccaagaagaggaagaagaccaaggcccaccatgccccaggctcagcagggagctgctggaggtagtagagcctgaagtcttgcaggactcactggatagatgttattcaactccttccagttgtcttgaacagcctgactcctgccagccctatggaagttccttttatgcattggaggaaaagcatgttggcttttctcttgacgtgggagaaattgaaaagaaggggaaggggaagaaaagaaggggaagaagatcaaagaaggaaagaagaaggggaagaaaagaaggggaagaagatcaaaacccaccatgccccaggctcagcagggagctgctggatgagaaagggcctgaagtcttgcaggactcactggatagatgttattcaactccttcaggttgtcttgaactgactgactcatgccagccctacagaagtgccttttacatattggagcaacagcgtgttggcttggctgttgacatggatgaaattgaaaagtaccaagaagtggaagaagaccaagacccatcatgccccaggctcagcggggagctgttggatgagaaagagcctgaagtcttgcaggagtcactggatagatgctattcaactccttcaggttgtcttgaactgactgactcatgccagccctacagaagtgccttttacatattggagcaacagcgtgttggcttggctgttgacatggatgaaattgaaaagtaccaagaagtggaagaagaccaagacccatcatgccccaggctcagcagggagctgctggatgagaaagagcctgaagtcttgcaggactcactgggtagatgttattcgactccttcaggttatcttgaactgcctgacttaggccagccctacagcagtgctgtttactcattggaggaacagtaccttggcttggctcttgacgtggacagaattaaaaaggaccaagaagaggaagaagaccaaggcccaccatgccccaggctcagcagggagctgctggaggtagtagagcctgaagtcttgcaggactcactggatagatgttattcaactccttccagttgtcttgaacagcctgactcctgccagccctatggaagttccttttatgcattggaggaaaaacatgttggcttttctcttgacgtgggagaaattgaaaagaaggggaaggggaagaaaagaaggggaagaagatcaaagaaggaaagaagaaggggaagaaaagaaggggaagaagatcaaaacccaccatgccccaggctcaacagcatgctgatggaagtggaagagcctgaagtcttgcaggactcactggatatatgttattcgactccgtcaatgtactttgaactacctgactcattccagcactacagaagtgtgttttactcatttgaggaagagcatatcagcttcgccctttacgtggacaataggttttttactttgacggtgacaagtctccacctggtgttccagatgggagtcatattcccacaataagcagcccttactaagccgagaggtgtcattcctgcaggcaggacctataggcacgtgaagatttgaatgaaagtacagttccatttggaagcccagacataggatgggtcagtgggcatggctctattcctattctcaaaccatgccagtggcaacctgtgctcagtctgaagacaatggacccacgttaggtgtgacacgttcacataactgtgcagcacatgccgggagtgatcagtcagacattttaatttgaaccacgtatctctgggtagctacaaaattcctcagggatgtcattttgcaggcatgtctctgagcttctatacctgctcaaggtcattgtcatctttgtgtttagctcatccaaaggtgttaccctggtttcaatgaacctaacctcattctttgtgtcttcagtgttggcttgttttagctgatccatctgtaacacaggagggatccttggctgaggattgtatttcagaaccaccaactgctcttgacaattgttaacccgctaggctcctttggttagagaagccacagtccttcagcctccaattggtgtcagtacttaggaagaccacagctagatggacaaacagcattgggaggccttagccctgctcctctcaattccatcctgtagagaacaggagtcaggagccgctggcaggagacagcatgtcacccaggactctgccggtgcagaatatgagcaatgccatgttcttgcagaaaacgcttaacctgagtttcataggaggtaatcaccagacaactgcagaatgtagaacactgagcaggacaactgacctgtctccttcacatagtccatatcaccacaaatcacacaacaaaaaggagaagagatattttcggttgaaaaaaagtaaaaagata

SEQ ID NO: 376 - DNA, 2458 bp, Homo sapiens
aataagagaagtccgaggcggcttcctcctccctgcccagcaggggcggcggtcagaggcgggcagcaccccagttctccccgcacgccggcactcgcggctgctggagccccggctggctcaccccggggccgggcagaattgggctccaggtctctgacccctcccaaggatcatgccgcagccccactgacccaggagtaggggcctaagggcagggaacctggaatgggctgtgtgttctgcaagaaattggagccggtggccacggccaaggaggatgctggcctggaaggggacttcagaagctacggggcagcagaccactatgggcctgaccccactaaggcccggcctgcatcctcatttgcccacatccccaactacagcaacttctcctctcaggccatcaaccctggcttccttgatagtggcaccatcaggggtgtgtcagggattggggtgaccctgttcattgccctgtatgactatgaggctcgaactgaggatgacctcaccttcaccaagggcgagaagttccacatcctgaacaatactgaaggtgactggtgggaggctcggtctctcagctccggaaaaactggctgcattcccagcaactacgtggcccctgttgactcaatccaagctgaagagtggtactttggaaagattgggagaaaggatgcagagaggcagctgctttcaccaggcaacccccagggggcctttctcattcgggaaagcgagaccaccaaaggtgcctactccctgtccatccgggactgggatcagaccagaggcgatcatgtgaagcattacaagatccgcaaactggacatgggcggctactacatcaccacacgggttcagttcaactcggtgcaggagctggtgcagcactacatggaggtgaatgacgggctgtgcaacctgctcatcgcgccctgcaccatcatgaagccgcagacgctgggcctggccaaggacgcctgggagatcagccgcagctccatcacgctggagcgccggctgggcaccggctgcttcggggatgtgtggctgggcacgtggaacggcagcactaaggtggcggtgaagacgctgaagccgggcaccatgtccccgaaggccttcctggaggaggcgcaggtcatgaagctgctgcggcacgacaagctggtgcagctgtacgccgtggtgtcggaggagcccatctacatcgtgaccgagttcatgtgtcacggcagcttgctggattttctcaagaacccagagggccaggatttgaggctgccccaattggtggacatggcagcccaggtagctgagggcatggcctacatggaacgcatgaactacattcaccgcgacctgagggcagccaacatcctggttggggagcggctggcgtgcaagatcgcagactttggcttggcgcgtctcatcaaggacgatgagtacaacccctgccaaggttccaagttccccatcaagtggacagccccagaagctgccctctttggcagattcaccatcaagtcagacgtgtggtcctttgggatcctgctcactgagctcatcaccaagggccgaatcccctacccaggcatgaataaacgggaagtgttggaacaggtggagcagggctaccacatgccgtgccctccaggctgcccagcatccctgtacgaggccatggaacagacctggcgtctggacccggaggagaggcctaccttcgagtacctgcagtccttcctggaggactacttcacctccgctgaaccacagtaccagcccggggatcagacatagcctgtccgggcatcaaccctctctggcggtggccaccagtccttgccaatccccagagctgttcttccaaagcccccaggctggcttagaaccccatagagtcctagcatcaccgaggacgtggctgctctgacaccacctagggcaacctacttgttttacagatggggcaaaaggaggcccagagctgatctctcatccgctctggccccaagcactatttcttccttttccacttaggcccctacatgcctgtagcctttctcactccatccccacccaaagtgctcagaccttgtctagttatttataaaactgtatgtacctccctcacttctctcctatcactgctttcctactctccttttatctcactctagtccaggtgccaagaatttcccttctaccctctattctcttgtgtctgtaagttacaaagtcaggaaaagtcttggctggacccctttcctgctgggtggatgcagtggtccaggactggggtctgggcccaggtttgagggagaaggttgcagagcacttcccacctctctgaatagtgtgtatgtgttggtttattgattctgtaaataagtaaaatgacaatatgaatcctcaaaccatgaaaaaaaaaaaaaaaaaa

SEQ ID NO: 377 - DNA, 5748 bp, Homo sapiens
gagaagaaagccagtgcgtctctgggcgcaggggccagtggggctcggaggcacaggcaccccgcgacactccaggttccccgacccacgtccctggcagccccgattatttacagcctcagcagagcacggggcgggggcagaggggcccgcccgggagggctgctacttcttaaaacctctgcgggctgcttagtcacagccccccttgcttgggtgtgtccttcgctcgctccctccctccgtcttaggtcactgttttcaacctcgaataaaaactgcagccaacttccgaggcagcctcattgcccagcggaccccagcctctgccaggttcggtccgccatcctcgtcccgtcctccgccggcccctgccccgcgcccagggatcctccagctcctttcgcccgcgccctccgttcgctccggacaccatggacaagttttggtggcacgcagcctggggactctgcctcgtgccgctgagcctggcgcagatcgatttgaatataacctgccgctttgcaggtgtattccacgtggagaaaaatggtcgctacagcatctctcggacggaggccgctgacctctgcaaggctttcaatagcaccttgcccacaatggcccagatggagaaagctctgagcatcggatttgagacctgcaggtatgggttcatagaagggcacgtggtgattccccggatccaccccaactccatctgtgcagcaaacaacacaggggtgtacatcctcacatccaacacctcccagtatgacacatattgcttcaatgcttcagctccacctgaagaagattgtacatcagtcacagacctgcccaatgcctttgatggaccaattaccataactattgttaaccgtgatggcacccgctatgtccagaaaggagaatacagaacgaatcctgaagacatctaccccagcaaccctactgatgatgacgtgagcagcggctcctccagtgaaaggagcagcacttcaggaggttacatcttttacaccttttctactgtacaccccatcccagacgaagacagtccctggatcaccgacagcacagacagaatccctgctaccactttgatgagcactagtgctacagcaactgagacagcaaccaagaggcaagaaacctgggattggttttcatggttgtttctaccatcagagtcaaagaatcatcttcacacaacaacacaaatggctggtacgtcttcaaataccatctcagcaggctgggagccaaatgaagaaaatgaagatgaaagagacagacacctcagtttttctggatcaggcattgatgatgatgaagattttatctccagcaccatttcaaccacaccacgggcttttgaccacacaaaacagaaccaggactggacccagtggaacccaagccattcaaatccggaagtgctacttcagacaaccacaaggatgactgatgtagacagaaatggcaccactgcttatgaaggaaactggaacccagaagcacaccctcccctcattcaccatgagcatcatgaggaagaagagaccccacattctacaagcacaatccaggcaactcctagtagtacaacggaagaaacagctacccagaaggaacagtggtttggcaacagatggcatgagggatatcgccaaacacccaaagaagactcccattcgacaacagggacagctgcagcctcagctcataccagccatccaatgcaaggaaggacaacaccaagcccagaggacagttcctggactgatttcttcaacccaatctcacaccccatgggacgaggtcatcaagcaggaagaaggatggatatggactccagtcatagtataacgcttcagcctactgcaaatccaaacacaggtttggtggaagatttggacaggacaggacctctttcaatgacaacgcagcagagtaattctcagagcttctctacatcacatgaaggcttggaagaagataaagaccatccaacaacttctactctgacatcaagcaataggaatgatgtcacaggtggaagaagagacccaaatcattctgaaggctcaactactttactggaaggttatacctctcattacccacacacgaaggaaagcaggaccttcatcccagtgacctcagctaagactgggtcctttggagttactgcagttactgttggagattccaactctaatgtcaatcgttccttatcaggagaccaagacacattccaccccagtggggggtcccataccactcatggatctgaatcagatggacactcacatgggagtcaagaaggtggagcaaacacaacctctggtcctataaggacaccccaaattccagaatggctgatcatcttggcatccctcttggccttggctttgattcttgcagtttgcattgcagtcaacagtcgaagaaggtgtgggcagaagaaaaagctagtgatcaacagtggcaatggagctgtggaggacagaaagccaagtggactcaacggagaggccagcaagtctcaggaaatggtgcatttggtgaacaaggagtcgtcagaaactccagaccagtttatgacagctgatgagacaaggaacctgcagaatgtggacatgaagattggggtgtaacacctacaccattatcttggaaagaaacaaccgttggaaacataaccattacagggagctgggacacttaacagatgcaatgtgctactgattgtttcattgcgaatcttttttagcataaaattttctactctttttgttttttgtgttttgttctttaaagtcaggtccaatttgtaaaaacagcattgctttctgaaattagggcccaattaataatcagcaagaatttgatcgttccagttcccacttggaggcctttcatccctcgggtgtgctatggatggcttctaacaaaaactacacatatgtattcctgatcgccaacctttcccccaccagctaaggacatttcccagggttaatagggcctggtccctgggaggaaatttgaatgggtccattttgcccttccatagcctaatccctgggcattgctttccactgaggttgggggttggggtgtactagttacacatcttcaacagaccccctctagaaatttttcagatgcttctgggagacacccaaagggtgaagctatttatctgtagtaaactatttatctgtgtttttgaaatattaaaccctggatcagtcctttgatcagtataattttttaaagttactttgtcagaggcacaaaagggtttaaactgattcataataaatatctgtacttcttcgatcttcaccttttgtgctgtgattcttcagtttctaaaccagcactgtctgggtccctacaatgtatcaggaagagctgagaatggtaaggagactcttctaagtcttcatctcagagaccctgagttcccactcagacccactcagccaaatctcatggaagaccaaggagggcagcactgtttttgttttttgttttttgttttttttttttgacactgtccaaaggttttccatcctgtcctggaatcagagttggaagctgaggagcttcagcctcttttatggtttaatggccacctgttctctcctgtgaaaggctttgcaaagtcacattaagtttgcatgacctgttatccctggggccctatttcatagaggctggccctattagtgatttccaaaaacaatatggaagtgccttttgatgtcttacaataagagaagaagccaatggaaatgaaagagattggcaaaggggaaggatgatgccatgtagatcctgtttgacatttttatggctgtatttgtaaacttaaacacaccagtgtctgttcttgatgcagttgctatttaggatgagttaagtgcctggggagtccctcaaaaggttaaagggattcccatcattggaatcttatcaccagataggcaagtttatgaccaaacaagagagtactggctttatcctctaacctcatattttctcccacttggcaagtcctttgtggcatttattcatcagtcagggtgtccgattggtcctagaacttccaaaggctgcttgtcatagaagccattgcatctataaagcaacggctcctgttaaatggtatctcctttctgaggctcctactaaaagtcatttgttacctaaacttatgtgcttaacaggcaatgcttctcagaccacaaagcagaaagaagaagaaaagctcctgactaaatcagggctgggcttagacagagttgatctgtagaatatctttaaaggagagatgtcaactttctgcactattcccagcctctgctcctccctgtctaccctctcccctccctctctccctccacttcaccccacaatcttgaaaaacttcctttctcttctgtgaacatcattggccagatccattttcagtggtctggatttctttttattttcttttcaacttgaaagaaactggacattaggccactatgtgttgttactgccactagtgttcaagtgcctcttgttttcccagagatttcctgggtctgccagaggcccagacaggctcactcaagctctttaactgaaaagcaacaagccactccaggacaaggttcaaaatggttacaacagcctctacctgtcgccccagggagaaaggggtagtgatacaagtctcatagccagagatggttttccactccttctagatattcccaaaaagaggctgagacaggaggttattttcaattttattttggaattaaatacttttttccctttattactgttgtagtccctcacttggatatacctctgttttcacgatagaaataagggaggtctagagcttctattccttggccattgtcaacggagagctggccaagtcttcacaaacccttgcaacattgcctgaagtttatggaataagatgtattctcactcccttgatctcaagggcgtaactctggaagcacagcttgactacacgtcatttttaccaatgattttcaggtgacctgggctaagtcatttaaactgggtctttataaaagtaaaaggccaacatttaattattttgcaaagcaacctaagagctaaagatgtaatttttcttgcaattgtaaatcttttgtgtctcctgaagacttcccttaaaattagctctgagtgaaaaatcaaaagagacaaaagacatcttcgaatccatatttcaagcctggtagaattggcttttctagcagaacctttccaaaagttttatattgagattcataacaacaccaagaattgattttgtagccaacattcattcaatactgttatatcagaggagtaggagagaggaaacatttgacttatctggaaaagcaaaatgtacttaagaataagaataacatggtccattcacctttatgttatagatatgtctttgtgtaaatcatttgttttgagttttcaaagaatagcccattgttcattcttgtgctgtacaatgaccactgttattgttactttgacttttcagagcacacccttcctctggtttttgtatatttattgatggatcaataataatgaggaaagcatgatatgtatattgctgagttgaaagcacttattggaaaatattaaaaggctaacattaaaagactaaaggaaacagaaaaaaaaaaaaaaaaa

SEQ ID NO: 378 - DNA, 2778 bp, Homo sapiens
ggcggcagcggctgcgagaggcggcggcacgacgacggtccctcagcccagccaccatgagcaccaagcagatcacttgcaggtattttatgcatggtgtgtgtcgggaaggaagtcagtgcctattctcacatgacttggcaaacagcaaaccgtccaccatctgcaagtactaccagaagggctactgtgcctatggaactcggtgcagatatgaccacacgaggccctctgctgcagctggaggtgctgtgggcaccatggcccacagtgtgccctccccagctttccacagtcctcaccctccttccgaggtcactgcatccattgtgaaaactaactcacatgaacccggaaagcgtgaaaagagaacattggttcttagagaccgaaatctctctggcatggctgaaaggaagacccagccgagcatggtgagtaatccaggcagctgcagcgacccccagcccagccccgagatgaagccgcattcctacctggatgccatcaggagtggccttgatgacgtggaggccagcagctcctacagcaacgagcagcagctgtgcccctacgcagctgctggggagtgccggtttggggatgcctgtgtctacctgcacggggaggtgtgtgaaatctgtaggctgcaagtcttgcacccattcgacccagagcagaggaaggctcacgaaaagatctgcatgttgacgttcgaacacgagatggaaaaggcctttgccttccaggcaagccaggacaaagtgtgcagtatctgcatggaagtgatcctggagaaggcctctgcttctgagaggagatttgggattctctccaattgcaatcacacgtactgtttgtcctgcatccggcagtggcggtgtgccaaacagtttgaaaacccaatcattaagtcttgtccagaatgccgtgtgatatcagagtttgtaattccaagtgtgtattgggtggaagatcagaataaaaagaacgagttgattgaagctttcaaacaggggatggggaaaaaagcctgtaaatactttgagcaaggcaaggggacctgcccatttggaagcaaatgtctttatcgccatgcttaccccgatgggcggctagcagagcctgagaaacctcggaaacagctcagttctcaaggcactgtgaggttctttaattcagtgcggctctgggatttcatcgagaaccgagaaagccggcatgtccccaacaatgaagatgtcgacatgacagagctcggggacctcttcatgcacctttctggagtggaatcatcagaaccctaaagagtagatggttgccctgcatcttgggctccatcggccgaaactttcccaagccagggtgtgcggagcttccctgtactgcagccaaggtgacgtgtgacttggatttgagtggagttgggcttagccttagtctcattcaatctccattattacagccatggggaagagtgaaagatataaagtaacctaattaaatgtatggaattgctatttttatagctgatatagttacacctcaagcccctcaggggtaacaactaacaaacacccaaactgtttggattgattgctttaaaaaacaaacctggctcttacctttgatcttttcttccccagaaatagtaaacttgcagctgcccctaatgcagcatatttttcttaccaaaggagtcttcagccctataaaaggattcctctatagtgtatttctctagtgtatttagtgtgtcgtcaaaattttgatttatacagagctttcaagaacacacaatgcaaagtgagcgcagcatagctgttaacaaacatacaacttttttctagggctttaagggtggtcatttttttcaagttctctcaagtgtcccaaatcagggtagcaatcttgttgccacatgtgcagcaaacaaagtggaagtatagatcttcttctcccttagggaggctcttgaaggagcaggaggtacagtactgggtagcagtctggccctcctgtcgtctggttggtgttggggcctccagccagggccctctaggggaaccaagcctctgctctcacctgtgggttcttgcccatcagggtaattgtattgagaactcaaatatacgtgcacttacatgtgtggttcgtactcaagtgatctattatctagctgcaaagcctggctttgatttgaaattttgtaaaaatttcatggcacccaaggtttctgattctgacccagcagtggtcctgaagagagctgatggcaagtcttgtagtcattttgattttaattgaagggtgagcataaccttgtgaaccagcactagcttgttccaagctggaatttatctaatctatttttgtgtttaaaaaagctgtacctaccaaataaataaatagtttataaaatgtattacttaaggtattagctgagtttagagtactttctgcttaattaatttttatacttaactcttcagtagaggtttacaaagagtacaaaggttaaattacaaattcattcccagcctaggctctgggcacatttcctgttcttgaattctgctcctgaagagggtgaacaaatggggcattcaagttgtgagctcagaattactttaaaaggaggtaacagccagccattacacctaaatttaatttattttattaaaataacataattgagggaccatcagataactgtattttgtcaggtgcaataaaaacaaaattaaaacccaaatcatcaagaaaaaaaaaaaaaaa

SEQ ID NO: 379 - DNA, 3615 bp, Homo sapiens
ccccgaggagccaccgcccagccgctcgcaggcgccgcacggagttgcgtcccggggacttggggccgcagggagctgtgagtacccaggaagctgcaccgtgtggcctggagctgtctatctgtccttccagccacctgtctgtccagccacccttccacagactgaggcttgacaccggagcatctgtacagagcaaggagaagacaagaacatgctctaaagcccttcacagcaagacccaggaagccgcgggcaaactcagactcgaagccctcccgcctcctgcccacaatggcctctgctgacaagaatggcgggagcgtgtcctctgtgtccagcagccgcctgcagagccggaagccacccaacctctccatcaccatcccgccacccgagaaagagacccaggcccctggcgagcaggacagcatgctgcctgagggttttcagaataggaggctaaagaaaagccagcccaggacctgggctgcacacaccaccgcctgccctccctccttcctccccaagaggaagaacccagcctacttgaagagcgtcagcctccaggagccacgcagccgatggcaggagagttcagagaagcgccctggcttccgccgccaggcctcactgtcccagagcatccgcaagggcgcagcccagtggtttggagtcagcggcgactgggaggggcagcggcagcagtggcagcgccgcagcctgcaccactgcagcatgcgctacggccgcctgaaggcctcgtgccagcgtgacctggagctccccagccaggaggcaccgtccttccagggcactgagtccccaaagccctgcaagatgcccaagattgtggatccgctggcccggggccgggccttccgccacccggaggagatggacaggccccacgccccgcacccaccgctgacccccggagtcctgtccctcacctccttcaccagtgtccgttctggctactcccacctgccacgccgcaagagaatgtctgtggcccacatgagcttgcaagctgccgctgccctcctcaaggggcgctcggtgctggatgccaccggacagcggtgccgggtggtcaagcgcagctttgccttcccgagcttcctggaggaggatgtggtcgatggggcagacacgtttgactcctccttttttagtaaggaagaaatgagctccatgcctgatgatgtctttgagtcccccccactctctgccagctacttccgagggatcccacactcagcctcccctgtctcccccgatggggtgcaaatccctctgaaggagtatggccgagccccagtccccgggccccggcgcggcaagcgcatcgcctccaaggtgaagcactttgcctttgatcggaagaagcggcactacggcctcggcgtggtgggcaactggctgaaccgcagctaccgccgcagcatcagcagcactgtgcagcggcagctggagagcttcgacagccaccggccctacttcacctactggctgaccttcgtccatgtcatcatcacgctgctggtgatttgcacgtatggcatcgcacccgtgggctttgcccagcacgtcaccacccagctggtgctgcggaacaaaggtgtgtacgagagcgtgaagtacatccagcaggagaacttctgggttggccccagctcgattgacctgatccacctgggggccaagttctcaccctgcatccggaaggacgggcagatcgagcagctggtgctgcgcgagcgagacctggagcgggactcaggctgctgtgtccagaatgaccactccggatgcatccagacccagcggaaggactgctcggagactttggccacttttgtcaagtggcaggatgacactgggccccccatggacaagtctgatctgggccagaagcggacttcgggggctgtctgccaccaggaccccaggacctgcgaggagccagcctccagcggtgcccacatctggcccgatgacatcactaagtggccgatctgcacagagcaggccaggagcaaccacacaggcttcctgcacatggactgcgagatcaagggccgcccctgctgcatcggcaccaagggcagctgtgagatcaccacccgggaatactgtgagttcatgcacggctatttccatgaggaagcaacactctgctcccaggtgcactgcttggacaaggtgtgtgggctgctgcccttcctcaaccctgaggtcccagatcagttctacaggctctggctgtctctcttcctacatgctggcgtggtgcactgcctcgtgtctgtggtctttcaaatgaccatcctgagggacctggagaagctggccggctggcaccgtatcgccatcatcttcatcctcagtggcatcacaggcaacctcgccagtgccatctttctcccataccgggcagaggtgggcccggccggctcacagttcggcctcctcgcctgcctcttcgtggagctcttccagagctggccgctgctggagaggccctggaaggccttcctcaacctctcggccatcgtgctcttcctgttcatctgtggcctcctgccctggatcgacaacatcgcccacatcttcggcttcctcagtggcctgctgctggccttcgccttcctgccctacatcaccttcggcaccagcgacaagtaccgcaagcgggcactcatcctggtgtcactgctggcctttgccggcctcttcgccgccctcgtgctgtggctgtacatctaccccattaactggccctggatcgagcacctcacctgcttccccttcaccagccgcttctgcgagaagtatgagctggaccaggtgctgcactgaccgctgggccacacggctgcccctcagccctgctggaacagggtctgcctgcgagggctgccctctgcagagcgctctctgtgtgccagagagccagagacccaagacagggcccgggctctggacctgggtgcccccctgccaggcgaggctgactccgcgtgagatggttggttaaggcggggtttttctggggcgtgaggcctgtgagatcctgacccaagctcaggcacacccaaggcacctgcctctctgagtcttgggtctcagttcctaatatcccgctccttgctgagaccatctcctggggcagggtccttttcttcccaggtcctcagcgctgcctctgctggtgccttctcccccactactactggagcgtgcccttgctggggacgtggctgtgccctcagttgcccccagggctgggtgcccaccatgccccttcctctttctcctcctacctctgccctgtgagcccatccataaggctctcagatgggacattgtgggaaaggctttggccatggtctgggggcagagaacaaggggggagacacaagtagacctcaggtagaacgacactgggcggagccaccccagggcctgctcccagggagtgctcgaggcgcatcaggcccgttttttaccagtttatatcacggtcttcatttttaaaagtaacgctaactttgtacggacgatgtctcatggattaaataatattctttatggcagtaaaaaaaaaaa

SEQ ID NO: 380 - DNA, 2788 bp, Homo sapiens
ggcgcagcggcagcggcagcagcggcaacaagtgccggaggctagcagagccaagccggagcagtccctgccgccgacaccgccgggccgcccgtccggggcgccgcgcatggagcgtgagctgcggcggtcgccgggctgagccgcgcggagcggccgggacgtggatgtggccgcgatctcccgcccttgcccccgccccgccgagctggagctgctcccggacaagatatgagaaatgagtgttggacgtcgaagaataaagttgttgggtatcctgatgatggcaaatgtcttcatttattttattatggaagtctccaaaagcagtagccaagaaaaaaatggaaaaggggaagtaataatacccaaagagaagttctggaagatatctacccctcccgaggcatactggaaccgagagcaagagaagctgaaccggcagtacaaccccatcctgagcatgctgaccaaccagacgggggaggcgggcaggctctccaatataagccatctgaactactgcgaacctgacctgagggtcacgtcggtggttacgggttttaacaacttgccggacagatttaaagactttctgctgtatttgagatgccgcaattattcactgcttatagatcagccggataagtgtgcaaagaaacctttcttgttgctggcgattaagtccctcactccacattttgccagaaggcaagcaatccgggaatcctggggccaagaaagcaacgcagggaaccaaacggtggtgcgagtcttcctgctgggccagacacccccagaggacaaccaccccgacctttcagatatgctgaaatttgagagtgagaagcaccaagacattcttatgtggaactacagagacactttcttcaacttgtctctgaaggaagtgctgtttctcaggtgggtaagtacttcctgcccagacactgagtttgttttcaagggcgatgacgatgtttttgtgaacacccatcacatcctgaattacttgaatagtttatccaagaccaaagccaaagatctcttcataggtgatgtgatccacaatgctggacctcatcgggataagaagctgaagtactacatcccagaagttgtttactctggcctctacccaccctatgcagggggaggggggttcctctactccggccacctggccctgaggctgtaccatatcactgaccaggtccatctctaccccattgatgacgtttatactggaatgtgccttcagaaactcggcctcgttccagagaaacacaaaggcttcaggacatttgatatcgaggagaaaaacaaaaataacatctgctcctatgtagatctgatgttagtacatagtagaaaacctcaagagatgattgatatttggtctcagttgcagagtgctcatttaaaatgctaaaatagatacaaactcaattttgcatagaaaggtgtattttgaatagttcccatgttgtgttctcacattagagtaatttctatattaaaccatgaaaattgcctttatgagtgatacccatttgagggcctctaaacccttcaatttggtactcacgtgaagagggaaagcggaagatggtaatttttttttatggatgatatggcaggatgattggttctgatcttaccggctagtggtcatttttaaaaaacttgtaccctcttatctgaaatcctgtttctggaatttggccattttaagtgattttgtttgccctcttctataatattcctacttcccataataatgactgatttatttgtaattcaggtatttataaacctattggctacaaagactttgttaaacattatccagtggttttcgtgaaatggaattatgtttatttttatgggatttgggtaaattttaaattgtctagaaaactgaaatttcagttgtcagttgtggaattcagtttttcaattgtggaaatttcctgccaccccaacagtatttttgtgtgttaattaattttgcaaaatgagaatcatggtgtgacactcatctaatttatcttgttgtgatgttatggtcataataaggagaaagagggtttaatttttcttgtatttggtttcctggtggtatcatagtgtaattttagtatttgaaaatcagtgtgattccttaatggccaactgaagattgaattgccgctaacaaccatatcgtgttagtgaattttcaatatggaccaggaaggcatatgtattttgaacttgagtgaaaaggttgaagttacagacttttgcatagatggtttgtcaatttaaaattccagaatttattattgccatattttcacatgctgcttatacaagattattattgagtagtaactgcttccctgtctatgtagaagtgcctgtgtttttatttattgttcagatcaaagaccaaaacattttcttaaatatattttatgtaatattttatttgtatacagtgttgttgatgaaatatttaactagagcatgatattttaaatgttaaggtgtaacatatgttaaataaaactgttatttttgaattttaaaatttgttttttgggggtatgaactactagagtttaaaattctgccaaactattacttatatgtactattgtgtaacatactttcttgaaatatttttgtttatagaattgaaggttcttatcagatgggatactggggactataaacaatggaaataaagccactgtatttttaaaaaaaaaaaaaaaaaaaaaaaaaaaaaaaaaaaaaaaaa

SEQ ID NO: 381 - DNA, 4268 bp, Homo sapiens
attatcctccttattgacaaacagagcggtcgcggcggcgactctcggcgtgcggtgatagccaagccatgggagacaagaagagccccaccaggccgaagcggcagccgaagccgtcctcggatgagggttactgggactgtagcgtctgcaccttccggaacagcgccgaggccttcaagtgcatgatgtgcgatgtgcggaagggcacctccacccgatccacattgtttgaagttattgtgagtgcctcgaggaccaaggaaccgttgaaatttccaatttcaggaagttccagtggatgcccatcaggaagattctcatgctgaacagaagggcaagagaggtggatctgtgagggaaaagacccaataggataactcaagttactggaaacctcgacctgtctcccagttggttgcacagcaggttactcagcagtttgtgcctcctacacagtcaaagaaagagaaaaaagataaagtagaaaaagaaaaaagtgaaaaggaaacaactagcaaaaagaatagccataagaaaaccaggccaagattgaaaaatgtggatcggagtagtgctcagcatttggaagttactgttggagatctgacagtcattattacagactttaaggagaaaacaaagtcaccgcctgcatctagtgctgcttctgcagatcaacacagtcaaagcggctctagctctgataacacagagagaggaatgtccaggtcatcttcacccagaggagaagcctcatcattgaatggagaatctcattaaagtttattttctccaatttcttagtcacttctgtcctaccatgcaaatacacagattatgccaagaggtaccacattttcatgacagatacattcatgcacaatccataatttgagttttacataaaatagaaatttgttagaatttgttagattttattgcaatgatgcctaccaaacatttccagacttaacattttggtctctgcagttaagtgccatgaaaatgtggttgaattattcattatgcagtgttattggtaagtgtattttcacttttagtttagtgaattctaacacataattcttgaattctctactattggcatgtaacgaatttaaattttttataacatagtgcaagctgcctaaatatgtattatttgagaattgtgaaacagatagttatatgtatacaagtcaaagaacaacttaactattgctgcaacaggtttttcttaatggttatcctcttaaatacacctgctggtacttggtgtggttaaataggaaaattgttattaaataaagaatttgtatgaacctttgccaatgtttttgacacgttttactaattattgttcctgaattatgtttctggttttatctattttttgaggtttttttgtttgcttatttttcaaaacattcatttattgtaatgtttactagcggactagtaaacaataaaacattgattatttagctttataattcaggtttagtgctattgtcattgaacactggtattttctgtatcatataaaacattaaaattcaaataattataagcatttggcaaaaacaagagaaaagaaacttgccatattttacaagctgcaattttagaaaagctttaacttaatgatagttttatcattgttttcttgtcccaaacttatccagggccatagaagtatgaatctaattaaaacagaaatgggaattattgcacagaaatgggaaataactaattttaaatcagtcaaattggcttcttattaaatacaataattcttatgaaaatcatagtaccctattttcagacacagctgccagtttacacatttctcagtatcctgaaaggaaaaaagtatagccccacttatactatgtaaaattaccaataaaatatttttatgactacagattttgcatttttgtttacaactatttaaagagttttatgttgtatttagaatttcaacctagaaaccacacagtacttaaattctcctggggtctcctgctttctcttaaccatttgcttaatatatatctacctaaaggagacttctgaattgtaaatgaacttaaaaatagaatgtggatgcaaaatatcacataagacatcatgataacatttgaagaaaaaataaaactgtagaccctaacagttgtgatatttggtggtttcatgtggtaatgtaattttctgtttaattacagtactttttacaggcacagtggtactgtcttttttgtaagatgctagttgtgaaatacaattaattgcatacagtaaaagtctgtgattaaaacatttatatacctcattctttagtgttgttaaatgaaaaattaaaatttgtgtttattataagatactttcaatggaataccagctaaccagatatgttcctttaaaacatgaatttttttgtcttattctgtttttaacatgtttcaaatgttttatacatttttggagatagtaaaaatttaaaaatgtaatagggaaaatatttaatttttaagtcaaaaactatgctttaaaggaattacatcttatgatcaaataactttcaggatgtattttaaatgagctgcaagagagaaaaatctgacaggagatgggattttacctgaatggagcatactcatatttctacataggtgggaagatactcatctttctacatagacgggaacacggtgtagcatggagattaagcgtgctaactgacacctcatgtttgaatcctgttgtagaatggaaatgagcttaaattacccaagcttactttccatctataaaacagggctaataatggtaatcacatctaatttatagggtttttgggaggattaagtcaatccgtgtaaaattcttaattatctgacacatactggtcactcagtaaatgtgagcttttaccattgttataggtaaaatcccattacaaaaatacaaaaatattttttgtaacagttattttcctgccctcttggatgacctaaagtaatagtgttttatagatttcactaaattttcagtgtaatatcagatgttttctctggatgcagaaagaccatctttccataattaaagaacctggtgggtgtgcactatgagattggagaaatgaattaagttgacttgaaattattttacttttattaatcacaggtatctcaacctgcctttgtttcaccctacttcaagtacacttccacaccaggaaaacagacccaaattccataaacagaactgacgttaaaatatgcgaaagattcagaacctaggtttagggtacatgtttttctctgtttcatgaacttacagtgtggtttgagcactgggttcttttagccaaattccatacaaaaagaatttggatgttttccagcatttattaccttactttgctataagtaagagtgaagataggccgggtgtgatggctcatgccagtaatcccagcactttgggctgaagcaggcagatattttgagcccaggaccagcctgggcaacatggtgaaagctcatctctatgaaaaaatttgaatatacatatatatatatatgtatatttaaaaagtgaatataatttgaggcacagaagaatattcttaaaaccttttgtattatacaatagaaataaaggttttatttttattaaatgctttcctaaaatgatagtggataatagacaaagtgaaaacatttaaaaaggaagagaaacttcagcctttctaagttgatagcatgtttattaacttttagataaagatccttatagactgaaagaatgtagcctctgcattaatggtaaatggtctagaagttttcgtttccactgaggcttccgccactcgcttttttaaacttcctgctatggtttggatatggtttgtcctcaccaaaactcatgctgaggcctgagtccccagtttgattgtgttggtaggtggtgcctttaagaggtgattaggtcattgagatggattaaaggctttctcatgaggctcagttagttctggaatggattcgctcttgcaggaatggatgaattctcacaagagtgggttgttatgaagtgaggatgcttcttgtgttctgttctctttgccctcctcagttcaccatctgctttccaccatgagttgaagcagcatgaggccctcatcagatgggctccctgatcttggactcctcagcctttggactcataagccaaaataaatctgttttctttataaa

SEQ ID NO: 382 - DNA, 480 bp, Homo sapiens
ggcagaaacccggattccggttccggtgggcctccatcagcaagctccagtgctacgtgtccctggcattttaggtgtcggttgggcagtcatggatcaggtaatgcagtttgttgagccaagtcggcagtttgtaaaggactccattcggctggttaaaagatgcactaaacctgatagaaaagaattccagaagattgccatggcaacagcaataggatttgctataatgggattcattggcttctttgtgaaattgatccatattcctattaataacatcattgttggtggctgaatacattttggaagagagtttttcatcttagagattggtgaacaagtgtgagggtgtgagaaactcacagaatacaaatttgcctgtatgttttgtgggtttttttttttcctttcaagatgttttctatttctaaattaaagtaatttcaaagtaaatgaataaaaaaaaaaaaaaaaaaa

SEQ ID NO: 383 - DNA, 4108 bp, Homo sapiens
gcttcccggaagtggcggcgcggtcagggctggccttggcttcagctgcggttttggggtcccggactctgggatcggcggcgctatgagttctttcgaggggcagatggccgagtatccaactatctccatagaccgcttcgatagggagaacctgagggcccgcgcctacttcctgtcccactgccacaaagatcacatgaaaggattaagagcccctaccttgaaaagaaggttggagtgcagatgaggaaactgaggaaccagagaggttaaattagttgcccagtgtcacacagccagtaagtggcaggaccaggattccagccagcttgaaggtttatctatactgttcacctgtgactaaggagttgttgttaacgagcccgaaatacagattttggaagaaacgaattagcagtcacaacagcagggttgttcctgttgtctctggcattcagcttgaagttactacaggtcagcccggccagcagtcaggaaggaaagctggaagagaagtggaggggaacagagacaaactggaaggcagaatggcccactaggacagaccgaaacccacttctgtctctcacttcctctggcctcaatagtgctggtctcccgctttggctctgaagcacatgcacctgccccaggactcggaggagctgcacacgggcacccagcagaagctgatgttgctgcggccctgccccagactctgagttaagccagaagatatctattgaaatcgagactcctacccagatatctttagtggatgaagcatcaggagagaaggaagagattgttgtgactctcttaccagctggtcactgtccgggatcagttatgtttttatttcagggcaataatggaactgtcctgtacacaggagacttcagattggcgcaaggagaagctgctagaatggagcttctgcactccgggggcagagtcaaagacatccaaagtgtatatttggatactacgttctgtgatccaagattttaccaaattccaagtcgggaggagtgtttaagtggagtcttagagctggtccgaagctggatcactcggagcccgtaccatgttgtgtggctgaactgcaaagcggcttatggctatgaatatctgttcaccaaccttagtgaagaattaggagtccaggttcatgtgaataagctagacatgtttaggaacatgcctgagatccttcatcatctcacaacagaccgcaacactcagatccatgcatgccggcatcccaaggcagaggaatattttcagtggagcaaattaccctgtggaattacttccagaaatagaattccactccacataatcagcattaagccatccaccatgtggtttggagaaaggagcagaaaaacaaatgtaattgtgaggactggagagagttcatacagagcttgtttttcttttcactcctcctacagtgagattaaagatttcttgagctacctctgtcctgtgaacgcatatccaaatgtcattccagttggcacaactatggataaagttgtcgaaatcttaaagcctttatgccggtcttcccaaagtacggagccaaagtataaaccactgggaaaactgaagagagctagaacagttcaccgagactcagaggaggaagatgactatctctttgatgatcctctgccaatacctttaaggcacaaagttccatacccggaaacttttcaccctgaggtattttcaatgactgcagtatcagaaaagcagcctgaaaaactgagacaaaccccaggatgctgcagagcagagtgtatgcagagctctcgtttcacaaactttgtagattgtgaagaatccaacagtgaaagtgaagaagaagtaggaatcccagcttcactgcaaggagatctgggctctgtacttcacctgcaaaaggctgatggggatgtaccccagtgggaagtattctttaaaagaaatgatgaaatcacagatgagagtttggaaaacttcccttcctccacagtggcagggggatctcagtcaccaaagcttttcagtgactctgatggagaatcaactcacatctcctcccagaattcttcccagtcaacacacataacagaacaaggaagtcaaggctgggacagccaatctgatactgttttgttatcttcccaagagagaaacagtggggatattacttccttggacaaagctgactacagaccaacaatcaaagagaatattcctgcctctctcatggaacaaaatgtaatttgcccaaaggatacttactctgatttgaaaagcagagataaagatgtgacaatagttcctagtactggagaaccaactactctaagcagtgagacacatatacccgaggaaaaaagtttgctaaatcttagcacaaatgcagattcccagagctcttctgattttgaagttccctcaactccagaagctgagttacctaaacgagagcatttacaatatttatatgagaagctggcaactggtgagagtatagcagtcaaaaaaagaaaatgctcactcttagatacctaagaattcaaagcgtttcaacctagagcaaccactaaaaaacctgcacagagatgacagtcaatattacaatagagaaaatacagtacttaaaaatgttcaaataacctggttgggtgtggtggctcacacttgtaatcccagcactttgaggtgggcaatggcttgagcccaggagttcgacaccagcctggccaacacagtgaaatgtgtctctacttacaaaaaaaaaaaaaaaaaaaaaagccaggcatggtggtgggctactctggaggcccttgaggatcacttgagcccaggagattgaggctgcagtgagccatgactgtgccactgcacctctagtctgggtgacagagcaagaccctgtttaaaaaagaaaaaggccaggcacggtggctcatgcctgtaatcccagctacgcaggaggccaaggcaggagaatcacttgaacctgggaggtggtggttgcagtgagctgagattgtgtcattgcactccagcctgggcaacaagagcaaaactctgtctcaaaaaaaaaaaaaaaaaaaaagaaaaaaaaatggtagaactaaacccatacgtatcaatgattacattaaatgtaaatggtctaagtgcatcaatgacaagagacacggaaaaaaccaacataacccagtgatctgctgtctataaagaaagtcaattcaagtgattgataggttaaaaggatggaaaaaccatgtaaacaattaaaaatggagtggttatatggacagtttcctaatgataaaaggtctagttcaccaagaagacaaaataatcctaaacgtatatgcacctaacagctccaaaaatttatgaagctagaacagctgaaaagagacaaactaatgcacaattacagctagggattaatttaacatccctccttagtaacagaactagtatatacacattaatcagtaagaatatagaactgaaaatcataagccgactggattaaattgacatttatagaacacaccaccccaaactagcagaatgtatctcctgaagtacacatggaacattcagcatgatcatatctttgctcataaacacacctgatttaaattgacaaacttggatctagtatgataaactgatggctatagacaaaatcagcaccttatttatccccaaagatgttaagtcacttaaccttgatgtgaatacggtggccaaattagaagcggacaattagaatataaaagaaaatgctcaagaattaaatggtggccaggcacagtaactcctgcctgcaatcccagtactttgggaggctcgcttgagctcagggttttgagtccagcctgggcaacacacagggagaccctgtctccacaaaatgttagccagacatggtggtgtgcacctgtagtcctcgctacttggaaggcttaggtggcaggatggattgagcccaggaggttgaaactgcagtgagctgattgtgcccagcctgggcaacaaagcaagaccccatctcaagaaaaataaattaaaaaaaactaaa

SEQ ID NO: 384 - DNA, 445 bp, Homo sapiens
catgcctgaaccagctaagtcagctcctgctccgaagaagggttccaagaaggctgtgaccaaggcgcagaagaaggatggcaagaagcgcaagcgcagtcgtaaggagagctactccgtgtatgtgtacaaggtgctaaaacaggttcaccccgatactggcatctcatccaaggccatgggcatcatgaattccttcgttaacgacatcttcgaacgcatcgcaggcgaggcttcccgtctggcccactacaacaagcgctcgaccattacctccagggagatccagaccgccgtgcgtctgctgcttcccggagagctggccaagcacgcagtgtccgaaggtaccaaggctgtcaccaagtatacaagctccaagtaaatgtgtgcttaggtgctttaaaactcaaaggctcttttcagagccactcaagtctcacataaa

SEQ ID NO: 385 - DNA, 1817 bp, Homo sapiens
ctcattgaactcgcctgcagctcttgggttttttgtggcttccttcgttattggagccaggcctacaccccagcaaccatgtccaagggacctgcagttggtattgatcttggcaccacctactcttgtgtgggtgttttccagcacggaaaagtcgagataattgccaatgatcagggaaaccgaaccactccaagctatgtcgcctttacggacactgaacggttgatcggtgatgccgcaaagaatcaagttgcaatgaaccccaccaacacagtttttgatgccaaacgtctgattggacgcagatttgatgatgctgttgtccagtctgatatgaaacattggccctttatggtggtgaatgatgctggcaggcccaaggtccaagtagaatacaagggagagaccaaaagcttctatccagaggaggtgtcttctatggttctgacaaagatgaaggaaattgcagaagcctaccttgggaagactgttaccaatgctgtggtcacagtgccagcttactttaatgactctcagcgtcaggctaccaaagatgctggaactattgctggtctcaatgtacttagaattattaatgagccaactgctgctgctattgcttacggcttagacaaaaaggttggagcagaaagaaacgtgctcatctttgacctgggaggtggcacttttgatgtgtcaatcctcactattgaggatggaatctttgaggtcaagtctacagctggagacacccacttgggtggagaagattttgacaaccgaatggtcaaccattttattgctgagtttaagcgcaagcataagaaggacatcagtgagaacaagagagctgtaagacgcctccgtactgcttgtgaacgtgctaagcgtaccctctcttccagcacccaggccagtattgagatcgattctctctatgaaggaatcgacttctatacctccattacccgtgcccgatttgaagaactgaatgctgacctgttccgtggcaccctggacccagtagagaaagcccttcgagatgccaaactagacaagtcacagattcatgatattgtcctggttggtggttctactcgtatccccaagattcagaagcttctccaagacttcttcaatggaaaagaactgaataagagcatcaaccctgatgaagctgttgcttatggtgcagctgtccaggcagccatcttgtctggagacaagtctgagaatgttcaagatttgctgctcttggatgtcactcctctttcccttggtattgaaactgctggtggagtcatgactgtcctcatcaagcgtaataccaccattcctaccaagcagacacagaccttcactacctattctgacaaccagcctggtgtgcttattcaggtttatgaaggcgagcgtgccatgacaaaggataacaacctgcttggcaagtttgaactcacaggcatgccaggaggaatgcctgggggatttcctggtggtggagctcctccctctggtggtgcttcctcagggcccaccattgaagaggttgattaagccaaccaagtgtagatgtagcattgttccacacatttaaaacatttgaaggacctaaattcgtagcaaattctgtggcagttttaaaaagttaagctgctatagtaagttactgggcattctcaatacttgaatatggaacatatgcacaggggaaggaaataacattgcactttataaacactgtattgtaagtggaaaatgcaatgtcttaaataaaactatttaaaattggcaccataaaaaaaaaaaaaaaa

SEQ ID NO: 386 - DNA, 6414 bp, Homo sapiens
agctgtggcgcgcggggctcagtccggcctggcctcaccgcgggaggcccgagctccctcttcagctaggtcctattggtcttcctgggcgggtcagcattcagtcttcgcccaccttagatccctccactgcgctgtaaaactgccttggagtgcggatctgtgatgctcctgggccaggcctagagtgggcacagcctctgtgggagatgtagacaggatcaaagagtataccttttacggctgttcctcacagctccttttattctccctcaagtcccgaccctttactgggcccatccaacccgccatcacctcttcccaaaccctggaggctgcaggttagaactgcattaagggagctgtcaacatatggaattggagtaggctatgtaccttgcacctaggcttctatctgaacataagggggaatgaataaagccatcaaaagcaatgaccttgttaagaaaagaaagaaaaggagaatgacagctttgtggccttcaagttatctgggaacaaagcaggacaagtctgggcacctgaaggatctactgctttcaagtgtctgctttcagcaaggttatgtgctgctctcctgagcaacatctctgactgtgatgaaacattcaactactgggagccaacacactacctcatctatggggaagggtttcagacttgggaatattccccagcatatgccattcgctcctatgcttacctgttgcttcatgcctggccagctgcatttcatgcaagaattctacaaactaataagattcttgtgttttactttttgcgatgtcttctggcttttgtgagctgtatttgtgaactttacttttacaaggctgtgtgcaagaagtttgggttgcacgtgagtcgaatgatgctagccttcttggttctcagcactggcatgttttgctcatcatcagcattccttcctagtagcttctgtatgtacactacgttgatagccatgactggatggtatatggacaagacttccattgctgtgctgggagtagcagctggggctatcttaggctggccattcagtgcagctcttggtttacccattgcctttgatttgctggtcatgaaacacaggtggaagagtttctttcattggtcgctgatggccctcatactatttctggtgcctgtggtggtcattgacagctactattatgggaagttggtgattgcaccactcaacattgttttgtataatgtctttactcctcatggacctgatctttatggtacagaaccctggtatttctatttaattaatggatttctgaatttcaatgtagcctttgctttggctctcctagtcctaccactgacttctcttatggaatacctgctgcagagatttcatgttcagaatttaggccacccgtattggcttaccttggctccaatgtatatttggtttataattttcttcatccagcctcacaaagaggagagatttcttttccctgtgtatccacttatatgtctctgtggcgctgtggctctctctgcacttcagaaatgttaccactttgtgtttcaacgatatcgcctggagcactatactgtgacatcgaattggctggcattaggaactgtcttcctgtttgggctcttgtcattttctcgctctgtggcactgttcagaggatatcacgggccccttgatttgtatccagaattttaccgaattgctacagacccaaccatccacactgtcccagaaggcagacctgtgaatgtctgtgtgggaaaagagtggtatcgatttcccagcagcttccttcttcctgacaattggcagcttcagttcattccatcagagttcagaggtcagttaccaaaaccttttgcagaaggacctctggccacccggattgttcctactgacatgaatgaccagaatctagaagagccatccagatatattgatatcagtaaatgccattatttagtggatttggacaccatgagagaaacaccccgggagccaaaatattcatccaataaagaagaatggatcagcttggcctatagaccattccttgatgcttctagatcttcaaagctgctgcgggcattctatgtccccttcctgtcagatcagtatacagtgtacgtaaactacaccatcctcaaaccccggaaagcaaagcaaatcaggaagaaaagtggaggttagcaacacacctgtggccccaaaggacaaccatcttgttaactattgattccagtgacctgactccctgcaagtcatcgcctgtaacatttgtaataaaggtcttctgacatgaatactggaatctgggtgctctgggctagtcaaagtctatttcaaagtctaatcaaagtcacatttgctccctgtgtgtgtctctgttctgcatgtaaactttttgcagctaggcagagaaaggccctaaagcacagatagatatattgctccacatctcattgtttttcctctgttcaattatttactagaccggagaagagcagaaccaacttacaggaagaattgaaaatcctggtactggatggctgtgataagctgttctccacactctggcctggcatctgagaactagcaagcctctcttaggccatatgggcttctccaccaaagctgtttggcagctcctagcagaccttcttattgaaatcctcatgctgaaaatgaacacagcctagttgccaacccacatgtccttttcacctccagcaagactaagcttctttaaagcacttcacaggactaggaccctgtcctggagctatctcaggaaaaaggtgaccatttgaggaactgtgacctaattttattataatgatgcctctaattttcatttcctttacaaccaactgtaactataaggttgtattgcttttttgttcagttttagcatgctattttttgaattctagactcctccatgtgaagatatcaacagacaaaactacaactgtataggacatatttggagaaaattctatcaattgatacatttggatgacatcacatttttaagtaatgtaatctgaggccattgctgaggaaattaagaattttcctttttttttaaccacccccagtgaaaaggatcagtgtatatttatagcacctattttttagttctgtctgttgtgaggcacatcctgcatggggcacttctagtcaaataggcaatgataaggacctaattaaaatgtgataagtgtatactattactttaaaagcctttacagtcagtacttcagtttacaaggcactttcacagcatctcgtttgatcctcacagtcacaacatgtggtagacaaggcaggtgatttttatccccattttacagataaggaaacaggctgcgggtggggagtgaggggaggtaaagatagttagttgcctaaggtcacacagccagtaagtaatagagctgggactggaacccaggtttccttactctcatctattgctcctccatattcctcactcaaccatgaaaacattacttgaaaggactgatgaggttaaccagagacctaactgatattgtaactttctattttaaggaagaattgtgtctgtatttgagttctttggagcctccagtctgcctgtgtgttagaccagcacagcagtgctgtgtgatgcagcctgacctgtggcaggaaagtagtgcttctgtttggaagtcatgttcttttgcagccacacaggatccaaatatcagtactattcctgtagtcaatctggggtcacattataggtgccttatttccctaagggtaactgatctgaatatctgcaaataggatgaatctatttttcagaagttccatctttcatttttctttttttttttgagacagagtctcattctgtcgcccatgctggagtgcagtggcgcgatctcggctcgctgcaacctctgcctcccaggttgaagcaattctcatgcctcagccacccgagtagctgggattacaggcatgcgccatcatgcccagctaatttatgtatttttagtagagttggagtttcaccatgttggccaggctggtcttggactcctgacctcaggtcatccacccgcctcagcctcccaaagtgctggtattacaggcgtgagccaccgcacccagccccatctttcattttcaaagagaagggcattctaataggaactggtgccaagagagaagaaaagaagtgataacagaagaaatggctagttacaatattaaaaagctcctctttgagatctcctctgcaggaatatcagagacggagttgaagcgctggagaggtaataggtctagacagtacagaacaataactggggagtgtgtgaggatagactgggctcccccttgcttgaaagatctctggcatttaattctcaattcttgattactattttccagtgtaaaactagcacatatgatctgactacaggacagagaattttaagtgaaacatttgccttacttgcagtaataatgtgctgttcttcacagtagctaaggccctctatgtttcccagaggtaaataagaatccaggaatggaggtccatctgtgatgaatggcttttttctaatcaaagtagtataatgctgttttatctgttttgtcatcttgtttttttttttttttaaaaaaacaaaaccttaattataatatagcgcaaagaaaggccaggactgatgcagggattccttggaaatatcagttcctatcacttttaaaacctgattttggatctctctgttctatgtatgtctttagtgagagcacaatacatggcagaacgctgtgccaaatgttataggtaaggaatatagaaatgaatgttttttgttgtgaaggtgttttcatgtgatattttataaacacattttaaaaaatctccatcactttttagtataggaaggatagctttgcctgggaaaaacagtttcaacacacctgctcagagtagcagttctccctcaaaaaagcagtgttcagcctgcactgactgttctgcttgccaaaaggaggaagcatgcaagatacttatttctccatagattgtggagtatagagggatgtgggactacagattattattttttttccccgagacagagtcttgctctgtcgcccaggttggaacacaatggcacgacctcagctcactgcaacctctgtctcccgggttcaagcaattctcctgcttcagcctcctgagtagctgggattacaggcacacaccaccaccgcactcagctaatttttgtatttttagtagaggtggggttttaccatgttggccaggctggtcttaaactcctgaccttgtaatcatcccgcctcggcctcctaaagtgctaggattacaggcatgagccaccgcacccggcccagataatttttaatagcctttgatcatggggtgagtgagggagtaggtatacttggcaaatgcatggttctctgatttctagctctaaagcagccttatctgaatccccaaatcttgtgatgctgagtaccattactgaaccagtctgcacggtaggcatctgctaccaaaatttacctcctacctggtaggtgtcatctgataagaaagaagacaggttattttaattttttgagataatcacagaaaattgcagcccatactctttattaccgaattcaagtttggaaatagaccctttgttttaaatcatgatgggtctttatcccaatcatttatctgggtcatttttccaactttggagttctaggaaagaaccttgaaaacctgatatgattctgcagcatgaggtctacggtgaccatttgggcaaagctccagtggcaatcatttattgtgttttgcatttcctgggatttattgaaataagaattcactgtgattatgtagtcttctggctagtatcaggcagctctgcttttaatttggttaattttattttctctgaagagggagaagaggtacaatttaatcttggcctccacaagcatattaaagctcacgtgttaatcagtgcattcttatgctcctacattaaatgccttgggtaaatggataaatggacatgtgcccagctttaattttttttgcaacagaaagatcagacttccgtatggcatcgttggatttcagaggctttctggtgtatctgtaaatctgaatgttgccttctgccagtctgtataaccaggtgattcatgctgcaaatgaaatcaggaagcagtaaagtgttaaagcaagagtattgtccaattcacttgtcttcctgatccttgtactttatttcacgtgtcggtgtttacattacatacttatatttcctgtgaaagaaagagttaaataaattgtagcagtttga

SEQ ID NO: 387 - DNA, 886 bp, Homo sapiens; identical to SEQ ID NO: 209

SEQ ID NO: 388 - DNA, 2010 bp, Homo sapiens
gtgctgccgcgggtcacgtgctgcggaggcttggggaggggcggcgaggcggggtttatagcccgggcgcccgcgggccccacgctttgaccgggtcgtggcagccggagtcgtcttcgggacgcgcctgctcttcgcctttcgctgcagtccgtcgatttctttctccaggaagaaaaatggcatccgttgcagttgatccacaaccgagtgtggtgactcgggtggtcaacctgcccttggtgagctccacgtatgacctcatgtcctcagcctatctcagtacaaaggaccagtatccctacctgaagtctgtgtgtgagatggcagagaacggtgtgaagaccatcacctccgtggccatgaccagtgctctgcccatcatccagaagctagagccgcaaattgcagttgccaatacctatgcctgtaaggggctagacaggattgaggagagactgcctattctgaatcagccatcaactcagattgttgccaatgccaaaggcgctgtgactggggcaaaagatgctgtgacgactactgtgactggggccaaggattctgtggccagcacgatcacaggggtgatggacaagaccaaaggggcagtgactggcagtgtggagaagaccaagtctgtggtcagtggcagcattaacacagtcttggggagtcggatgatgcagctcgtgagcagtggcgtagaaaatgcactcaccaaatcagagctgttggtagaacagtacctccctctcactgaggaagaactagaaaaagaagcaaaaaaagttgaaggatttgatctggttcagaagccaagttattatgttagactgggatccctgtctaccaagcttcactcccgtgcctaccagcaggctctcagcagggttaaagaagctaagcaaaaaagccaacagaccatttctcagctccattctactgttcacctgattgaatttgccaggaagaatgtgtatagtgccaatcagaaaattcaggatgctcaggataagctctacctctcatgggtagagtggaaaaggagcattggatatgatgatactgatgagtcccactgtgctgagcacattgagtcacgtactcttgcaattgcccgcaacctgactcagcagctccagaccacgtgccacaccctcctgtccaacatccaaggtgtaccacagaacatccaagatcaagccaagcacatgggggtgatggcaggcgacatctactcagtgttccgcaatgctgcctcctttaaagaagtgtctgacagcctcctcacttctagcaaggggcagctgcagaaaatgaaggaatctttagatgacgtgatggattatcttgttaacaacacgcccctcaactggctggtaggtcccttttatcctcagctgactgagtctcagaatgctcaggaccaaggtgcagagatggacaagagcagccaggagacccagcgatctgagcataaaactcattaaacctgcccctatcactagtgcatgctgtggccagacagatgacaccttttgttatgttgaaattaacttgctaggcaaccctaaattgggaagcaagtagctagtataaaggccctcaattgtagttgtttccagctgaattaagagctttaaagtttctggcattagcagatgatttctgttcacctggtaagaaaagaatgataggcttgtcagagcctatagccagaactcagaaaaaattcaaatgcacttatgttctcattctatggccattgtgttgcctctgttactgtttgtattgaataaaaacatcttcatgtgggctggggtagaaactggtgtctgctctggtgtgatctgaaaaggcgtcttcactgctttatctcatgatgcttgcttgtaaaacttgattttagtttttcatttctcaaataggaatactacctttgaattcaataaaattcactgcaggatagaccagttaaaaaaaaaaaaaaaaaaaaaaaaaaaaaaa

SEQ ID NO: 389 - DNA, 5125 bp, Homo sapiens
ggcccgagccaccgactgcaggaggagaaggggttgtgctcctggccgaggaaggagaaaggggcggggccggcgggcagcgtgcggcagtgcggagctcctgagaccggcgggcacacgggggtctgtggcccccgccgtagcagtggctgccgccgtcgcttggttcccgtcggtctgcgggaggcgggttatggcggcggcggcagtgagagctgtgaatgaattctccgggtggacgagggaagaagaaaggctccggcggcgccagcaacccggtgcctcccaggcctccgcccccttgcctggcccccgcccctcccgccgccgggccggcccctccgcccgagtcgccgcataagcggaacctgtactatttctcctacccgctgtttgtaggcttcgcgctgctgcgtttggtcgccttccacctggggctcctcttcgtgtggctctgccagcgcttctcccgcgccctcatggcagccaagaggagctccggggccgcgccagcacctgcctcggcctcggccccggcgccggtgccgggcggcgaggccgagcgcgtccgagtcttccacaaacaggccttcgagtacatctccattgccctgcgcatcgatgaggatgagaaagcaggacagaaggagcaagctgtggaatggtataagaaaggtattgaagaactggaaaaaggaatagctgttatagttacaggacaaggtgaacagtgtgaaagagctagacgccttcaagctaaaatgatgactaatttggttatggccaaggaccgcttacaacttctagaaagtggagctgttccaaaaagaaaagaccccttaacacacactagtaattcactgcctcgttcaaaaacagttatgaaaactggatctgcaggcctttcaggccaccatagagcacctagttacagtggtttatccatggtttctggagtgaaacagggatctggtcctgctcctaccactcataagggtactccgaaaacaaataggacaaataaaccttctacccctacaactgctactcgtaagaaaaaagacttgaagaattttaggaatgtggacagcaaccttgctaaccttataatgaatgaaattgtggacaatggaacagctgttaaatttgatgatatagctggtcaagacttggcaaaacaagcattgcaagaaattgttattcttccttctctgaggcctgagttgttcacagggcttagagctcctgccagagggctgttactctttggtccacctgggaatgggaagacaatgctggctaaagcagtagctgcagaatcgaatgcaaccttctttaatataagtgctgcaagtttaacttcaaaatacgtgggagaaggagagaaattggtgagggctctttttgctgtggctcgagaacttcaaccttctataatttttatagatgaagttgatagccttttgtgtgaaagaagagaaggggagcacgatgctagtagacgcctaaaaactgaatttctaatagaatttgatggtgtacagtctgctggagatgacagagtacttgtaatgggtgcaactaataggccacaagagcttgatgaggctgttctcaggcgtttcatcaaacgggtatatgtgtctttaccaaatgaggagacaagactacttttgcttaaaaatctgttatgtaaacaaggaagtccattgacccaaaaagaactagcacaacttgctagaatgactgatggatactcaggaagtgacctaacagctttggcaaaagatgcagcactgggtcctatccgagaactaaaaccagaacaggtgaagaatatgtctgccagtgagatgagaaatattcgattatctgacttcactgaatccttgaaaaaaataaaacgcagcgtcagccctcaaactttagaagcgtacatacgttggaacaaggactttggagataccactgtttaaggaaatacctttgtaaacctgcagaacattttacttaaaagaggaaacacaagatcttcaatgaacgtcatcggctacagaaacagcctaagtttacaggactttttagagtcttacatatttgtgcaccaaacttgaagatgaaccagaaaacagacttaaacaaaatatacaatgcaaatgtaattttttgttgtttaaggccttgccttgatggtcacagttatcccaatggacactaagttagagcacaacaaaacctgattctggtcttctttaccaatataatcataatgtaaataataatttgtatattgtgttgcagatgaaagtattccaggaacagtgaatggtagaagacacaagaacatttgtttgtttgtcttctgatgttttttcttaaaatagtaatttctcctacttttcttttctactgttgtcttaactacaggtgattggaatgccaaacactcttaagtttattttcttttttcgttttataaattcagtgtgccaaatgaaacttttttcctaagtaactgtaataggaaaaagtttattttgagagtttcttcttcataaatctacagacattaaacaattgttgtgttctttttaccttttatttttctattaccttgctaccaaacagtttagatagcaatataatagcaaaaaagcaaatatggtaaaatagagaaggtttgaaggtttgagttactctgtcatataacatgtagatcagtcttcatgtgacctgcagtatttttttttctaatgtatttgtcagaaatctgttgtagactgttaacttcttcctgatggaatttattttctgcaagaattattctgatatttaagagagccaattttaactgctgtgaaaatgtttccagtgcaagagaagggaaatactaggaactaagacatttctaatttattgcttattactttcttaattttacaggataattataagcaagtggaactaccatcttttattcttaataattattaatcccttcaatgaaactttaaaaaaactgaatttttatacatggcatacatttttctagttccttctgcttgctttattaactcaaaagttctagttctagtctgttgatctgccttttgttctcccaaaatgtacagtaattccatttgtttgtataaatatgcctggattttcattataaaaatgtcattgtagggagtagagactcatatcatggccttttaaatattgtaataaaggcaaatagatatttgcccttagtttactggttaaaagtttgtttacagaacttttctctggtgcttaaatgatgctatgtaaaatgtcatgagtggaaagaatatttgtagtagtaacaagaatttttcatttaggaaagatttcttaggttttgaaagaatacattaaaataaaaaacttgcccctactaggtaagaactttataatgaagacatacattcttcttaattttactcttgctcttgttaaagatttgtttgaatatagaagatgcatgatttctgggtttttttttttttttgagacagagtttcgctcttgttgcccaggctggagtgcaatggcgcaatctcgactcaccacaacctccgcctcccaggttcaagcaattctcctgcctcagcctcccgagtagctgggattacaggcatgcgccactaccccagctaattttgtatttttagtagagatggggtttctccatgttggtcaggctggtcttgaactcctgacctcaggtgatccgcctgcctcggcctcccaaagtgctgggattacaggcataagccactgcgcccagccagaagatgcatgatttcttaggatcatatgctgtttgtagccataaggtaaatcatgtctcttccaatcatgactttggaactccctgaataataaaaatgagagttgagataaataggggaaaaaaaatttttttcaagccagagctatgcatatgttaggtgatgggtagtatccctttaaggtctcaaacattacaacatcaattatgaaatactgataacgaaaggtagtaatgaaatatatatgatgaaaagaattgagaagttctaaattaagacatttcagttaagctcataaaatttcattgttttcatttaaaagattaacgttattgatacttggataactggctaatcatattaaaggactatgtggttccagctcaacttttaatatattgtctcctttaaaactatcatggttataattctattgggaaagacttttagataacaaagatttcaaatgttaaaagagataaaagtcaggttaatactatcttaaacactgagtcagaaaatcattactgtatagaagttgctttcctgatcaagtctgaacttcagctagtgctagagaactattttctatgacttaactctaaccaagttttattttaagctgtttctttgatagaagggccatgaaaatagagtaatgatatagtaggagataagggattggtttggtctttttcaataaagatagaagttgctgaagttttctgaattaataatgacttagattgtgaccttttagattcggtgttgagctctgtgttgtattacttcctaaaagataatgcttaaacattaagcattagtgtgctcttcatgttaatatggcagagttttgtaaactaaattaaaacttactgatatattggactttgagccaagggaaagaatgagtactatctttccagatatcttaagggtaaaagcttattctaagacagtctgtccattgagaatattagatttctgacttgcaaatatgtttgtactccagaagaattagaggaaaagcagatactagaattctaatttaattacatatacagccgtctttgtttatagtgtagaattctttatattttgtacaaaaactaattcttttggtaaaatgaaccatttacagttcggttttggactctgagtcaaaggattttcctttaaatgcttgtctcaattttagtctggtcttttgtacttttcttcagaagaaatgaattaaagggtacagttgcataaagtgggtttttatcctaatgtattggaaataaatgataaactttaaaaaaaaa

SEQ ID NO: 390 - DNA, 2730 bp, Homo sapiens
cctacccgcgcgcaggccaagttgctgaatcaatggagccctccccaacccgggcgttccccagcgaggcttccttcccatcctcctgaccaccggggcttttcgtgagctcgtctctgatctcgcgcaagagtgacacacaggtgttcaaagacgcttctggggagtgagggaagcggtttacgagtgacttggctggagcctcaggggcgggcactggcacggaacacaccctgaggccagccctggctgcccaggcggagctgcctcttctcccgcgggttggtggacccgctcagtacggagttggggaagctctttcacttcggaggattgctcaacaaccatgctgggcatctggaccctcctacctctggttcttacgtctgttgctagattatcgtccaaaagtgttaatgcccaagtgactgacatcaactccaagggattggaattgaggaagactgttactacagttgagactcagaacttggaaggcctgcatcatgatggccaattctgccataagccctgtcctccaggtgaaaggaaagctagggactgcacagtcaatggggatgaaccagactgcgtgccctgccaagaagggaaggagtacacagacaaagcccatttttcttccaaatgcagaagatgtagattgtgtgatgaaggacatggcttagaagtggaaataaactgcacccggacccagaataccaagtgcagatgtaaaccaaactttttttgtaactctactgtatgtgaacactgtgacccttgcaccaaatgtgaacatggaatcatcaaggaatgcacactcaccagcaacaccaagtgcaaagaggaaggatccagatctaacttggggtggctttgtcttcttcttttgccaattccactaattgtttgggtgaagagaaaggaagtacagaaaacatgcagaaagcacagaaaggaaaaccaaggttctcatgaatctccaaccttaaatcctatgttgacttgagtaaatatatcaccactattgctggagtcatgacactaagtcaagttaaaggctttgttcgaaagaatggtgtcaatgaagccaaaatagatgagatcaagaatgacaatgtccaagacacagcagaacagaaagttcaactgcttcgtaattggcatcaacttcatggaaagaaagaagcgtatgacacattgattaaagatctcaaaaaagccaatctttgtactcttgcagagaaaattcagactatcatcctcaaggacattactagtgactcagaaaattcaaacttcagaaatgaaatccaaagcttggtctagagtgaaaaacaacaaattcagttctgagtatatgcaattagtgtttgaaaagattcttaatagctggctgtaaatactgcttggttttttactgggtacattttatcatttattagcgctgaagagccaacatatttgtagatttttaatatctcatgattctgcctccaaggatgtttaaaatctagttgggaaaacaaacttcatcaagagtaaatgcagtggcatgctaagtacccaaataggagtgtatgcagaggatgaaagattaagattatgctctggcatctaacatatgattctgtagtatgaatgtaatcagtgtatgttagtacaaatgtctatccacaggctaaccccactctatgaatcaatagaagaagctatgaccttttgctgaaatatcagttactgaacaggcaggccactttgcctctaaattacctctgataattctagagattttaccatatttctaaactttgtttataactctgagaagatcatatttatgtaaagtatatgtatttgagtgcagaatttaaataaggctctacctcaaagacctttgcacagtttattggtgtcatattatacaatatttcaattgtgaattcacatagaaaacattaaattataatgtttgactattatatatgtgtatgcattttactggctcaaaactacctacttctttctcaggcatcaaaagcattttgagcaggagagtattactagagctttgccacctctccatttttgccttggtgctcatcttaatggcctaatgcacccccaaacatggaaatatcaccaaaaaatacttaatagtccaccaaaaggcaagactgcccttagaaattctagcctggtttggagatactaactgctctcagagaaagtagctttgtgacatgtcatgaacccatgtttgcaatcaaagatgataaaatagattcttatttttcccccacccccgaaaatgttcaataatgtcccatgtaaaacctgctacaaatggcagcttatacatagcaatggtaaaatcatcatctggatttaggaattgctcttgtcatacccccaagtttctaagatttaagattctccttactactatcctacgtttaaatatctttgaaagtttgtattaaatgtgaattttaagaaataatatttatatttctgtaaatgtaaactgtgaagatagttataaactgaagcagatacctggaaccacctaaagaacttccatttatggaggatttttttgccccttgtgtttggaattataaaatataggtaaaagtacgtaattaaataatgtttttggtaaaaaaaaaaaaaaaaaaaaaaaaaaaaaaaaaaaaaaaaaaaaaaaaaaaaaaaaaaaaaaaaaaa

SEQ ID NO: 391 - DNA, 1689 bp, Homo sapiens
ctggcatcttcctcccctcctcctttccagatcctcagaatggcccttggtgctgcaggcgcggtgggctccgggcccaggcaccgagggggcactggatgactctccaggtgcaggaccctgccatctatgactccaggtcttcagcacccacccaccgtggtacagcgccccgggatgccgtctggagcccggatgccccaccagggggcgcccatgggccccccgggctccccgtacatgggcagccccgccgtgcgacccggcctggcccccgcgggcatggagcccgcccgcaagcgagcagcgcccccgcccgggcagagccaggcacagagccagggccagccggtgcccaccgcccccgcgcggagccgcagtgccaagaggaggaagatggctgacaaaatcctccctcaaaggattcgggagctggtccccgagtcccaggcttacatggacctcttggcatttgagaggaaactggatcaaaccatcatgcggaagcgggtggacatccaggaggctctgaagaggcccatgaagcaaaagcggaagctgcgactctatatctccaacacttttaaccctgcgaagcctgatgctgaggattccgacggcagcattgcctcctgggagctacgggtggaggggaagctcctggatgatcccagcaaacagaagcggaagttctcttctttcttcaagagtttggtcatcgagctggacaaagatctttatggccctgacaaccacctcgttgagtggcatcggacacccacgacccaggagacggacggcttccaggtgaaacggcctggggacctgagtgtgcgctgcacgctgctcctcatgctggactaccagcctccccagttcaaactggatccccgcctagcccggctgctggggctgcacacacagagccgctcagccattgtccaggccctgtggcagtatgtgaagaccaacaggctgcaggactcccatgacaaggaatacatcaatggggacaagtatttccagcagatttttgattgtccccggctgaagttttctgagattccccagcgcctcacagccctgctattgccccctgacccaattgtcatcaaccatgtcatcagcgtggacccttcagaccagaagaagacggcgtgctatgacattgacgtggaggtggaggagccattaaaggggcagatgagcagcttcctcctatccacggccaaccagcaggagatcagtgctctggacagtaagatccatgagacgattgagtccataaaccagctcaagatccagagggacttcatgctaagcttctccagagaccccaaaggctatgtccaagacctgctccgctcccagagccgggacctcaaggtgatgacagatgtagccggcaaccctgaagaggagcgccgggctgagttctaccaccagccctggtcccaggaggccgtcagtcgctacttctactgcaagatccagcagcgcaggcaggagctggagcagtcgctggttgtgcgcaacacctaggagcccaaaaataagcagcacgacggaactttcagccgtgtcccgggccccagcattttgccccgggctccagcatcactcctctgccaccttggggtgtggggctggattaaaagtcattcatctgacaaaaaaaaaaaaaaaaaa

SEQ ID NO: 392 - DNA, 1505 bp, Homo sapiens
tattaaagttcatctgtgtgtgacagaagagattttacccacagtgtggggagtttctatttttctagcctgtgaaatggggttggttgtcctgaggtgcagagaccagaatgtgagacattagactgcatcaggtttgccatctaaacttagggcaaccccaagtgcttgaacctataccaccccactttcctgagctctgtaaagagcatgaagttttcccactgaccccatacactgaggtgccatcacactgcacatttccttccggagaacaagcacgtactcaggtggagatagaactgtctttttacttaatagaaaatgatgtggcagctttaagaggagcgcgtcggtctggggctggtggcttgggtcacgtgacaccggtggtctcgtttgcgcctcttgatgtcgcggcggcgccctgaggacggattgggcaaggctggtccctgtgtgatgagacatcaccctcccaggagcaaggcggaagtctggaggacgctgaggggcggaggcgggagaggcgagctcgcgatgagtggtctcggcaggctcttcgggaaggggaagaaggagaaagggccaacccctgaagaagcaatacagaaactgaaggagacagagaagatactgatcaagaaacaggaatttttggagcagaagattcaacaggagctacaaacagccaagaagtatgggaccaagaataagagagctgccctacaggctttgcggaggaagaaaagattcgaacagcagctggcacaaactgacgggacattatccaccctggagtttcagcgtgaggccattgagaatgccactaccaatgcagaagtccttcgtaccatggagcttgctgcccaaagcatgaagaaggcctaccaggacatggacattgacaaggtagatgaactgatgactgacatcacggaacaacaggaggtggcccagcagatctcagatgccatttctcggcctatgggctttggagatgatgtggatgaggatgaactgctggaggagctagaggagctggagcaggaggaattggcccaggagttgttaaatgtgggcgacaaggaagaagaaccctcagtcaaattgcctagtgtaccttctactcatctgccggcagggccagctcccaaagtggatgaagatgaagaagcactaaagcagttggctgagtgggtatcctgataaatctgggcttgtcttcctaatgctacctttgttggtcctttcttccttaagtgccaagtgctgagctaaaggaggataactttttggggaagtcatgctgagggtggtagtgtgaccctgcctgaaaaaagggtctcttaccctcccagccctggctcaactctgaagaaggatcttgctacagaaggagcccttgggctcccttctctttgatagcagttataatgcccttgttcccaataaaactgggcagatggaatcctagtgtctatactgccttgtctacccctgaa

SEQ ID NO: 393 - DNA, 9165 bp, Homo sapiens
gagcgggtagcgcgcgcgagggcgttgggcgccgccgcgaggcggggaagcgcggggccgcggcggtgcgggttctagggcggcggccgtcgccgtcgcagcagcgccccgagcggggagggccgaggaggcccgacgagctggggatggagagtaccgggcccctcactgcctcagagcgcgtgtgcggctctgggcgcgcacagtgacggtgacggcacccctggcccggcagcgccgaggccgcttcgccagacagccagcggccggcggcaggccgggccatgagcggcaggggccgggccgggcctcgctgaccctggctccgcgcggcagcttccccagtttccgctccggtctctcggcatgagagtccgcccgggcccggggctgcggctgccccagacccgccgcacgctggcgcgctccgggcccgcggagccgcggtgctgatacctgcgccgcactgcgccgcccgcccgtccgctgtgtgccccgggggcgcggccatggaggtggtgggtgacttcgagtacagcaagagggatctcgtgggacacggggccttcgccgtggtcttccgggggcggcaccgccagaaaactgattgggaggtagctattaaaagtattaataaaaagaacttgtcaaaatcacaaatactgcttggaaaggaaattaaaatcttaaaggaacttcagcatgaaaatattgtagcactctatgatgttcaggaattacccaactctgtctttttggtgatggagtattgcaatggtggagacctcgcagattatttgcaagcgaaagggactctcagtgaagacacgatcagagtgtttctgcatcagattgctgctgccatgcgaatcctgcacagcaaaggaatcatccacagagatctcaaaccacagaacatcttgctgtcctatgccaatcgcagaaaatcaagtgtcagtggtattcgcatcaaaatagcggattttggttttgctcgttacctacatagtaacatgatggctgcaacactgtgtggatccccgatgtacatggctcctgaggttattatgtctcaacattatgatgctaaggctgacttgtggagcataggaacagtgatataccaatgcctagttggaaaaccaccttttcaggccaatagtcctcaagacttaaggatgttttatgaaaaaaacaggagcttaatgcctagtattcccagagaaacatcaccttatttggctaatctccttttgggtttgcttcagagaaaccaaaaagatagaatggactttgaagcattttttagccatccttttcttgagcaaggtccagtaaaaaaatcttgcccagttccagtgcccatgtattctggttctgtctctggaagctcctgtggcagctctccatcttgtcgttttgcttctccaccatcccttccagatatgcagcatattcaggaagaaaacttatcttccccaccattgggtcctcccaactatctacaagtttccaaagattctgccagtactagtagcaagaactcttcttgtgacacggatgactttgttttggtgccacacaacatctcgtcagaccactcatgtgatatgccagtggggactgctggcagacgtgcttcaaatgaattcttggtgtgtggagggcagtgtcagcctactgtgtcacctcacagcgaaacagcaccaattccagttcctactcaaataaggaattatcagcgcatagagcagaatcttacatctactgccagctcaggcacaaatgtacatggttctccaagatctgcagtggtacgaaggtccaacaccagccccatgggcttcctccggccgggatcatgctccccagtaccagcagacacagcacagacagttggacgaaggctctccactgggtcttctaggccttactcaccttcccctttggttggtaccattcctgagcaattcagtcagtgctgctgtgggcatcctcagggccatgactccaggagtagaaactcctcaggttctccagtgccacaagctcagtccccacagtctctcttatcgggtgctagactgcagagcgcccccaccctcactgacatctatcagaacaagcagaagctcagaaaacagcactctgaccccgtgtgcccatcccatactggggctgggtacagctactcgcctcagcccagtcggcctggcagccttggaacttctcccaccaagcacttggggtcctctccacggagttctgactggttctttaaaactcctttgccaacaatcattggctctcctactaagaccacagctcctttcaaaatccctaaaactcaagcatcttccaacctgttagccttggttactcgtcatgggcctgctgaagaacagtcgaaagatgggaatgagccacgggaatgtgcccattgcctcttagtgcaaggaagtgagaggcagcgggccgagcagcagagcaaggcagtgtttggcagatctgtcagtaccgggaagttatcagatcaacaaggaaagactcctatatgtcgacatcagggcagcacagacagtttaaatacagaacgaccaatggatatagctccggcaggagcctgtggtggtgttctggcacctcctgcaggtacagcagcaagttccaaggctgtcctcttcactgtagggtctcctccacacagtgcggcagcccccacttgtacccacatgttccttcgaacaagaacaacctcagtggggcccagcaactccgggggctctctttgtgccatgagtggccgcgtgtgcgtggggtccccgcctggcccaggcttcggctcttcccctccaggagcagaggcagctcccagcctgagatacgtgccttacggtgcttcaccccccagcctagaggggctcatcacctttgaagcccctgaactgccggaggagacgctgatggagcgggaacacacagacaccttacgccatctgaatgtgatgctgatgttcactgagtgtgtgctggacctgacagccatgaggggaggaaaccctgagctgtgcacatctgctgtgtccttgtaccagatccaggagagtgtggtggtggaccagatcagtcagctgagcaaagactgggggcgggtggagcagctggtgttgtacatgaaagcagcacagctgcttgcggcttctctgcatcttgccaaagcccagatcaagtccgggaaactgagcccatccacagctgtgaaacaagttgtcaagaatctgaacgaacgatataaattctgcatcaccatgtgcaagaaacttacagaaaagctgaatcgattcttctctgacaaacagaggtttattgatgaaatcaacagtgtgactgcagagaaactcatctataattgtgctgtagaaatggttcagtctgcagccctggatgagatgtttcagcagaccgaagatattgtttatcgctatcataaggcagcccttcttttggaaggcctaagtaggattctacaggaccctgcagatattgaaaatgtgcataaatataaatgtagtattgagagaagactgtcggcgctctgccatagcaccgcaaccgtgtgagcagcaggctcatcccgtggaccggtggtgggaacgtgaggtgatgcctttgggattacagcttgagttctgtcaccccatccccaggaaactgtagcttcttaactggtgactaccaaagaacaagcagtgatttgaaaaaggaaaaacaatccaaaaactacatatttgtaggaaatctgccttattggagaaaatcaccctttccctttttctttgtagaagcaggagcaagagtgtttggctcccagtttggacttggtgaataaatgtaccttagaactaggataatcggtacagttattcttaaagataattaaaaatgaaacaaagtgagtgctcgtcactgggttcatcagagcagtgtgtgaaattccatgtgtttgctgaggtgtaaaggtaaatgtattcacccctcatccaggcagtttgatatttggagtaagtttgtttaaatctgagcatgcatctttaaacagctcaggaagaaatagcttaagaagaagtgaaacatggatcttggaagaaattttgaaatcttcaatttgatcctaatatggatacatgttaatcttccaaaatctttcatattgcactaatttattaaaacaactgtgtattggattttgtaatttaactaaggcacaatggacttgtttaaaatattttacttgattgtatacatagaccctttccagaattcacatgtaatctccagtgaacttttaagtggttaaaacttgtattcatgtgaacctttgcacattttttttttttacttctttatctacacctacagattttctcagtaatgtttttgttagcttttggttccattttttattgtgcatgcagaatgtacattgatgcctgtgaccttaggtttattaaaggctaggtttatttgggcagtattagaaacaaaatcatggatcaagagatactcttgataatttgaatagggccaaaacaaagttggtgacctaaaggcttgttagtgatgtggagttcctacatgcagtgagtggaaaatgaagttcgttttctcttaggaaaatgggcagctgtcttctgcctaatgtgtatttttcatgttaattctgacagttcaccaaatagctagtcatggagaatgcaggcagttaacttaatatccctccaggaatggttcctacgttgtgtattacttggtttcttttacttacctgcttgaatacttgaataaaccattcaccaattttaatccttttattttaatccttttacataaaataatctgaactctttgacaaattgcacagagctctttggcattaatctaattttaatgtactgataaaaacaaacatggttttcctttactttgacaaagtaatgtaatttttaccttatttatctgtatgaaattccagtagttaatttgaacatttatttatatgacgtttgtatttttaggtctttaatacagtgtttctacctctcatttgtaactgcatgcattattcttgaaactaggtaaaactcactgaattgttgtgtaatagcctttttattattgcctgtacaaatgtatattaaggtaaaataaaactgacaaagtgtttctagggtgtagctgggtacatattaagtggcttgttgagccaggtacttccttagtgagtttagagacttggccatgaatatcctttgtcctgccccaggatttagatcttggctactgtcatgcaggcttccaggaacatagactgttttacctccacaaccctatttgttattagtgatactttattttatataatattttttattcacagtgaaatttcattcatgttctttcagttatcacctgtgttatctcagttgtaggtttattctatcctctcctcttcctctcccatttcttttttaagacaggatgaaacaggttcagagaggggaagtgattggcctaaagtcaggaactaggcaagtggtcaagccatgctttgtgactttcaagttaattcttcttgttcttgtatattaaaggtcttggggtagatggtgtgtgtgaaacagtgaagtctcaacagcagaaaagaacaaaatgtaaattcatgaataatggttctggttatacttccattatcaaggctaattaagagattttgccttgagtatagcaataataaacaaatgctttatgtttccctgagtatttttaaatttcatatcgtgtttcatagagtggaaatgtaccagttcatacattcatgggttgacacctgtattcaagccataacctggaaaattgctgaccagctattcctgctctaagggtttgctttaactataccctccactggactatatatagagagagagcctatgctgtatatagttggtttcccacagtccctgtcccctccttccattgagagaagtaactagagcaacagttgttctccctcgctggagtggtgaataggagccgggaggaggggactgttagggtcgggctgcctcagtctccacagtaattaagaggaaattgagttggatacagcggacatgaggcctggaatgggtaccccaaacccatgcatcttaagtgtctgggtccccacgcccccttctgcctgccaggagtactctgtgcagccatcctgtaactgcttcagtccagagaaggatagcatccatccctccctccagctcgcctctctgctgaggctttctcctctccactcagcatttgcaacagcttctctcctggcacttgtctgggaatatcaagttaaaaattacaacacccaattttgataactttagttgagagaaacaacctctagtgaagactgataagtaacttattgcccgtagtcccatgttcctttgtctccaccaagaggaattaccagcccagcagttctgccctcactagagtcccgtccaggagcttgagaggagaggatttttagggctggattgcctcagtctgcacagtaataagttgagttagacacagtggacatgaggacctggactcagatatctgaagaatccttattatttttttgttggcttgttttgagacagagtcaccctgttgcccaggctggagtgcattggcgcaatcttggctcactgcaacctctgcctcccaggttcaagtgattcttcttcctcagcctcccaggtagctaggattacagacatgcgccaccacgctcagctatttttcgtatttttagtggagatggggtttcaccatgttggtcaggctggtcttgaacaccagcctcagcctccccaagtgctgggattacaggcatgagccaccgtgcccggccaaaatccttaatgtttttgttttttggtttttttttttgagacagtcttgctctgtcacccaggctggagtgcagtggcacaatcttggctcactgcaagctccgcctccggggttcatgccattctcccgcctcagcctcccgagtagctgggactacaggcgcctgccaccacgcccggctgattttttgtattttttagtagaggcagggtttcaccgtgttaggatggtctcgatctcctgacctcgtgatccgcccgcctcggcctcccaaagtgctgggattacaggcgtgagccaccgcgcccgggctatccttaatgttgatattagtggttagcacatgttttggaggaggacttcacactttttaaactatgctccctcgtattttctataagcagtcttaaattctttctggaataaagcaagattgatcagtatttctcaaggaggattatttggcaggcagtagctactgctcagagaacttggtattgttacatgcatcctggaagtatctgtgcctatttctagacggcctcagaccacttttttctgagtcctggacccttgaatctgcagccaagcaagctcttgggtccctcccaagtctcatgtttagtaaagccctgtgagaataattttattggtggaggagtcaagatgatacttccctcacctgcatcagaggaaaccacatcagaaacaatccacctagaaaaacactgcatacgggaaagctgacaacttgccctgagaaatcacagctttggtgcaagaggtgaagccgaactggtaaaagatcaaagtgaattcagagatcaaactgtactagggaaaggagcagaggctgagatcttgctgccagcgtgacctctcacagagtggcccagcagaggctgtgcagagatggccagagccaggacccagccctgtggagcccctgggcacatgtggtcccgagtgaagccgtgcctgttgctctgaacaggtgggatcaatctgtaggtttttccacttttcacagagtgtggctctctttaggtctgcactccctctctgcgcagggcggacctccctgggctctgcagcatgatctcctgtcccaagacagtcgtgctcttggacagttagcttctgtcattaggaagtgcccacatgagctcttgtttattggaaaccgtgttctatgcctcctttggggtttctgcaactcaatttggcaggtagcttagtggtccacttggtctcaaattccagctccaccatgtgcagttgtgtgttctttggcaagttcctcccctcctccgaatctgtcagtgggggaagagtgcatgtctcacagagttgaggtgagaaataagttaatgaatatgaaattctttgcccagcccctggcacgtggaagggctcagcaatcctgtatccgttgtagtggtcatcactctgtggctcttcactgcttttgttttgttttgggagggggtggagaacaatttgttctgtgtttgtgtggggcaaggcctgtcttcagggctctctccaaccacgtacgctctggctggagcttctgaaaggacacagttcttgcatagaagttgctttctccagcttgcccaccaggcagtctggcttcagacatctatgttgcccttttaagtcaatttggctgtttaagtggaatgtttgtgtcagtctgataattgttaattcatttgatcctcataccaacccttacttgcctccttttacagatggaaaaatcaaacttggacagtaatttccacaaggaaaagccccacagctggaaagcggtgggagcaggaggccacactgggtacaggagtacccatctccccacaggagccccacactgtctcacccttaggaagcccaaatgctcactccttgagtttctaatgcattctttctgatgtacaggaagaggggaaggaaggaagagcttttccatttggtgctccaatgtctcctgctggacccatctgcctagtggaaggcagcaaaatttcaagaaacaggtgaggttgagcagcttggtgcaaccccatggggcctggagttggagctcaacagcaatggatttcagagaccaccctgaaactcccagtaaaaaagacttgggagacatgttaataaactcaagcatttgatcgacccaaaaaaaaaaaaaaaaaaaaaaaaaaa

SEQ ID NO: 394 - DNA, 1681 bp, Homo sapiens
tcaggttgaagatgaaatccactgaggagggaagtccagcaccctgtgtgccagtccagaactggcccatctgtagaccccctgaaaatcatatgggcttggatttggatattctcaacagaaagggttaaaggctgatggtacctaaagcctggtacttgaattttgatcaagataagctgccttaagttctcttcattacacaaatgatcctagataattgatagatcctgtggttcaactggatttctagatagaagctggattcatgtgatgccagaggagtaaaatttcaagagactgaaaccagatctgagtttcgctgttccagtctggacctctttggtgctgtaaatcctggatatactgtagatgagtactgcgtttttcttttatgacggagggtcgctcttgttgccgtggctggagtgcaatggtgcgatctcggctcactgcaacctttgcctcgtgggttcaagtgattctcctgcctcagcctcccgagtagctgggattgcaggcgtccaccaccacgcccagctaatttttgtattttagtagagagagggtttcaccgtgttggccacgctggtcgggaactcctgacctcaggcctctcttcagcttctggagacctcactatcctattatgtctttgtgtgaagacatgctgctttgtaattatcgaaagtgtcgcatcaaactctctggctatgcatgggtcactgcctgctctcacatcttctgtgatcagcatggcagtggtgagtttagtcgctcaccagctatctgtcctgcctgcaacagtaccctttctggaaagctagatattgtccgcacagaactcagtccatcagaggaatataaagctatggtattggcaggactgcgaccagagatcgtgttggacattagctcccgagcgctggccttctggacatatcaggtacatcaggaacgtctctatcaagaatacaatttcagcaaggctgagggccatctgaaacagatggagaagatatatactcagcaaatacaaagcaaggatgtagaattgacctctatgaaaggggaggttacctccatgaagaaagtactagaagaatacaagaaaaagttcagtgacatctctgagaaacttatggagcgcaatcgtcagtatcaaaagctccaaggcctctatgatagccttaggctacgaaacatcactattgctaaccatgaaggcacccttgaaccatccatgattgcacagtctggtgttcttggcttcccattaggtaacaactccaagtttcctttggataatacacctgttcgaaatcggggcgatggagatggagattttcagttcagaccattttttgcgggttctcccacagcacctgaacccagcaacagcttttttagttttgtctctccaagtcgtgaattagagcagcagcaagtttctagcagggccttcaaagtaaaaagaatttgagccacgcatagtgtcacgcacctgtgatcccagctacttaggaggttgaggctgggaggatcacttgagcccaggagtctgaggctttagtgatctaagatcatgccactgcactccagcctgggcaacagagtgagaccctgtttctaaaaaaaaataaagataatttagctaactttaaaaaaaaaaaaaaaaaaa

SEQ ID NO: 395 - DNA, 3647 bp, Homo sapiens
aaaagagacagggctgctttaagagagaaacaggaagttgtaactagaagccatctgaatactaagccagggcagaatgcttgtgaagtagcaactaaagtggcagtgtttcttctgaaattctcaggcagtcagactgtcttaggcaaatcttgataaaatagcctttatccaggtttttatctaaggaatcccaagaagactggggaatggagagacagtcaagggttatgtcagaaaaggatgagtatcagtttcaacatcagggagcggtggagctgcttgtcttcaattttttgctcatccttaccattttgacaatctggttatttaaaaatcatcgattccgcttcttgcatgaaactggaggagcaatggtgtatggccttataatgggactaattttacgatatgctacagcaccaactgatattgaaagtggaactgtctatgactgtgtaaaactaactttcagtccatcaactctgctggttaatatcactgaccaagtttatgaatataaatacaaaagagaaataagtcagcacaacatcaatcctcatcaaggaaatgctatacttgaaaagatgacatttgatccagaaatcttcttcaatgttttactgccaccaattatatttcatgcaggatatagtctaaagaagagacacttttttcaaaacttaggatctattttaacgtatgccttcttgggaactgccatctcctgcatcgtcatagggttaattatgtatggttttgtgaaggctatgatacatgctggccagctgaaaaatggagactttcatttcactgactgtttattttttggttcactgatgtctgctacagatccagtgacagtgctggccattttccatgaactgcacgtcgaccctgacctgtacacactcttgtttggagagagtgtgttgaatgatgcagtggccatagtccttacatattctatatccatttacagtcccaaggagaatccaaatgcatttgatgccgcagcattcttccagtctgtggggaatttcctgggaatcttcgctggctcatttgcaatggggtctgcgtatgccatcatcacagcactgttgaccaaatttaccaagctgtgtgagttcccgatgctggaaaccggcctgtttttcctgctttcttggagtgccttcctgtctgccgaggctgccggcctaacagggatagttgctgttctcttctgtggagtcacacaagcacattatacctacaacaatctgtcttcggattccaaaataagaactaaacagttgtttgaatttatgaactttttggcggagaacgtcatcttctgttacatgggcctggcactgttcacgttccagaatcatatctttaatgctctttttatacttggagcctttctagcaatttttgttgccagagcctgcaacatatatcccctctccttcctcctgaatctaggccgaaaacagaagatcccctggaactttcagcacatgatgatgttttcaggtttgcgaggagcgatcgcatttgccttagctattcggaacacagaatctcagcccaaacaaatgatgtttaccactacgctgctcctcgtgttcttcactgtctgggtatttggaggaggaacaacccccatgttgacttggcttcagatcagagttggcgtggacctggatgaaaatctgaaggaggacccctcctcacaacaccaggaagcaaataacttggataaaaacatgacgaaagcagagagtgctcggctcttcagaatgtggtatagctttgaccacaagtatctgaaaccaattttaacccactctggtcctccgctgactacaacattacctgaatggtgtggtccgatttccaggctgcttaccagtcctcaagcctatggggaacagctaaaagaggatgatgtggaatgcattgtaaaccaggatgaactagccataaattaccaggagcaagcctcctcaccctgcagtcctcctgcaaggctaggtctggaccagaaagcttcaccccagacgccaggcaaggaaaacatttatgagggagacctcggcctgggaggctatgaactcaagcttgagcaaactttgggtcaatcccagttgaattaattggcatgaagagtacagatgtaatcacaagtaatgcaagactcactgaggaatacaagccaagctgatgaggcagtacaggggagaggctggaaaacatattaagagcataaattggagagaatcaaagccttgtcacatggatcctctggtgcctgaagaaatgagattttattatccctctctattatgcaaatgaatttagttttttgacagcagccattctgattactggattggctggggtggggatggaggtatcaggagtctagctgctggaggatgggacagctgtgctgggtcttcagggcatttctgctgcgaatgcggctctccaggcccttcacttctattctggattttattccctccattaaggagagtttaaaaataaaagaaagcttctgagagtaaacattttgctcctaagctgaagggaatgcccagctatttagtaagtgataagtttcttattttgaggacttgactcccatttgctctcagtgaccccagggcagagcccagagaagtgttccgtacccactgctgatggtttcccagagcccacactgagttgaagaacctattgttcttcttggcatccttcttatgctacttctcccatcgctcaaaggggttgcctatggctgggtgtgccctgccctaaatgcagcaccactttcaagcttagtaggaccattccaagaaaaccaggtttcttctccccataccacgttgtgcctgaagaacaagccttcccgtccttgcctgcatgtgagtcacttcttggctgtgcagcaggtccccccctccccgcgatatgctggagggtaggattctgcagcctgtgttgctctctacctggcagcagactgtgcaggagccccaacctgtcctccaattccagcattcacagctgatgagcagtgcaggagcagggcgagaggaacagagccaatgatgtgtgggttacactgaggagccaaggacagggcctcaggtctcccccttacaaggcgtggctcatggcctgcattccagagaccaacatgatagcttttaattcagctgcatgacctgtgccttttaagccataaagatacctcaagcctagcacctcttgaaatccagatgttcatattagactcgaaaaaataggctccaggcctaggtgcccaggctatgatgagtctgcttttgaaggaggtagggaatgacatcttccttggacccaaagcttaaaagtaatgtatgctttgctgaccactgtttgttaggccttaaacaacattcactgtggtggtatcaggcacactgctatgtgcatcaattatttttttgctttccaaacagaatctctggggcacaagttttacactcaagctaagtataactttgtcatttcaggtaaatatgacaagtggtggagcatgaagttttctaatttgacttaatcctaataaatttttgttacaaagtaaaaaaaaaaaaaaaaaaaaa

SEQ ID NO: 396 - DNA, 2500 bp, Homo sapiens
ttccgcagaaagcaagattgggcctatccgcgatgagaacggcgtggagggggaattaaggctggaactggagagggaggggtctgcggtcagtcggacgcggcgctggaaatccggcggaggacctagaagtagcgggagcgatctgtgggcggggcgaacggcctgccggccgacggctcccacatcaggacgagaaggagccctcgagttaccgtgggagctgtgggagctgccctgtgactcttaggaagatgccgtaccttggctccgaggacgtggtgaaggagctgaagaaggctctgtgcaatcctcacattcaagctgataggctgcgctaccggaatgtcatccagcgagtgattaggtacatgactcaaggcttggacatgtctggtgtttttatggaaatggtgaaggccagtgccactgtagatattgtccagaagaagttggtttatctgtacatgtgcacatatgctcccctgaaaccagatctggctctcctggccatcaatacgctgtgcaaagactgctcagaccccaatccaatggtgcgagggctggcgttacggagcatgtgtagcctcaggatgcctggtgtgcaggagtatatacaacagcctattctcaatggtctgcgggataaggcttcatatgtcaggagagtggcagtccttggatgtgccaagatgcataatcttcatggagactctgaagtagatggtgccctggtaaatgaattatacagtttgctgcgtgaccaggatccaattgtagttgtgaactgcttgaggtctctagaggaaattctgaaacaggaaggaggcgttgtcatcaataagcccattgctcaccatctcttaaatcgaatgtcaaaactggaccaatggggccaggctgaagtattgaactttctgctacgctaccaaccccgcagtgaggaagaactatttgacattctcaatctgttggatagtttcctcaagagcagtagcccaggtgtggtgatgggagctaccaaactttttctgatcttggcaaaaatgtttccccacgtacaaactgatgtccttgtgcgggtcaagggacctttgctagctgcctgttcttcagagagccgtgagctctgttttgttgctctttgtcatgtacgccagatcttgcatagtttaccaggtcactttagcagccactacaaaaagtttttttgctcctactcggagccccactacatcaaactacagaaagtggaggtgctgtgtgaactggtgaacgatgagaatgtgcagcaggtgctagaggagcttcgagggtactgcacggatgtgtctgcggactttgcacaggctgccatctttgccataggtggcattgccaggacttacacagatcaatgtgttcagattttaacagagttgctgggtcttcgacaagagcacattaccacagtggtggtgcagactttccgagacctggtttggttgtgtcctcagtgtactgaagctgtatgtcaggccctgcccggctgtgaagagaacattcaagatagtgaggggaagcaagcacttatttggctacttggtgtccatggggaaagaattcctaatgctccttatgtgttagaggactttgttgagaatgtgaagtcggaaacatttccagctgttaagatggagctgctcactgctttgctgcgccttttcctctcccgacctgctgagtgccaggacatgctaggacgtttgttgtattactgcatagaggaagaaaaagatatggctgtacgggaccgaggtctcttctattatcgcctcctcttagttggcattgatgaagttaagcggattctgtgtagccctaaatctgaccctactcttggacttttggaggatccggcagaaagacctgtgaatagctgggcctcagacttcaacacactggtgccagtgtatggcaaagcccactgggcaactatctctaaatgccagggggcagagcgttgtgacccagagcttcctaaaacttcatcctttgccgcatcaggacccttgattcctgaagagaacaaggagagggtacaagaactccctgattctggagccctcatgctagtccccaatcgccagcttactgctgattattttgagaaaacttggcttagccttaaagttgctcatcagcaagtgttgccttggcggggagaattccatcctgacaccctccagatggctcttcaagtagtgaacatccagaccatcgcaatgagtagggctgggtctcggccatggaaagcatacctcagtgctcaggatgatactggctgtctgttcttaacagaactgctattggagcctggaaactcagaaatgcagatctctgtgaaacaaaatgaagcaagaacggagacgctgaatagttttatttctgtattagaaactgtgattggaacaattgaagaaataaaatcataacagagtcttgaaaaaaaaaaaaaaaa

SEQ ID NO: 397 - DNA, 2379 bp, Homo sapiens
agtcacccaggaaaagcgaaccgcgccaggccctgtcatcgaccgctgggtccgtcctcccagcgctcgcggccgctcacatgggcgtggccctgcgtgacctgccggggcgtcacgtgagctcccggagtcatgtgaccgccgtcttgacagtgttccacgggcgctgcttcctgcctgggtttggagttgtcaccactttcccctctccgtctcctgcgggcgcaatggaggaggaggatgaggaagcgcgggcgctcctggcaggcggccctgacgaggccgacagaggtgccccggccgcccctggagccctgccggccctctgcgaccccagtcgcctggcgcaccggcttttggtgctgttactgatgtgcttccttggctttggcagctatttttgctatgataatcctgctgcccttcagactcaagttaaacgagatatgcaagtgaataccacgaaattcatgctgctgtatgcctggtattcttggcccaatgtagttttgtgtttctttggtggctttttgatagaccgagtatttggaatacgatggggcacaatcatttttagctgctttgtttgcattggacaggttgtttttgccctgggtggaatatttaatgctttttggctgatggaatttggaagatttgtatttgggattggtggcgagtccttagcagttgcccagaatacatatgctgtgagctggtttaaaggcaaagaattaaacctggtgtttggacttcaacttagcatggctagaattggaagtacagtaaacatgaacctcatgggatggctgtattctaagattgaagctttgttaggttctgctggtcacacaaccctcgggatcacacttatgattgggggtataacgtgtattctttcactaatctgtgccttggctcttgcctacttggatcagagagcagagagaatccttcataaagaacaaggaaaaacaggtgaagttattaaattaactgatgtaaaggacttctccttacccctgtggcttatatttatcatctgtgtctgctattatgttgctgtgttcccttttattggacttgggaaagttttctttacagagaaatttggattttcttcccaggcagcaagtgcaattaacagtgttgtatatgtcatatcagctcccatgtccccggtgtttgggctcctggtggataaaacagggaagaacatcatctgggttctttgcgcagtagcagccactcttgtgtcccacatgatgctggcctttacgatgtggaacccttggattgctatgtgtcttctgggactctcctactcattgcttgcctgtgcattgtggccaatggtggcatttgtagttcctgaacatcagctgggaactgcatatggcttcatgcagtccattcagaatcttgggttggccatcatttccatcattgctggtatgatactggattctcgggggtatttgtttttggaagtgttcttcattgcctgtgtttctttgtcacttttatctgtggtcttactctatttggtgaatcgtgcccagggtgggaacctaaattattctgcaagacaaagggaagaaataaaattttcccatactgaatgagaagttaaaatgaatgtgtcatgagaatgggcttaacacatcgttggtttgaaaacttccatttttaaaaatttagagtttagtcattagaaaaaataatggactggaaagttatatttatatccaaatatacctatttcaaagtgtatttgtgaggcctgttttagcctgtgtcttttgtattgtgtgttgctaaagaattctacttttagtaggctaatcaacaatgaaagggttagaaaattgctgtggaacatccaggtgaacttcaggaaagacagtgaaaaatggaaaacgttggagcttctgttgagataatcttcattaggtatatatcttagggatacagccttttctttatcttatagcaggaaaaaaaaacttttgagggaaatagaagggctgcgttacacaaaataaacaatggcattgtcataggccttccttttactagtagggcataatgctagggaatatgtgaagatgtttttatgaagtctctttctgatcacgaacaatagcttgcgctctactctgtagttatgtggattgccgagcaatgacccttttcaatttcttatttctgtgttactgaggaccctaatcacttagggatgtaattttatagtataaactttctgtacagtttttcttatagtctaataagtaaaaagtgtccttcaaattatgataattgcctatgtacatggataaattaaaacactgcacacggagtaaaaaaaaaaaaaaaaaa

SEQ ID NO: 398 - DNA, 1251 bp, Homo sapiens
acgccgcctgggtcccagtccccgtcccatcccccggcggcctaggcagcgtttccagccccgagaactttgttctttttgtcccgccccctgcgcccaaccgcctgcgccgccttccggcccgagttctggagactcaacatgaagctaccggccagggttttctttactctggggtcccggctgccctgtggcctcgctcctcggaggtttttcagttatgggacaaaaatattatatcaaaacactgaagctttgcaatctaaattcttttcacctcttcaaaaagcgatgctaccacctaatagttttcaaggaaaagtggcattcattactgggggaggtactggccttggtaaaggaatgacaactcttctgtccagcctaggtgctcagtgcgtgatagccagccggaagatggatgttttgaaagctaccgcagaacaaatttcttctcaaactggaaataaggttcatgcaattcagtgtgatgtgagggatcctgatatggttcaaaacactgtgtcagaactgatcaaagttgcaggacatcctaatattgtgataaacaatgcagcagggaattttatttctcctactgaaagactttctcctaatgcttggaaaaccataactgacatagttctaaatggcacagccttcgtgacactagaaattggaaaacaactaattaaagcacagaaaggagcagcatttctttctattactactatctatgctgagactggttcaggttttgtagtaccaagtgcttctgccaaagcaggtgtggaagccatgagcaagtctcttgcagctgaatggggtaaatatggaatgcgattcaatgtgattcaaccagggcctataaaaaccaaaggtgcctttagccgtctggacccaactggaacatttgagaaagaaatgattggcagaattccctgtggtcgcctggggactgtagaagaactcgcaaatcttgctgctttcctttgtagtgattatgcttcttggattaatggagcagtcattaaatttgacggtggagaggaagtacttatttcaggggaattcaacgacctgagaaaggtcaccaaggagcagtgggacaccatagaagaactcatcaggaagacaaaaggttcctaagaccactttggccttcatcttggttacagaaaagggaatagaaatgaaacaaattatctctcatcttttgactatttcaagtctaataaattcttaattaac

SEQ ID NO: 399 - DNA, 3939 bp, Homo sapiens
ggtcggcctctgctgcgcctgcgtggtcgggaggggaagtgaggcggtttcctcggcgccttttccggcagcggcggcggcagaactgggaggaggagttggaggccggagggagcccgcgctcggggcggcggctggaggcagcgcaccgagttcccgcgaggatccatgacctgacggggccccggagccgcgctgcctctcgggtgtcctgggtcggtggggagcccagtgctcgcaggccggcgggcgggccggagggctgcagtctccctcgcggtgagaggaaggcggaggagcgggaaccgcggcggcgctcgcgcggcgcctgcggggggaagggcagttccgggccgggccgcgcctcagcagggcggcggctcccagcgcagtctcagggcccgggtggcggcggcgactggagaaatcaagttgtgcggtcggtgatgcccgagtgagcggggggcctgggcctctgcccttaggaggcaactcccacgcaggccgcaaaggcgctctcgcggccgagaggcttcgtttcggtttcgcggcggcggcggcgttgttggctgaggggacccgggacacctgaatgcccccggccccggctcctccgacgcgatggggaaggtgctatccaaaatcttcgggaacaaggaaatgcggatcctcatgttgggcctggacgcggccggcaagacaacaatcctgtacaagttgaagctgggccagtcggtgaccaccattcccactgtgggtttcaacgtggagacggtgacttacaaaaatgtcaagttcaacgtatgggatgtgggcggccaggacaagatccggccgctctggcggcattactacactgggacccaaggtctcatcttcgtagtggactgcgccgaccgcgaccgcatcgatgaggctcgccaggagctgcaccgcattatcaatgaccgggagatgagggacgccataatcctcatcttcgccaacaagcaggacctgcccgatgccatgaaaccccacgagatccaggagaaactgggcctgacccggattcgggacaggaactggtatgtgcagccctcctgtgccacctcaggggacggactctatgaggggctcacatggttaacctctaactacaaatcttaatgagcattctccacccatcccctggaaggagagaaatcaaaaacccattcataggattatcgccaccatcacctctttcaattgccactttctcttcttttgaatttgaactctggagttactgttctacagtttggcggggacggggcttgggggttttctcttttgtttgtttccctttctttttccttttttttttttttttttttttgttggctttgcgttaggatgctctgatctgacatttgacatgaacacaaagttgctagatgctcttgttgacttccagcagatgggatgggggaaacacagcagttcttggtaaagtcctttgtaataatagtttgatttttttatttcgagagaatctttcattttcctatgtatgcttttttccttttttgcccagtttccttatcacttgctgtagatggcttattttgcattcatgcagactatgttgcaagtctgtttcatctagtaaactgaaaattattgcttaatcaaactgccgtttgtcttttatatttaaggccttccccccccttccttatgagttctaacttagtaatttcaaatgtgaccttttatatctaagaccagtatagtaaacttagcccacagtggcaaataatgagtaatattgtaatatgttccagttgcacctcagtatgttaaacaggtaatgtaagaagttctctgaaatgtcagcaagtaagttctgaaacacatcatgcatgagtaggaataaaacccaagttccccataacgtagataacttaatgctgcataaaaatatgaaagtgtaacccatgaaggacactttttctttccactgcaaagttagccactttgctgtttttcctcttttttaaactttgaaaatagactctttccagaaattggagcaataatggtgttaccacacacagattaaataatttgtagatattttaagtgacttttgggcaaaactggaatgtatacttttaccttgtttcaaacacctaagaccagtaatttaaaaattactaaaaggtttactttgttcattaataaaacatttaacaattcaaattatatgcaccttttacctagttgaaaaaaatacacattcctgttttcacattatagcaactgattaagctgaagctgtaagtcattttttatagatgagtgatccgcatctccatcaattagaacactggaaaagatgttttataaaagaggtatttaattttgtttgtaggattaactcatgcaaataataaaaaagatatcctgttggttcaatagtacactgtctcctttaaggaaggaagcgtgatgaatgaatgatgtgtagacttgagggatgactattaaaggggacgtaggatgaagagaaagaacctacagatgacaatgaatgtaaacttatttttcttcatgtgtaagcagtgtgctcgctggtgatatccagatcctaacaagattacttggttagctggttaggaccagtaactggattgcgaccactatgataatattttgaaccaaatgttaatgcttgatgcagaattgtaaagcagcatctggttcctatatagccttaaggattaattttagtgatcctcaaggaattaaatagggaatttcagaaatgtagactgcaaaggcagtatacaggaaaaggtggagtgggttttgtttatgagggtgtctgaaaactaaaattgagcgggatatcatggtatagttggacagtattggtccttcacactttggccatattgtataatggagcttttaccaaagatgtatgagaagtgtaagactataaaaaaatgaactattcaaagtaaaactcttaacaaacattttacttaaagcagatgcaaaagggtattctcatgtaggctcctgttggtgcagagggatttttttgatttcaggatacaactaaagtacgaagttctcagtttcactttagtagaaagagctctagaaatgaggctgataaacacatctaagaacactggttgctttctaaaatttccaaagctccaccataaatgtaatttttagtgtttcaaatgattgcattttaaagtatataaatatgggttatccaatatcaatgctatagtaacatcctgaaacaaaacaagcacaaaggtataaatgcctaaactggaggaaacttgaaaccctcatgttaaatcttaaatgtagtatttctaacttgtgaagacagattggtaggcagccatttttttgtgtcttaaaataactgggggcatagttaaaattttatacatcaagtgattgctattattgaatgttgcaggtgagatgtggttatttttagtttatttgaaatgtttgactggaaaggggggagggggaagcaaatatttgaaatttggaaaaccctaaaccttttggtaagaaattgtaattttcacttaaaattttctttaaggatataagaggtttataattgatgtagttaaattgaacaataaccattggtgactggagcaggtaattatagcctgcagaaaaaattatctaagaattttaaaaataagatcctgaagttgtttaattgcatccatttctgtatttatgtgaatttataaactgcagtaagttttgaatgaggttaatcttgtttaatataagtaaatgagtctgtagactgtgatctccccaaactaaaaagtacagtacttggaattgtgttctttatggttgtagtgttggtaaagcactaatatgcagaaaataaaggaattacacagtgca

SEQ ID NO: 400 - DNA, 1678 bp, Homo sapiens
gcatatactgtcatcatcttggaaagaaaaggctgagaacgtaaaactgaggacagaggaggaaagcagggtgacccctgatgttgccctagaaaatggaaaacaaaacacagcaaaacagaaaaacagaagatctgactctgcctttagccaggaaaacagtttgggggagtaaaaagtattagggaaaagagtgggcattttgcctggaaaaaaggtttctagagccatctgggctttccgggaacctggaccagactctggcccagtaggatgtccccgtgtcctccccagcagagcaggaacagggtgatacagctgtccacttcagagctaggagagatggaactgacttggcaggagatcatgtccatcaccgagctgcagggtctgaatgctccaagtgagccatcatttgagccccaagccccagctccataccttggacctccaccacccacaacttactgcccctgctcaatccacccagattctggcttcccacttcctccaccaccttatgagctcccagcatccacatcccatgtcccagatcccccatactcctatggcaacatggccataccagtctccaagccactgagcctctcaggcctgctcagtgagccgctccaagaccccttagccctcctggacattgggctgccagcagggccacctaagccccaagaagacccagaatccgactcaggattatccctcaactatagcgatgctgaatctcttgagctggaggggacagaggctggtcggcggcgcagcgaatatgtagagatgtacccagtggagtacccctactcactcatgcccaactccttggcccactccaactataccttgccagctgctgagacccccttggccttagagccctcctcaggccctgtgcgggctaagcccactgcacggggggaggcagggagtcgggatgaacgtcgggccttggccatgaagattccttttcctacggacaagattgtcaacttgccggtagatgactttaatgagctattggcaaggtacccgctgacagagagccagctagcgctagtccgggacatccgacgacggggcaaaaacaaggtggcagcccagaactgccgcaagaggaagctggaaaccattgtgcagctggagcgggagctggagcggctgaccaatgaacgggagcggcttctcagggcccgcggggaggcagaccggaccctggaggtcatgcgccaacagctgacagagctgtaccgtgacattttccagcaccttcgggatgaatcaggcaacagctactctcctgaagagtacgcgctgcaacaggctgccgatgggaccatcttccttgtgccccgggggaccaagatggaggccacagactgagctggcccagaggggtggaactgctgatgggatttccttcattcccttctgataaaggtactccccaaccctgagtcccagaaggagctgagttctctagaccagaagaggatgacaatggcaacaagtgtttggaagttccaaggtgtgttcaaagaggcttgccttgagggagggctggaatctgtcttccctgactcggctcctcaggtctttagcctccaccttgtctaagctttggtctataaagtgcgctacagaaaaaaaaaaaaaaaaaaaaaaa

SEQ ID NO: 401 - DNA, 3116 bp, Homo sapiens
gcgcggcggccgggcggggcgagcggaggcgagtggaggacgcgtagacgcgccgcggtccccgcctgccgctgctccgccgcagtcgccgctccagtctatccggcactaggaacagccccgagcggcgagacggtccccgccatgtctgcggccatgagggagaggttcgaccggttcctgcacgagaagaactgcatgactgaccttctggccaagctcgaggccaaaaccggcgtgaacaggagcttcatcgctcttggtgtcatcggactggtggccttgtacctggtgttcggttatggagcctctctcctctgcaacctgataggatttggctacccagcctacatctcaattaaagctatagagagtcccaacaaagaagatgatacccagtggctgacctactgggtagtgtatggtgtgttcagcattgctgaattcttctctgatatcttcctgtcatggttccccttctactacatgctgaagtgtggcttcctgttgtggtgcatggccccgagcccttctaatggggctgaactgctctacaagcgcatcatccgtcctttcttcctgaagcacgagtcccagatggacagtgtggtcaaggaccttaaagacaaggccaaagagactgcagatgccatcactaaagaagcgaagaaagctaccgtgaatttactgggtgaagaaaagaagagcacctaaaccagactggatggaaacttcctgccctctctgtaccttcctactggagcttgatgttatattagggactgtggtataattattttaataatgttgccttggaaacatttttgagatattaaagattggaatgtgttgtaagtttctttgcttacttttactgtctatatatatagggagcactttaaacttaatgcagtgggcagtgtccacgtttttggaaaatgtattttgcctctgggtaggaaaagatgtatgttgctatcctgcaggaaatataaacttaaaataaaattatataccccacaggctgtgtactttactgggctctccctgcacgcattttctctgtagttacatttaggataatctttatggttctacttcctgtaatgtacaattttatataattctgaaatgtttttaatgtatttgtgcacatgtacatatggaaatgttactgtctgactacaacatgcatcatgctcatggggagggagcaggggaaggttgtatgtgtcatttataacttctgtacagtaagaccacctgccaaaagctggaggaaccattgtgctggtgtggtctactaaataatactttaggaaatacgtgattaatatgcaagtgaacaaagtgagaaatgaaatcgaatggagattggcctggttgtttccgtagtatatggcatatgaataccaggatagctttataaagcagttagttagttagttactcactctagtgataaatcgggaaatttacacacacacacacacacacacacacacacacacacacacagagtaacctgtaactctcaattccctgaaaaactagtaatactgtcttatctgctataaactttacatatttgtctattgtcaagatgctacaatggaaaccatttctggttttatcttcaaagcggagaaacatgttgatttagtcttctttcccaatcttcttttttaaaccagtttaaggaacttctgaagatttgtccacctctgattacatgtatgttcttgtttgtatcattagcaacaacatgctaatgacgacacctagctctaagagcaattctgggagaatgaaaggaagtataaagtaacccataatctgcttggcaatagttaagtcaatctatcttcagtttttctctggcctttaaggtcaaacacaagaggcttccctagtttacaagtcagagtcacttgtagtccatttaaatgccctcatccgtattctttgtgttgataagctgcacatgactacatagtaagtacagaacagtaaagttaaaacggatgtctccattgatctgccaaatcgttatagagagcaatttgtctggactagaaaatctgagttttacaccatactgttaagagtccttttgaattaaactcgactaaaacaagtgtataactaaactaacaagattaaatatccagccagtacagtattttttaaggcaaataaagatgattagctcaccttgagataacaatcaggtaagatcataacaatgtctcatgatgtaaaaaatattaaagatatcaatactaagtgacagtatcactctaatataatatggatcagagcatttattttggggaggaaaacagtggtgattaccggcattttattaaacttaaaactttgtagaaagcaaacaaaattgttcttgggagaaaatcaacttttagattaaaaaaattttaagtatctaggagtatttaaatccttttcccataaataaaagtacagttttcttggtggcagaatgaaaatcagcaacttctagcatatagactatataatcagattgacagcatatagaatatattatcagacaagatgaggaggtacaaaagttactattgctcataatgacttacaggctaaaattagttttaaaatactatattaaattctgaatgcaatttttttttgttcccttgagaccaaaatttaagttaactgttgctggcagtctaagtgtaaatgttaacagcaggagaagttaagaattgagcagttctgttgcatgatttcccaaatgaaatactgccttggctagagtttgaaaaactaattgagcctgtgcctggctagaaaacaagcgtttatttgaatgtgaatagtgtttcaaaggtatgtagttacagaattcctaccaaacagcttaaattcttcaagaaagaattcctgcagcagttattcccttacctgaaggcttcaatcatttggatcaacaactgctactctcgggaagactcctctactcacagctgaagaaaatgagcacacccttcacactgttatcacctatcctgaagatgtgatacactgaatggaaataaatagatgtaaataaaattgagttctcatttaac

SEQ ID NO: 402 - DNA, 1460 bp, Homo sapiens
ttttactgaagttgctagaagtttacagaaaaggaagtgcaggaacatttcacaaatctacaatctgtgagtatcacatcctgtatagctgtaaacactggaataaggaagggctgatgactttcagaagatgaaggtaagtagaaaccgttgatgggactgagaaaccagagttaaaacctctttggagcttctgaggactcagctggaaccaacgggcacagttggcaacaccatcatgacatcacaacctgttcccaatgagaccatcatagtgctcccatcaaatgtcatcaacttctcccaagcagagaaacccgaacccaccaaccaggggcaggatagcctgaagaaacatctacacgcagaaatcaaagttattgggactatccagatcttgtgtggcatgatggtattgagcttggggatcattttggcatctgcttccttctctccaaattttacccaagtgacttctacactgttgaactctgcttacccattcataggaccctttttttttatcatctctggctctctatcaatcgccacagagaaaaggttaaccaagcttttggtgcatagcagcctggttggaagcattctgagtgctctgtctgccctggtgggtttcattatcctgtctgtcaaacaggccaccttaaatcctgcctcactgcagtggaactctctctctgatgctgatttgcactctgctggaattctgcctagctgtgctcactgctgtgctgcggtggaaacaggcttactctgacttccctgggagtgtacttttcctgcctcacagttacattggtaattctggcatgtcctcaaaaatgactcatgactgtggatatgaagaactattgacttcttaagaaaaaagggagaaatattaatcagaaagttgattcttatgataatatggaaaagttaaccattatagaaaagcaaagcttgagtttcctaaatgtaagcttttaaagtaatgaacattaaaaaaaaccattatttcactgtcatttaagatatgtgttcattggggatctcttgatttgcctgacattgacttcagcaaaagcacggggctgtaaattaccatttactagattagccaaatagtctgaatttccagaaaacaaggcagaatgatcattcccagaaacatttcccagaaaatgtttcccagaaaactagacagcatgatcattcaatggatcacagtgaagcaaaggacacaactttttattgtaccccttaattgtcaacaggagttaactgatttgttgtggtgctcagacttttttatacaggtgctagtgttttatcctatgtattttaactcattagtgcataaaggcaagccccatataatgaagtctcagggtatatgaaagtagctggcttcaaaataaaatttttgagtgcaaaaaaaaaaaaaaaaaaaaaaaaaaaaa

SEQ ID NO: 403 - DNA, 2552 bp, Homo sapiens
attttcctcctcccaacgattttaaattagtttcactttccagtttcctcttccttcccctaaaagcaattactcaaaaacggagaaaacatcagctgatgcgtgccctactctcccacccctttatatagttccttcagtatttacttgaggcagacaggaagacttctgaagaacaaatcagcctggtcaccagcttttcggaacagcagagacacagagggcagtcatgagtgaggtcaccaagaattccctggagaaaatccttccacagctgaaatgccatttcacctggaacttattcaaggaagacagtgtctcaagggatctagaagatagagtgtgtaaccagattgaatttttaaacactgagttcaaagctacaatgtacaacttgttggcctacataaaacacctagatggtaacaacgaggcagccctggaatgcttacggcaagctgaagagttaatccagcaagaacatgctgaccaagcagaaatcagaagtctagtcacttggggaaactacgcctgggtctactatcacttgggcagactctcagatgctcagatttatgtagataaggtgaaacaaacctgcaagaaattttcaaatccatacagtattgagtattctgaacttgactgtgaggaagggtggacacaactgaagtgtggaagaaatgaaagggcgaaggtgtgttttgagaaggctctggaagaaaagcccaacaacccagaattctcctctggactggcaattgcgatgtaccatctggataatcacccagagaaacagttctctactgatgttttgaagcaggccattgagctgagtcctgataaccaatacgtcaaggttctcttgggcctgaaactgcagaagatgaataaagaagctgaaggagagcagtttgttgaagaagccttggaaaagtctccttgccaaacagatgtcctccgcagtgcagccaaattttacagaagaaaaggtgacctagacaaagctattgaactgtttcaacgggtgttggaatccacaccaaacaatggctacctctatcaccagattgggtgctgctacaaggcaaaagtaagacaaatgcagaatacaggagaatctgaagctagtggaaataaagagatgattgaagcactaaagcaatatgctatggactattcgaataaagctcttgagaagggactgaatcctctgaatgcatactccgatctcgctgagttcctggagacggaatgttatcagacaccattcaataaggaagtccctgatgctgaaaagcaacaatcccatcagcgctactgcaaccttcagaaatataatgggaagtctgaagacactgctgtgcaacatggtttagagggtttgtccataagcaaaaaatcaactgacaaggaagagatcaaagaccaaccacagaatgtatctgaaaatctgcttccacaaaatgcaccaaattattggtatcttcaaggattaattcataagcagaatggagatctgctgcaagcagccaaatgttatgagaaggaactgggccgcctgctaagggatgccccttcaggcataggcagtattttcctgtcagcatctgagcttgaggatggtagtgaggaaatgggccagggcgcagtcagctccagtcccagagagctcctctctaactcagagcaactgaactgagacagaggaggaaaacagagcatcagaagcctgcagtggtggttgtgacgggtaggacgataggaagacagggggccccaacctgggattgctgagcagggaagctttgcatgttgctctaaggtacatttttaaagagttgttttttggccgggcgcagtggctcatgcctgtaatcccagcactttgggaggccgaggtgggcggatcacgaggtctggagtttgagaccatcctggctaacacagtgaaatcccgtctctactaaaaatacaaaaaattagccaggcgtggtggctggcacctgtagtcccagctacttgggaggctgaggcaggagaatggcgtgaacctggaaggaagaggttgcagtgagccaagattgcgcccctgcactccagcctgggcaacagagcaagactccatctcaaaaaaaaaaaaaaaaaaaaaaaagagttgttttctcatgttcattatagttcattacagttacatagtccgaaggtcttacaactaatcactggtagcaataaatgcttcaggcccacatgatgctgattagttctcagttttcattcagttcacaatataaccaccattcctgccctccctgccaagggtcataaatggtgactgcctaacaacaaaatttgcagtctcatctcattttcatccagacttctggaactcaaagattaacttttgactaaccctggaatatctcttatctcacttatagcttcaggcatgtatttatatgtattcttgatagcaataccataatcaatgtgtattcctgatagtaatgctacaataaatccaaacatttcaactctgttaaaaaaaaaaa

SEQ ID NO: 404 - DNA, 1395 bp, Homo sapiens
ttttttttattgttacgatagttacttttgttatgtattttaccacaatttttaaaaagcaaaccaaaaccaaccaagagtgcttcccccacacctcaaaatcatcctgcagcagctccctggcccagctctctctcaccctgaccctgggcccctctcccaccacccagggctagccctgtggaccaaccatctctgccagcccctccccgaccctccagccagggaggtggggcgctggccggtgaatggggcaggccaggcccaaaggctggcccagggctcaccagctctggactgggcgtcccgtctgaggtggggatgaccaacatgccagctctgggttttagctgaggatgggcacatcaagcactgacagccagcaagctgggcacaggcgatgctcaacctctaacacatcggctgagaacctcacctgcctctccctgcctgggagccctggcaagacagctcctctcccaggcccagcacaggcaggcgctggacagccacttcctaaggggtgcgcggccgtcaaggcagaggtgggtatccctgcacctcacacctctcaggaggtcaggatccacatccgtcgcctgctttcctgggctgcccctggggcttgtgggctgagatcaaccccttgtgccctgccccaggccctccctcaggcgaggccctgcccaggcaggtggttcttccctggctgttcccttccaacaggtggggcccagaccatcctatctctttggacctggagacatttccttaactgggctttgcagcagagggaagagaacagtggcagagccaggcgcgtacctcctgtgcccaggacagcacctgtaagcaagggggaagggagccacccaccccagaactcaaatggagagaaagtcaagacaatcacccctgacgtggggctgcaccaatccctgacgtctgaccccactgtggctgtcctcagagccaagagggctccagaagcccacccgcctcgaagctgttcagggagcctcacggcccgtgtttgccacatgggtgtgtgccagggccaaggggacacagaagatggcaggatgacactaatggggtgagcagggcacactggtgcctcccatactgccctccagcaccaggcagggtcaccacagccggcaagcactgggcctggggatgtgtgaagagatagggttattgagaagagaaaacagaacgctggtcatccgtggcactcagggctaggcagtccagggagcagaaaacaggggtcccgggcccagtctccctcctggaggtcagagcggagcccctggcactgtgccctggcccagaaccaggctgtgggctccacgctgcacaccccaactcaggagcagaaagcaaacccct

SEQ ID NO: 405 - DNA, 3627 bp, Homo sapiens
gcctagagggagaaaacttgttgaaattcagagatccccctccccctaccaatacacaccaaatcagacgcctctgaccagatctgaatttggctctcagagatttccattgtagccaggcagttggggcactttctgagtgctgcctccacctcactgtccccagcctgcctgcctccgtttccctagccctgggcctgtgccgctgtcaccatcacctgggcgccctctagtggatgaatcggattatgcacgagggggcttggagcaggattcagaaggggctcctgtccttccttgaaatgctggacgccgggatcctggaacagctcttcaggtctctgcattcctcctggcaacagccagagcctgggcgcagggggctactgttgtttgaaggctgaaggctgcagcctggtagggcactcaggagacctggcagttggctgcagggccaggtctaggggccagggcatgagggatgctctgggctggctcagccccgggcccccatgcggattgtgactgtgggggcatggccacatgatgttgaggggggatctctgaccctgaccttcttggctctgtgcatccttgaaaccagaaaggtctggaacaaatcagtgaacaatgccctaactcggggagggagccacatcctgaccccagcagcctcagaaggatccgtgtcagggttatggggcaccctgggggccccgagtctgcatgggtctccacatgcaacttctgccggaaactctgaaaaatcccaactggggggtcataggacacaatcagaaatgctgatgccactgtgtgtggatccccgggccctggggggtcaggagcatgtagaaggtgggccacagggggttcataagagaatcctgtaaccgcccctgccccccaaacttagaagcccactggagggccatgggtgaaagcttgggggggtgtcctgtggagtgggtggtggggggtctttgggtttacatgctgctgggcctgagcagcaggaccccgtccacagctgatccctgggccctgctgctcagctgctctcttgagtgttgctgtggctgccgagagagcctgagtcgagcctctcttgtgccggccgtacgctgtcaggccacgctggtgagtttggcaaggcacagatgcccagagcagagaactttccttggggatttaatatgtgcgaatcttgaggtccggcaaatctttccctcagctagagagggggtttttgagactagaatcacctcagcatcctcctgtccccagctgtgtccagcctgtctgcagggacatcctgagaggactaggctctcccctcatccacctgcgtaagtgccaccctgaagcctgtccacccatgcttggagaggcttggcctcaacctgcttagccagcagcaggcttgggcctggggtgcagcagagacccaggtggctgtggggtggttgcttcatggggtggttctgaaacgcagttggaagtgcatggacagtgccttacctgttctctgtgggaccctgtttagaaaccaggtctgagttactgggggtcatcgctacattctgatggcctagctgtgtggaggccacggtggagccccatccaaggagccagggccctgggtctagccgtgaccagaacgcatgccctggaggtgtttctcatcttgcacctgtgttgcctggtgtctcaagtggccacaaaactgtgttagctcttggtgcccctgggcttcggaaccagggtttcccttcatctcagtgacccgggagcatctgggcagtgagtaaagagggtgatttacttgatgggtacgtttggtcctgcctgggagcccccccaggcacggtcctgggacctgaagctgccctcgttggtggaggggagggagagagcttcagggatgaggtggcgttgagctgggcgggaagggtgagcccctgcaaggtggggtgggtgtgctggggacgctgagcagcacggccagcaggtgggtcttcagctcggtacccggtgggacttgtggttggggctggtgtgtggccaggagaggggctggcagaagacaagggggactgtgaggcagctcccatccagcggttgaagcctgatggcctggctctgtgcctcagttctctcatctataaaatgagaaaacagtgccagcctcccagacctgtcatgaggatgaacgagtgaccacgtagcatgggctgggtgcgtgtcacctaacattaccagcctttgcaaggagagccctggggacctggctgagtttttcccttgcctggcccactgcacctgtccccacaggagccaaggaggtcctgctgctggcccggtagacggaccaatggagggtctcgctggacacaccggacttcaccgacatcgtgctgcagctggacgacatccagcatgccatcgccatcaactatgacccaatggagggccacgtctactggacggatgacgaggtgtgggccatccgcagggcatacctggatgggtctggggcgcagacgctgatcaacaccaagatcaacgaccccgatgacatcgcagtcaactgggtggcccgaagcctctattggacccacacaggcactgaacacatcgaggtgacgtgcctcaacagcacctcccacaagatcctggtgtcagaggacatggacgagccccgtgccattgcactgcatcccgagatgggcctcacgtactggatagactggggagagaaccctgaaatcaagcgtgccaacctggacaggcaggagctgcgcgtgctggtcaatgcttccctcgggtggcccaacggcctggccctggacctgcaggaagggaagctctactggggagatgccaagacagacaagatcgaggcgatcagtgtcgatgagacgaagaggcagaccctcctgaaggacaagctcccacacattttcaggttcaccctgctgggggacttcatctactggaccgcctggcagcaccacagcatcaagcgggtacacaaggtcaaggccaaccgggacgtcatcattgaccagctgcccgacctgatggggctcaaagctgtgaacgtggacaaggtcgtcggaaccaaccctcatgcggacaggaatgggggtgcagccacctgtgcttcttcacgccccacacaacccggtttggctgccccatctagggcctggaactgctgagtgacatgaagacctgcatcatgcccaaggccttcttggtcttcaccagtagagccgccatccacaggatctccctcgagaccaacaacaacgatgtggccatcctgctctcggcgtcaaggaggcctcggccctggactttgatgtgtccagcaaccacatctactggacagacatcagcctgaaggtagcgtgggcccgaacatgcacacgtgcagcctatatgggaaaaccttccctctgtacctgcctcaaaggtttcagacatttttcttaaagcactataatatttattgtaacacaattcaagctaattaaatatgagcaagcctatttcaaaaaaaatagacgattataatgagcaaatccggtagacacacaaaaaaaaaaaaaaaaaaaaaaa

SEQ ID NO: 406 - DNA, 823 bp, Homo sapiens
aagtcgagaggcggtgcacacccgtcgcgcatgcgcaaacacagctgtcggaaggtggcgagcctgaggcgaacaatggcggagctgggcgaagccgatgaagcggagttgcagcgcctggtggccgccgagcagcagaaggcgcagtttactgcacaggtgcatcacttcatggagttatgttgggataaatgtgtggagaagccagggaatcgcctagactctcgcactgaaaattgtctctccagctgtgtagaccgcttcattgacaccactcttgccatcaccagtcggtttgcccagattgtacagaaaggagggcagtaggccatcccccaggagaatgacagaagcaaaggacttgttactaagcagatttaagggtcagtgggggaaggctatcaacccattgtcagatcagcatcaggctgttatcaagtctgttggtgctaaaaagtaaaagatgaaatgttcaaagagtgaaatttatttatttggaattcagaaattccaggttgtatgacatcagttactcaataagtgtgaattctccaactcttcttttaatcccattttagaatttaatatagagatctctgattggcaggaacactagaaataaatgttccatggccagtagtgcaaatgggggattgtaggttttgaaaaaccaccctaagccatattaagggggttggaagaaccatcgaagcctaaggcatagaagaaaatttggggttaagaaagatgaagaacaaaaaacagctttattgcttatacatgaccaagaaaaggaaaacatggcaaaaaaaaaaaaaaaaaa

SEQ ID NO: 407 - DNA, 5035 bp, Homo sapiens
agtgcgcggtcgctccgcgcctgcgcaggagaggtggtaggctcgggtggctggctccggggagatagcgcctgtcagtcggtgggtcggtcctcgcgccggccctccccctccccggtctccgggggaggcgcggtggagtccgcccccggggttctccgatgggggagaagcggcgacggcggcagtggagtaaccgagccggagcgtgagcggccccggtgccccgttccccacggaggccatgggcgacccagcccccgcccgcagcctggacgacatcgacctgtccgccctgcgggaccctgctgggatctttgagcttgtggaggtggtcggcaatggaacctacggacaggtgtacaagggtcggcatgtcaagacggggcagctggctgccatcaaggtcatggatgtcacggaggacgaggaggaagagatcaaacaggagatcaacatgctgaaaaagtactctcaccaccgcaacatcgccacctactacggagccttcatcaagaagagccccccgggaaacgatgaccagctctggctggtgatggagttctgtggtgctggttcagtgactgacctggtaaagaacacaaaaggcaacgccctgaaggaggactgtatcgcctatatctgcagggagatcctcaggggtctggcccatctccatgcccacaaggtgatccatcgagacatcaaggggcagaatgtgctgctgacagagaatgctgaggtcaagctagtggattttggggtgagtgctcagctggaccgcaccgtgggcagacggaacactttcattgggactccctactggatggctccagaggtcatcgcctgtgatgagaaccctgatgccacctatgattacaggagtgatatttggtctctaggaatcacagccatcgagatggcagagggagccccccctctgtgtgacatgcaccccatgcgagccctcttcctcattcctcggaaccctccgcccaggctcaagtccaagaagtggtctaagaagttcattgacttcattgacacatgtctcatcaagacttacctgagccgcccacccacggagcagctactgaagtttcccttcatccgggaccagcccacggagcggcaggtccgcatccagcttaaggaccacattgaccgatcccggaagaagcggggtgagaaagaggagacagaatatgagtacagcggcagcgaggaggaagatgacagccatggagaggaaggagagccaagctccatcatgaacgtgcctggagagtcgactctacgccgggagtttctccggctccagcaggaaaataagagcaactcagaggctttaaaacagcagcagcagctgcagcagcagcagcagcgagaccccgaggcacacatcaaacacctgctgcaccagcggcagcggcgcatagaggagcagaaggaggagcggcgccgcgtggaggagcaacagcggcgggagcgggagcagcggaagctgcaggagaaggagcagcagcggcggctggaggacatgcaggctctgcggcgggaggaggagcggcggcaggcggagcgcgagcaggaatacaagcggaagcagctggaggagcagcggcagtcagaacgtctccagaggcagctgcagcaggagcatgcctacctcaagtccctgcagcagcagcaacagcagcagcagcttcagaaacagcagcagcagcagctcctgcctggggacaggaagcccctgtaccattatggtcggggcatgaatcccgctgacaaaccagcctgggcccgagaggtagaagagagaacaaggatgaacaagcagcagaactctcccttggccaagagcaagccaggcagcacggggcctgagccccccatcccccaggcctccccagggcccccaggacccctttcccagactcctcctatgcagaggccggtggagccccaggagggaccgcacaagagcctggtggcacaccgggtcccactgaagccatatgcagcacctgtaccccgatcccagtccctgcaggaccagcccacccgaaacctggctgccttcccagcctcccatgaccccgaccctgccatccccgcacccactgccacgcccagtgcccgaggagctgtcatccgccagaattcagaccccacctctgaaggacctggccccagcccgaatcccccagcctgggtccgcccagataacgaggccccacccaaggtgcctcagaggacctcatctatcgccactgcccttaacaccagtggggccggagggtcccggccagcccaggcagtccgtgccagacctcgcagcaactccgcctggcaaatctatctgcaaaggcgggcagagcggggcaccccaaagcctccagggccccctgctcagccccctggcccgcccaacgcctctagtaaccccgacctcaggaggagcgaccctggctgggaacgctcggacagcgtccttccagcctctcacgggcacctcccccaggctggctcactggagcggaaccgcgtgggagtctcctccaaaccggacagctcccctgtgctctcccctgggaataaagccaagcccgacgaccaccgctcacggccaggccggcccgcagactttgtgttgctgaaagagcggactctggacgaggcccctcggcctcccaagaaggccatggactactcgtcgtccagcgaggaggtggaaagcagtgaggacgacgaggaggaaggcgaaggcgggccagcagaggggagcagagatacccctgggggccgcagcgatggggatacagacagcgtcagcaccatggtggtccacgacgtcgaggagatcaccgggacccagcccccatacgggggcggcaccatggtggtccagcgcacccctgaagaggagcggaacctgctgcatgctgacagcaatgggtacacaaacctgcctgacgtggtccagcccagccactcacccaccgagaacagcaaaggccaaagcccaccctcgaaggatgggagtggtgactaccagtctcgtgggctggtaaaggcccctggcaagagctcgttcacgatgtttgtggatctagggatctaccagcctggaggcagtggggacagcatccccatcacagccctagtgggtggagagggcactcggctcgaccagctgcagtacgacgtgaggaagggttctgtggtcaacgtgaatcccaccaacacccgggcccacagtgagacccctgagatccggaagtacaagaagcgattcaactccgagatcctctgtgcagccctttggggggtcaacctgctggtgggcacggagaacgggctgatgttgctggaccgaagtgggcagggcaaggtgtatggactcattgggcggcgacgcttccagcagatggatgtgctggaggggctcaacctgctcatcaccatctcagggaaaaggaacaaactgcgggtgtattacctgtcctggctccggaacaagattctgcacaatgacccagaagtggagaagaagcagggctggaccaccgtgggggacatggagggctgcgggcactaccgtgttgtgaaatacgagcggattaagttcctggtcatcgccctcaagagctccgtggaggtgtatgcctgggcccccaaaccctaccacaaattcatggccttcaagtcctttgccgacctcccccaccgccctctgctggtcgacctgacagtagaggaggggcagcggctcaaggtcatctatggctccagtgctggcttccatgctgtggatgtcgactcggggaacagctatgacatctacatccctgtgcacatccagagccagatcacgccccatgccatcatcttcctccccaacaccgacggcatggagatgctgctgtgctacgaggacgagggtgtctacgtcaacacgtacgggcgcatcattaaggatgtggtgctgcagtggggggagatgcctacttctgtggcctacatctgctccaaccagataatgggctggggtgagaaagccattgagatccgctctgtggagacgggccacctcgacggggtcttcatgcacaaacgagctcagaggctcaagttcctgtgtgagcggaatgacaaggtgttttttgcctcagtccgctctgggggcagcagccaagtttacttcatgactctgaaccgtaactgcatcatgaactggtgacggggccctgggctggggctgtcccacactggacccagctctccccctgcagccaggcttcccgggccgcccctctttcccctccctgggcttttgcttttactggtttgatttcactggagcctgctgggaacgtgacctctgacccctgatgctttcgtgatcacgtgaccatcctcttccccaacatgtcctcttcccaaaactgtgcctgtccccagcttctggggagggacacagcttccccttcccaggaattgagtgggcctagcccctccccccttttctccatttgagaggagagtgcttggggcttgaaccccttaccccactgctgctgactgggcagggccctggacccctttatttgcacgtcaggggagccggctccccccttgaatgtaccagaccctggggggggtcactgggccctagatttttggggggtcaccagccactccaggggcagggaccatttcttcattttctgaaagcactttaatgattccccttcccccaaactccagggaatggaggggggaccccgccagccaaaacattccccccattcccgacccccctctcctcttctagcccatgcccttccccggtggagggagggagcagggagccctcactctccacgccccttgcttgcatctgtatatagtgtgagcagcaagtaacccttctccctccccccccacccctcctcaatgtagtggccttggatatcctgtttgttaataaagacaattcaaccagctcccaccaaaaaaaaaaaaaaaaaaa

SEQ ID NO: 408 - DNA, 3111 bp, Homo sapiens
gcgagttgtgtgagccgccagtatggccgggctatggcggcgagcactggctacgtgcgactgtggggagcggcgcggtgctgggtgctgcggcggccgatgctggccgccgccggggggcgggttcccactgcagcaggagcgtggttgctccgaggccagcggacctgcgacgcctctcctccttgggcactgtggggccgaggcccggcaattgggggccaatggcgggggttttgggaagcgagcagccgcggcggaggcgcattctcggggggcgaggacgcctccgagggcggcgcggaggaaggagccggcggcgcggggggcagcgcgggcgccggggaaggcccggtcataacggcgctcacgcccatgacgatccccgatgtgtttccgcacctgccgctcatcgccatcacccgcaacccggtgttcccgcgctttatcaagattatcgaggttaaaaataagaagttggttgagctgctgagaaggaaagttcgtctcgcccagccttatgtcggcgtctttctaaagagagatgacagcaatgagtcggatgtggtcgagagcctggatgaaatctaccacacggggacgtttgcccagatccatgagatgcaggaccttggggacaagctgcgcatgatcgtcatgggacacagaagagtccatatcagcagacagctggaggtggagcccgaggagccggaggcggagaacaagcacaagccccgcaggaagtcaaagcggggcaagaaggaggcggaggacgagctgagcgccaggcacccggcggagctggcgatggagcccacccctgagctcccggctgaggtgctcatggtggaggtagagaacgttgtccacgaggacttccaggtcacggaggaggtgaaagccctgactgcagagatcgtgaagaccatccgggacatcattgccttgaaccctctctacagggagtcagtgctgcagatgatgcaggctggccagcgggtggtggacaaccccatctacctgagcgacatgggcgccgcgctcaccggggccgagtcccatgagctgcaggacgtcctggaagagaccaatattcctaagcggctgtacaaggccctctccctgctgaagaaggaatttgaactgagcaagctgcagcagcgcctggggcgggaggtggaggagaagatcaagcagacccaccgtaagtacctgctgcaggagcagctaaagatcatcaagaaggagctgggcctggagaaggacgacaaggatgccatcgaggagaagttccgggagcgcctgaaggagctcgtggtccccaagcacgtcatggatgttgtggacgaggagctgagcaagctgggcctgctggacaaccactcctcggagttcaatgtcacccgcaactacctagactggctcacgtccatcccttggggcaagtacagcaacgagaacctggacctggcgcgggcacaggcagtgctggaggaagaccactacggcatggaggacgtcaagaaacgcatcctggagttcattgccgttagccagctccgcggctccacccagggcaagatcctctgcttctatggcccccctggcgtgggtaagaccagcattgctcgctccatcgcccgcgccctgaaccgagagtacttccgcttcagcgtcgggggcatgactgacgtggctgagatcaagggccacaggcggacctacgtgggcgccatgcccgggaagatcatccagtgtttgaagaagaccaagacggagaaccccctgatcctcatcgacgaggtggacaagatcggccgaggctaccagggggacccgtcgtcggcactgctggagctgctggacccagagcagaatgccaacttcctggaccactacctggacgtgcccgtggacttgtccaaggtgctgttcatctgcacggccaacgtcacggacaccatccccgagccgctgcgagaccgtatggagatgatcaacgtgtcgggctacgtggcccaggagaagctggccattgcggagcgctacctggtgccccaggctcgcgccctgtgtggcttggatgagagcaaggccaagctgtcatcggacgtgctgacgctgctcatcaagcagtactgccgcgagagcggtgtccgcaacctgcagaagcaagtggagaaggtgttacggaaatcggcctacaagattgtcagcggcgaggccgagtccgtggaggtgacgcccgagaacctgcaggacttcgtggggaagcccgtgttcaccgtggagcgcatgtatgacgtgacaccgcccggcgtggtcatggggctggcctggaccgcaatgggaggctccacgctgtttgtggagacatccctgagacggccacaggacaaggatgccaagggtgacaaggatggcagcctggaggtgacaggccagctgggggaggtgatgaaggagagcgcccgcatagcctacaccttcgccagagccttcctcatgcagcacgcccccgccaatgactacctggtgacctcacacatccacctgcatgtgcccgagggcgccacccccaaggacggcccaagcgcaggctgcaccatcgtcacggccctgctgtccctggccatgggcaggcctgtccggcagaatctggccatgactggcgaagtctccctcacgggcaagatcctgcctgttggtggcatcaaggagaagaccattgcggccaagcgcgcaggggtgacgtgcatcgtcctgccagccgagaacaagaaggacttctacgacctggcagccttcatcaccgagggcctggaggtgcacttcgtggaacactaccgggagatcttcgacatcgccttcccggacgagcaggcagaggcgctggccgtggaacggtgacggccaccccgggactgcaggcggcggatgtcaggccctgtctgggccagaactgagcgctgtggggagcgcgcccggacctggcagtggagccaccgagcgagcagctcggtccagtgacccagatcccagggacctcagtcggcttaatcagagtgtggcatagaagctatttaatgattaaagtcatttgcagta

SEQ ID NO: 409 - DNA, 2274 bp, Homo sapiens
gcagaactcgcacaagggaccttatttaggttgcgcaggcgcccgctggccatttcgtcttagccacgcagaagtcgcgtgtctagtttgtttcgacgccggaccgcgtaagagacgatgatgttgggcacggaaggtggagagggattcgtggtgaaggtccggggcttgccctggtcttgctcggccgatgaagtgcagaggtttttttctgactgcaaaattcaaaatggggctcaaggtattcgtttcatctacaccagagaaggcagaccaagtggcgaggcttttgttgaacttgaatcagaagatgaagtcaaattggccctgaaaaaagacagagaaactatgggacacagatatgttgaagtattcaagtcaaacaacgttgaaatggattgggtgttgaagcatactggtccaaatagtcctgacacggccaatgatggctttgtacggcttagaggacttccctttggatgtagcaaggaagaaattgttcagttcttctcagggttggaaatcgtgccaaatgggataacattgccggtggacttccaggggaggagtacgggggaggccttcgtgcagtttgcttcacaggaaatagctgaaaaggctctaaagaaacacaaggaaagaatagggcacaggtatattgaaatctttaagagcagtagagctgaagttagaactcattatgatccaccacgaaagcttatggccatgcagcggccaggtccttatgacagacctggggctggtagagggtataacagcattggcagaggagctggctttgagaggatgaggcgtggtgcttatggtggaggctatggaggctatgatgattacaatggctataatgatggctatggatttgggtcagatagatttggaagagacctcaattactgtttttcaggaatgtctgatcacagatacggggatggtggctctactttccagagcacaacaggacactgtgtacacatgcggggattaccttacagagctactgagaatgacatttataattttttttcaccgctcaaccctgtgagagtacacattgaaattggtcctgatggcagagtaactggtgaagcagatgtcgagttcgcaactcatgaagatgctgtggcagctatgtcaaaagacaaagcaaatatgcaacacagatatgtagaactcttcttgaattctacagcaggagcaagcggtggtgcttacgaacacagatatgtagaactcttcttgaattctacagcaggagcaagcggtggtgcttatggtagccaaatgatgggaggcatgggcttgtcaaaccagtccagctacgggggcccagccagccagcagctgagtgggggttacggaggcggctacggtggccagagcagcatgagtggatacgaccaagttttacaggaaaactccagtgattttcaatcaaacattgcataggtaaccaaggagcagtgaacagcagctactacagtagtggaagccgtgcatctatgggcgtgaacggaatgggagggttgtctagcatgtccagtatgagtggtggatggggaatgtaattgatcgatcctgatcactgactcttggtcaaccttttttttttttttttttttttctttaagaaaacttcagtttaacagtttctgcaatacaagcttgtgatttatgcttactctaagtggaaatcaggattgttatgaagacttaaggcccagtatttttgaatacaatactcatctaggatgtaacagtgaagctgagtaaactataactgttaaacttaagttccagcttttctcaagttagttataggatgtacttaagcagtaagcgtatttaggtaaaagcagttgaattatgttaaatgttgccctttgccacgttaaattgaacactgttttggatgcatgttgaaagacatgcttttatttttttgtaaaacaatataggagctgtgtctactattaaaagtgaaacattttggcatgtttgttaattctagtttcatttaataacctgtaaggcacgtaagtttaagctttttttttttttaagttaatgggaaaaatttgagacgcaataccaatacttaggattttggtcttggtgtttgtatgaaattctgaggccttgatttaaatctttcattgtattgtgatttccttttaggtatattgcgctaagtgaaacttgtcaaataaatcctccttttaaaaactgcaaaaaaaaaaaaaaaaaaaaaaaaaa

SEQ ID NO: 410 - DNA, 1480 bp, Homo sapiens
ggtgactgacggcgccggccgcccctgcccgtcgcccgcccgctgctgccgcccgcccggggtgtggagcccggccgctgctcgcgggctgagtgtctgtcgctgctgccgcctccacccagcctccgccatggacctcttcggggacctgccggagcccgagcgctcgccgcgcccggctgccgggaaagaagctcagaaaggacccctgctctttgatgacctccctccggccagcagtactgactcaggatcagggggacctttgctttttgatgatctcccacccgctagcagtggcgattcaggttctcttgccacatcaatatcccagatggtaaagactgaagggaaaggagcaaagagaaaaacctccgaggaagagaagaatggcagtgaagagcttgtggaaaagaaagtttgtaaagcctcttcggtgatctttggtctgaagggctatgtggctgagcggaagggtgagagggaggagatgcaggatgcccacgtcatcctgaacgacatcaccgaggagtgtaggcccccatcgtccctcattactcgggtttcatattttgctgtttttgatggacatggaggaattcgagcctcaaaatttgctgcacagaatttgcatcaaaacttaatcagaaaatttcctaaaggagatgtaatcagtgtagagaaaaccgtgaagagatgccttttggacactttcaagcatactgatgaagagttccttaaacaagcttccagccagaagcctgcctggaaagatgggtccactgccacgtgtgttctggctgtagacaacattctttatattgccaacctcggagatagtcgggcaatcttgtgtcgttataatgaggagagtcaaaaacatgcagccttaagcctcagcaaagagcataatccaactcagtatgaagagcggatgaggatacagaaggctggaggaaacgtcagggatgggcgtgttttgggcgtgctagaggtgtcacgctccattggggacgggcagtacaagcgctgcggtgtcacctctgtgcccgacatcagacgctgccagctgacccccaatgacaggttcattttgttggcctgtgatgggctcttcaaggtctttaccccagaagaagccgtgaacttcatcttgtcctgtctcgaggatgaaaagatccagacccgggaagggaagtccgcagccgacgcccgctacgaagcagcctgcaacaggctggccaacaaggcggtgcagcggggctcggccgacaacgtcactgtgatggtggtgcggatagggcactgaggggtggcgcgcggccaggagcacgcatggtattgacttaaaaggttcattttgtgtgtgtgcacattgtgtgttttgtgtactcctgtgggactcccatggttgtaaataaaggtttctctttttttttcctaaaaaaaaaaaaaaaaaaaaaaaaaaaaaaaaaaaaaa

SEQ ID NO: 411 - DNA, 1717 bp, Homo sapiens
gtggcagcggtgaccgcctcctgggttattttcttttctcccccagctgccccagggttctggtttcccgaatcacttggcaaataaccagcaggtgggcagatgtcttttttgcgttcctacggacgcgtaggcaagttcgatgcgccggagtgaacagccagggtcccatctctcagccggctcccgggcggtgctagcagggaagagggacgcgccggcgaatgaaacactactagcccggaaagccgccctggaccttccacccgggcagcgagtctggcggcccctcgccgccgccccctccgaccagaacagactgcgctgcgagccccgggcttccgccgcagcgcgcagcaattggaggtgccagaggagaccagcagcagcacttgatttagctgggctgcgggaattccgacctgtacactttccagaagcctgatctctccaagtccgcgcccagggactcgagccccggcttccaggttgacccgagcgcgcccccttcgtgctctcggccgcgttcaccgcgcgaggcctccgggtcctgttaagcccgagcagcacaggccgctgcctcagcatccaccccgcagcccacgtgtggcaagccggggaaggggtggagtgaacggccggagaccacgtggagaaaggggccgctttggcccttccatctgggtgccgggagcccctaggccctccggccatggccgacagcggcgatgctggcagctccggcccctggtggaaatcgctcaccaacagcagaaagaaaagcaaggaagccgcagtgggggtgccgcctcccgcccagcccgctcccggggagcccacgccacctgcgccgcccagcccggactggaccagcagctcccgggagaaccagcaccccaatctcctcgggggcgccggcgagccccccaaaccagacaagttatacggggacaaatccggcagcagccgccgcaatttgaagatctcgcgctccggccgctttaaggagaagaggaaagtgcgcgccacgctgctcccggaggcgggcaggtccccggaggaggcaggctttcctggtgacccccacgaggacaagcagtagccccaatagcctgcgcgctccaggactgcctacccagcactaccccaaacccccagttccaaacccgagacttcaggcccgcccccttacgcgttgtctcattccaccaaattcagaatatttacacaatgccttcatgattttatttttctggaaattgaagtgtcaattgggttctcaatatttcatgactccaaggatgcattaaatatttatttgtggtaagagaagatacctgccgcggaggagggtggcataattatttttttttcaaaaagctattctggggccctggccccctggctcctgtcacagctcagcttgaactctgtagcctctcaaatgaagaaggtggctgttatttaggactctgtggaaagcaaatcacagtgctgtttttaatgcctgagaaatgcactttaggggtagacttataccttaagtgaaggagtgggggaggaagaagcattcttaagtagaagcattttaaaataaggcaggattgcttttaatgttaaactacaaaactgtacagcctattttagtgtggactattaaaacccttgcactgtaaggaaaaaaaaaaaaaaaaaaaaaaaaaaaaaaaaaaaaaaa

SEQ ID NO: 412 - DNA, 1717 bp, Homo sapiens; identical to SEQ ID NO: 411

SEQ ID NO: 413 - DNA, 1514 bp, Homo sapiens
cggacccggaagtgcttggccacagtcgcagccccggcgccccgaagcgggaaaaaggctgggtgccgccgtcccccagctgcgcaaccctaggaactctcgggaacttggctgtgttgtcctgcctcagagacaaattcatctattgtaggcctagcccctgcctttgaaaacaaggaaaggttggtagaacatcaacacagcatggaatttccagggaggtctcatttcaaaacttcataaagaacaagaaccacctggacttctgtgagggcgatgattaaactggcctgagtttgaatgaaaggataatgtatgctcaacctgtgactaacaccaaggaggtcaagtggcagaaggtcttgtatgagcgacagccctttcctgataactatgtggaccggcgattcctggaagagctccggaaaaacatccatgctcggaaataccaatattgggctgtggtatttgagtccagtgtggtgatccagcagctgtgcagtgtttgtgtttttgtggttatctggtggtatatggatgagggtcttctggccccccattggcttttagggactggtctggcttcttcactgattgggtatgttttgtttgatctcattgatggaggtgaagggcggaagaagagtgggcagacccggtgggctgacctgaagagtgccctagtcttcattactttcacttatgggttttcaccagtgctgaagacccttacagagtctgtcagcactgacaccatctatgccatgtcagtcttcatgctgttaggccatctcatcttttttgactatggtgccaatgctgccattgtatccagcacactatccttgaacatggccatctttgcttctgtatgcttggcatcacgtcttccccggtccctgcatgccttcatcatggtgacatttgccattcagatttttgccctgtggcccatgttgcagaagaaactaaaggcatgtactccccggagctatgtgggggtcacactgctttttgcattttcagccgtgggaggcctactgtccattagtgctgtgggagccgtactctttgcccttctgctgatgtctatctcatgtctgtgtccattctacctcattcgcttgcagctttttaaagaaaacattcatgggccttgggatgaagctgaaatcaaggaagacttgtccaggttcctcagttaaattaggacatccattacattattaaagcaagctgatagattagcctcctaactagtatagaacttaaagacagagttccattctggaagcagcatgtcattgtggtaagagaatagagatcaaaaccaaaaaaaatgaaccaaaggcttgggtggtgagggtgcttatcctttctgttattttgtagatgaaaaaactttctggggacctcttgaattacatgctgtaacatatgaagtgatgtggtttctattaaaaaaataacacatccaaaaaaaaaaaaaaaaaaaaaaaaaaaaaaaaaaaaaa

SEQ ID NO: 414 - DNA, 1904 bp, Homo sapiens
gcgcggccggggcggagacttcgggcccggctggcgggcggcgccgggagcgcgggggcggcgggcccgggtcgagcatgtagcggctgctggcggcggggctcccggggcgggccgggcgggccgcgggagccgcacgcggcgatatggaagaggagggcaagaagggcaagaagcctggaattgtctcgccatttaaacgagtattcctaaaaggtgaaaagagtagagataagaaagcccatgagaaggtgacagagaggcgccctctgcacactgtggtgttgtcattgcctgagcgcgtcgagccagacagactgctgagcgactatattgagaaggaggtaaagtatttaggtcagttaacgtccataccaggatacctgaatccctccagtaggactgaaatcctgcatttcatagacaatgcaaagagagcccaccagcttccgggacacttgactcaggagcacgatgctgtgctcagcctgtctgcgtacaacgtcaagctggcctggagggacggggaggatatcatcctcagggtgcccatccatgacatcgccgccgtctcctatgttcgggatgacgctgcacacctggtggtcctgaagacagcccaggacccagggatctcccccagccagagtctgtgtgcggaaagttccagaggcctcagtgcaggctccctgtcggagagtgcagttgggcccgtggaggcatgctgcctggtcatcctggctgcagagagcaaggtcgctgcggaggagctttgctgtctgctaggccaggtcttccaggttgtttacacggagtccaccatcgactttctggacagagcgatatttgatggggcctctaccccgacccaccacctgtccctgcacagcgatgactcttctacaaaagtggacattaaggagacctacgaggtggaagccagcactttctgcttccctgaatctgtggatgtgggtggtgcatcaccccacagcaagaccatcagtgagagcgagctgagcgccagcgccactgagctgctgcaggactacatgctgacgctgcgcaccaagctgtcatcacaggagatccagcagtttgcagcactgctgcacgagtaccgcaatggggcctctatccacgagttctgcatcaacctgcggcagctctacggggacagccgcaagttcctgctgcttggtctgaggcccttcatccctgagaaggacagccagcacttcgagaacttcctggagaccattggcgtgaaggatggccgcggcatcatcactgacagctttggcaggcaccggcgggccctgagcaccacatccagttccaccaccaatgggaacagggccacgggcagctctgatgaccggtcggcaccctcagagggggatgagtgggaccgcatgatctcggacatcagcagcgacattgaggcgctgggctgcagcatggaccaggactcagcatgatggacagtggatgggggggcacccacaccttccgcgcagtcgtcataggccttcccagaaggagctgcccagacctgcgtgtcagcccttggtggtggccagggagaggcgcccggtgcagatggccccgggcggcccaggtcctctactgtgaaggagcagggagctgccgagggacacgagcctcagtgcggggtggaaggctctttgccttgtccaccagggctcagccaagccctgcagtgtgtccccgctcggggagggcccggccgagcgggcagggagagccagtcctgtcggctgggcccttggacggctgtcagttttgcacatgatgttcctattgtaactctcagagaccttaaaaagaagtttactgcaatgtgaataatttaatctctggttgccaagcaaaaaaaaaaa

SEQ ID NO: 415 - DNA, 10719 bp, Homo sapiens
catcatcatggcaacaagagctgcagcctgggaccgaggagcccgtgtgattcccggcggtggcggcagtggcggcagcaccagcaccgacgaaagctcgagggcttctctcctgcggccccttgccgggtgctcctgaggaggcggcggcagcagcgcctacaccgccccgcccgccgctcctcgaggtgcctctgtgtgaggggagggggccgtgccgagaaggggagggggcgccgccgccgctgcggagggagccgccgccgctgctgctgccgctgccgggtcgccagtgaagggaggcagtggcggcggcggcgaacatgttttcagtaaggatagtgactgcagactactacatggccagcccgctgcaggggctggatacctgccaatcccccctcacccaggcccctgtcaagaaggtgccggtggtgcgagtcttcggagcgaccccggcaggtcagaagacatgtcttcatctacatggcatctttccttacctctatgtgccatacgatggttatggacagcagccagaaagctatctttctcagatggcattcagtatcgacagagcacttaatgtggctttaggcaatccatcttccactgctcagcatgtgttcaaagtgtcattagtatcaggaatgcctttttatggttatcatgagaaggaaagacactttatgaagatctatctttacaatcctacaatggtgaaaaggatatgtgaacttttgcaaagcggagccataatgaataaattttaccagcctcatgaagcgcatattccctacctcctacagctcttcattgactacaatctttatggcatgaatttaataaatctggctgctgtcaagttccgaaaagcaagaaggaaaagtaatacattgcatgcaactggatcctgcaagaatcatttatcaggaaattctcttgctgatactttatttcggtgggaacaagatgaaataccaagctctttaatattggaaggtgttgaaccacagagtacatgtgaattagaagtggatgctgtagctgctgatatcttaaatcgtctggacattgaagctcaaattggtggaaaccctggtctacaggccatatgggaagatgaaaagcaacggcgaagaaacagaaatgaaacttctcaaatgagccaacctgagtcacaagatcacaggtttgtgccagcaacagaaagtgaaaaaaaatttcagaagagacttcaggaaattctcaaacagaatgatttctctgtaacattatcaggatctgtggactacagcgatggatcccaggagttctctgctgagttaacattgcactctgaggttctgtctcctgaaatgcttcagtgtacaccagccaatatggtagaagttcacaaagacaaagagtcaagcaaaggtcacactagacacaaagtggaagaagctcttattaatgaagaagcaattttgaaccttatggaaaatagtcagacttttcagcctttgacccaaagactgagtgagtcacctgttttcatggacagtagtcctgatgaggctctggtacatcttcttgctggtttggaaagtgatggatatcggggggaaagaaataggatgccatcaccatgtcgctcctttggaaataataaatatccacaaaatagtgatgatgaagaaaatgaaccacagattgaaaaagaggaaatggagcttagtttggtgatgtcccagagatgggacagcaatattgaagaacattgtgccaaaaagagatcactgtgcagaaatacccacagaagttcaactgaagatgatgactcatcttcaggagaagaaatggaatggagtgataacagtttgcttctagccagtctttctatacctcagttagatggaactgcagatgaaaatagtgacaatccattgaacaatgaaaattctagaacccactcttctgtaattgcaacaagcaagctttcagttaaaccctccatctttcacaaagatgctgctacattagaaccctcatcttctgctaagattacctttcagtgtaaacacacaagtgccctttcttcccatgttttgaacaaggaagatttaattgaagacctttcacagacaaacaaaaatacagaaaaaggtctagataactcagtcacttcttttacaaacgaaagcacttattctatgaaataccctggatctttaagcagtactgttcattcagaaaattctcataaagagaatagtaagaaagagatcctcccagtatcttcctgtgaaagtagtatttttgattatgaagaagatattccatctgttacaagacaagtaccaagtagaaaatatacaaacattagaaaaatcgaaaaggattccccttttatacatatgcaccgtcaccctaacgagaatacattgggcaaaaattctttcaacttttctgacttaaatcattcaaaaaataaagtatcctctgaaggaaatgaaaaaggaaacagcacagctctgagtagtttattcccttcatcatttactgaaaattgtgaattactgtcatgctcaggggagaatagaactatggtgcattctcttaatagcactgctgatgaaagtggactaaataaacttaaaattaggtatgaagaatttcaagaacataaaacagaaaagccaagcctcagccagcaagcagcacactatatgttttttcccagtgttgttctttctaactgtcttactagaccacagaaactatctcctgtcacatataaattacaacctggcaataaaccatcccggttaaaattgaataaaaggaaacttgcaggtcatcaggagacttctaccaaaagtagtgagactggatccacaaaagataattttatacaaaataatccttgtaatagtaatcctgagaaggataatgcattggctagtgatttaactaaaaccactcgtggagcttttgaaaataaaacacccacagatggttttatagactgtcactttggagatggaacgttagaaactgagcagtcctttggactatatggaaataaatacacacttagagccaaacgcaaggtaaattatgagactgaagacagtgagtcaagttttgtaactcacaactcaaaaattagtctacctcatcccatggaaattggtgaaagtttagatggaactctcaaatcccgaaaacgaagaaaaatgtctaaaaagctgccccctgtcatcataaagtatattattattaatagatttagagggagaaaaaatatgcttgtgaagctaggaaaaatagactctaaagaaaaacaagtaatattaacagaagaaaaaatggaactatataaaaagcttgcacctttgaaggacttttggccaaaagttcccgactcccctgcaaccaaatatcccatttatccactaacaccaaagaaaagtcacagaagaaagtcaaaacataaatctgctaagaaaaaaactggtaaacaacaaaggacaaataatgaaaatattaaaagaactttgtctttcaggaaaaaacggtcacatgctattctttctcctccctcaccatcttacaatgctgaaaccgaagattgtgacctgaattatagtgatgttatgtctaaactaggttttctttctgagagaagcacaagtcccataaattcttctccacctcgctgctggtctcccacagatccaagagctgaagaaatcatggctgctgcagaaaaagaggcaatgctttttaagggtcctaatgtatataagaagactgttaattctcgtataggaaaaactagtcgcgcaagagcacagattaagaaatcaaaagcaaagcttgctaatccctctatagttactaagaaaaggaacaaacgaaatcagacaaataaactagtagatgatggaaaaaagaaaccaagagcaaaacaaaaaacaaatgagaaaggtacatcgagaaagcatacaacacttaaggatgaaaaaataaaatctcagtctggtgctgaggttaagtttgtactgaaacaccagaatgtgtctgaatttgcaagtagttctggaggctctcaactactttttaaacagaaagatatgccactaatgggctctgctgtagatcatcccctttctgcttccctacccactggaattaatgcacaacagaagttatctggctgcttttcttctttcttagaaagcaagaagtctgtagatttgcagacattccccagttcacgagatgatttgcatccatcagttgtttgtaattctataggacctggagtctcaaaaattaatgttcaaaggcctcataatcaaagtgctatgtttactctaaaggaatcaacgttaattcaaaaaaatatatttgacctttccaatcatttatctcaggtagcacagaatacacagatatcttctggtatgtcctcaaagatagaagataatgcaaataatatacaaagaaactatttgtcatcaatcggaaagttaagtgaatatcgcaattccctagaatcaaagctggaccaagcatatacccctaattttttgcattgcaaagacagtcagcagcagattgtgtgcatagcggaacagtcaaagcacagtgaaacttgttctccgggaaatacagcttcagaggaaagccaaatgcctaataattgctttgtaacttccttgagaagtccaatcaaacaaatagcatgggagcaaaagcaaaggggctttattttagatatgtcaaattttaaacctgaaagagtaaaaccgaggtcgttatcagaagcaatttcacaaaccaaagcactttctcagtgtaaaaatcgaaatgtgtcaacaccttcagcatttggtgaaggacagtctggactggcagttctaaaagaattgttacaaaaaagacagcagaaagcacaaaatgcaaatactacacaagacccattatccaataaacatcaaccaaataaaaatatttctggttcccttgagcataacaaagcaaataaacggacacgatcggtaacgtccccaagaaaacctcgaactcccagaagtacaaaacaaaaagaaaaaatccccaaacttctcaaagtagactctttaaatttacaaaactctagccagttggataactctgtatcagatgatagtcccatctttttttcagatccaggctttgaaagttgttactcacttgaagatagtttatctcctgaacataattataattttgatattaacacaataggtcagactggattttgtagcttttattctggaagtcagtttgtcccagctgatcagaatttgcctcagaagttcctaagtgatgctgttcaggatctttttccaggacaagctatagaaaaaaatgagtttttaagtcatgacaaccagaaatgtgatgaagacaagcatcataccacagactcagcctcatggattagatctggtactttaagtcctgaaatttttgagaagtcaaccatagatagcaatgagaatcgtcgccacaaccagtggaaaaatagctttcatcctctaacaactcggtctaactcaataatggattctttctgtgttcagcaggcagaagactgtctaagtgaaaaatctagattgaataggagttcagtaagcaaagaagtgtttcttagcctcccacagccaaacaattcagactggattcaaggtcacaccagaaaagaaatgggacagtctcttgactcagccaatacctcttttactgcaatactctcctcccctgatggtgaacttgtagacgtggcctgtgaagatttagaactgtatgtttcaagaaacaatgatatgttgacaccaactcctgatagttcaccaagatctactagctctccttcacaatctaaaaatggcagcttcacccctcgaactgctaacattctgaaaccacttatgtcccccccaagtagggaagaaattatggcaactttgttggatcatgacctgtctgagactatttaccaggaaccattttgcagtaatccttctgatgtaccagaaaagcccagggagattggtggacggctcctcatggtagaaactcgacttgcaaatgatctggctgagtttgagggagacttttccttggaaggacttcgtctttggaaaacagcattctcagcaatgactcagaatccaaggccagggtcaccccttcgcagtggccaaggagttgtcaataaagggtcaagtaatagccctaagatggttgaagataaaaaaattgtgattatgccttgcaaatgtgccccaagtcgacaactggttcaagtgtggcttcaagccaaagaagaatacgaacgttccaagaaactgcctaaaaccaagccaactggagttgtaaaatctgctgagaactttagctcttcagttaacccagatgacaaacctgtagtgcctccaaaaatggatgtaagtccatgtatactccccactacagcacataccaaggaggatgttgataattctcagattgctttacaagcaccaaccacgggatgtagtcaaactgcaagtgaaagtcagatgctgccaccagttgcctctgcaagtgatcccgaaaaagatgaagatgatgatgataactattacattagttatagctcccctgattctccagtaattcccccttggcaacaaccaatatccccagattccaaagcattaaatggagatgatagaccctcatcaccagtagaggagctgccttcattggcttttgagaacttcttaaagccaataaaagatggtatacaaaaaagcccctgcagtgagcctcaagagcctctagtgatatctccaattaatactagggcaagaactgggaaatgtgaatcactttgctttcatagtacaccaatcatacagagaaaacttctggaaaggcttcctgaagcacctggccttagcccattatcaacagaaccaaaaacacagaagttgagtaataagaaaggaagtaatactgacactcttagaagagtactgttaacacaagcaaagaatcaatttgcagcagtaaataccccacagaaagaaacttctcagattgatggaccatctttaaacaatacttacggtttcaaagtcagcatacaaaacttacaggaggcaaaagctttacatgagatacaaaatcttaccctaatcagtgtggagttgcatgctcgaactagacgagacttagaaccggatcctgaatttgacccaatctgtgctctgttctactgcatctcatctgacactccactgccagatacagaaaaaacagaactcacaggtgtaatagtgattgataaagacaagacagttttcagtcaagatatcagatatcagactccattacttattagatctggaattacaggactcgaagtcacctatgctgctgatgagaaggcactttttcatgaaattgcaaatataataaagaggtatgatcctgatattctgctaggatatgagattcagatgcattcctggggttacctcttacaaagggctgccgctttaagtattgacttatgtcggatgatctctcgggtgccagatgacaaaattgagaacagatttgcagctgaaagagatgagtatggatcatatacaatgagtgagataaatattgttggccgaattacactaaatctttggagaatcatgagaaatgaggtggctctaactaactacacctttgaaaatgtgagctttcatgttcttcatcagcgttttcccctctttacctttcgagtcttgtcagactggtttgataacaagacagatctatacagatggaaaatggttgatcattatgttagccgtgtccgtggaaatctccaaatgttagaacagctggacctgattgggaaaaccagtgagatggctagactttttggcattcagtttttacatgtactgacaaggggttcacagtaccgtgtggaatcaatgatgttgcgtattgctaaaccaatgaactatattcctgtgacacctagtgttcagcaaagatcccagatgagagccccacagtgtgttcctctaattatggagcctgaatcccgcttctatagcaactctgttctcgttttggatttccaatcactttatccttctattgtgattgcatataactactgcttttccacctgccttggccatgtggagaacttgggaaagtatgatgagttcaaatttggctgtacctctctgagagtacctccagatttactttaccaagttaggcatgatatcacagtgtcccccaatggagtagcttttgtcaagccttcagtaagaaaaggtgtactaccaagaatgcttgaagaaattttgaagactagatttatggtgaagcagtcaatgaaggcttacaagcaagacagagccctgtcacgaatgcttgatgcgcgtcagttgggacttaagctgatagcaaatgtcacatttggctatacatctgctaatttttctgggagaatgccatgcattgaggttggcgatagtattgttcacaaagccagagagaccttggaacgagctattaaactggtgaatgataccaagaaatggggggctagggttgtatatggcgatactgacagtatgtttgtgctactgaaaggagccactaaggagcagtcttttaagattggtcaggaaattgccgaagctgtaactgctaccaatcctaaaccagtgaaattgaagtttgaaaaggtatatttgccctgtgttttacaaacaaaaaagaggtatgtgggttacatgtatgaaacactggatcagaaggacccagtatttgatgcaaaaggaatagaaacagtcagaagagattcctgccctgctgtttctaagatacttgagcgttctctaaagctgctatttgaaacgagagatataagtctaattaaacagtatgttcagcgacaatgtatgaagcttctggaaggaaaggccagcatacaagactttatctttgccaaggaatacagaggaagtttttcttataaaccaggagcttgtgtgccagcccttgaacttacaaggaaaatgctgacttatgaccggcgctctgagcctcaggttggggagcgagtgccatacgtcatcatttatgggacccccggagtaccacttatccagcttgtaaggcgcccagtggaagtcctgcaggacccaactctgagactgaatgctacttactatattaccaagcaaatccttccacccttggcaagaatcttctcacttattggtattgatgtcttcagctggtatcatgaattaccaaggatccataaagctaccagctcctcgcgaagtgaacctgaagggcggaaaggcactatttcacaatattttactaccttacactgtcctgtgtgtgatgacctaactcagcatggcatctgtagtaaatgtcggagccaacctcagcatgttgcagtcatcctcaaccaagaaatccgggagttggaacgtcaacaggagcaacttgtaaagatatgcaagaactgtacaggttgctttgatcgacacatcccatgtgtttctctgaactgcccagtacttttcaaactctcccgagtaaatagagaattgtccaaggcaccatatctccggcagttattagaccagttttaaattgtcaatatcacagtattacaggtgctatttttttcagtgcttaccactaaactgttgtgcatggtgctttttaactttcatcgagtcaaggatgttcactgtctgttatctgaagactatgaagacttctatgctaaccgaattaaaatgtacttgttgatctctgaatagctcacttcttacaatgtacaaattcctcattctgtcaccttttaaacattgttttataatgcaggtgttggatttgctccagtatgtgtaccatcttgtaaattcatttgagtagatcatgtttacttcccagtggaaggagcactgaaaacctcttaaagaaaaagcatttgtgtgttttccttgaactgtctgtatcaagacgtgttacttcgagatatccattcactttataattttgactgcaaaatattttgtaaatacacttttttacttttcaaacgagcaaaataatgtgcaatgatttttatacaaatgattttcaagttgtttggtatatttcctctaggttttgcttgactcaaagtagatcgttattttgatcaaactgtgcaaacagtagtaccacgtgtagcattttgaaacattatttttttttaaaaaatgctgtcttgctttagctattaatggggcattgtgaggaactgtgcaaagacatttttgttacaaacctgtgggcctgttgcaatactttaaaaataaaaaattttattccatttgcttgttttgtatagacatttctattgcttctaaatatacttaaaatattttctttccttatgtactgtacagttaatcttatttgccatcatcttgaacacaaaatgtgtatttagaatatttgtataactgtgtaaaataaaaaaggaattatgtggtcagtgcattgttttttaaactggaaatcattttgttttaaaagttaataatggaaaccatattaaaattgaataaaatataaaataatataaaaaaaaaaaaaaaaaaa

SEQ ID NO: 416 - DNA, 1858 bp, Homo sapiens
ctctgcctgggtgtctccctctctcagtgtgtgtgtctctctgtctgttttcacactctcctccccaatcgagcgaggcccacacctggcgcatcactgccgagccattagctgcgggtttcctttcatcttcgctgtggcagacgtttctatttatccacttgcgctcgccgagtggcgtcaccagcggtactgtaatgacgattgcagcaggaggatgacagcttagaaagaagagggcaatggggcttcctcccagaggcggtgcggcacagaggagcgctcgcttcacaaggtgaccctagctcccaccgccaccgccgcggtcgcggtccagaccgcgctccagcagctccgcgccctcccaggcacccggcctttctttctccctcttgcaaccaagatccgtccggccgctggagacccagggagccggggttaggaactcacttggggctttcccctcccccaccggagagccccgggatggagagccgaaaggacatggttgtgtttctggatgggggtcagcttggcactctggttggcaagagagtctcaaatttgtccgaagccgtgggcagcccgctgccggagccgcccgagaaaatggtgccccgtggttgcctgagccctcgggccgtccctccggccacccgggagcgcggcgggggaggcccggaggaggagccggtagatggactcgcaggcagcgcggcggggccgggcgccgagccccaggtagctggggcggccatgctcggcccaggacccccggccccctcagtcgacagcctctccggacaggggcaacccagtagctcggacaccgagtcggatttctatgaagaaatcgaggtgagctgcaccccggactgcgccaccgggaacgccgagtaccagcacagcaaagggtccggctccgaggcgctggtcggcagtccgaacggagggagcgagacccccaagagcaacggcggcagtggtgggggcggctcgcaaggcaccctggcgtgcagcgccagtgaccagatgcgtcgttaccgcaccgccttcacccgagagcagattgcgcggctggagaaggaattctaccgggagaactacgtatccaggccgcggagatgtgagctggcggccgccctaaacctgccggaaaccaccatcaaggtgtggttccagaaccggcgcatgaaggacaagcggcagcgcctggccatgacgtggccgcacccggcggaccccgccttctacacttacatgatgagccatgcggcggccgcgggcggcctgccctaccccttcccatcgcacctgcccctgccctactactcgccggtgggcctgggcgccgcatccgccgcctccgccgccgcctcgcccttcagcggctcgctgcgcccgctcgacacgttccgcgtgctgtcgcagccctacccgcggcccgaactgctgtgcgccttccgccacccgccgctctaccccgggcccgcgcacggactgggcgcctctgccggcggcccctgctcctgcctcgcctgtcacagcggcccggccaacgggctggcgccccgggctgccgccgcctcggacttcacctgtgcctccacctcccgctcggactccttcctcaccttcgcgccctcggtgctcagcaaggcctcctccgtcgcgctggaccagagggaggaggtgcccctcactagataaggggccgccggctggctgccggctccatgacgcccgtggggtcaccccccggccccgggactcagccagcctcgctcctcgctcctcgctcctcgcccctaggacgccaagggggaaaggagagggcggaaaaggaccagcgggatcc

SEQ ID NO: 417 - DNA, 3215 bp, Homo sapiens
gttggcgcatactcaactctaagacctccggaacatggaatctgggcgtgcaccattattgacacctacaccagccgtccctttcttagaagacatacggtagcacttccaccctcgctcaaaactcgggaaaggaggggcggagggtggatgtcatcactccgcgcccggctgcccgcgacgcgccggcgggtggcgcagcccttcgctcgcccggcctccccctccctggttccgcgttctggttccgccatggaatccaacaaggatgaagctgagcgctgtatcagcatcgccctcaaggccatccagagcaaccagcccgaccgggcgctccgcttcctggagaaggcacagcggctgtatccgacgccgcgagttcgcgccctgattgagtccctcaaccagaaaccacagactgccggtgaccaacccccacccacagacacaacccatgccacccacaggaaagcaggtgggaccgatgccccctcggccaacggtgaagctggaggagagagcaccaaaggctacactgcagaacaggttgcagctgtgaaaagggtcaagcaatgtaaagattactatgagatcctgggggtgagcagaggggcctcggatgaggacctgaagaaggcctaccgcagactggccctcaaattccacccagacaagaaccacgcacctggtgccactgaagccttcaaagccattggcacagcatatgcggtactcagcaacccggagaagaggaagcagtatgaccagttcggcgatgacaagagccaggcggcccggcacggccatgggcatggggatttccaccgtggctttgaggccgacatctcccctgaagacctcttcaacatgttctttggcggcggcttcccttctagtaacgtccacgtctacagcaacggccgcatgcgctatacctaccagcaaaggcaggaccgcagggacaaccagggtgatggcgggctaggggtgtttgtgcagctgatgcctatcctcatcctgattctcgtgtcagctctcagccagctcatggtctccagtccaccctacagtctgagtccaagaccgtccgtgggccacatccacaggcgagtcactgaccacctgggtgtcgtctactatgtgggagacactttctccgaagagtacacaggctccagcctcaaaacagtcgagcggaatgtggaagatgattatatcgccaacctccggaacaactgctggaaggagaagcagcagaaggaaggcttgctgtaccgggcacgctactttggcgacacagatatgtaccacagagcacagaagatgggcacccccagctgcagccgactgtcagaggtgcaggcctccctgcatggatagtcctgggccagccacaccaccgaggtccaaactatgaaatccctggagaatttttggtgacatgcactgagccaaggtgatggactgtatatttgaggaaagacaaacaaagaaacaaaattaaaatggaattggaggccgaacgctgcacagctgccctctctctcacccagtaaatgcagaaagctcttaggacagacagaaaacctgccatggggctgcttccctccctcgcagggctggcggaggctccgcatcgcctctctcctaggatacagaaaccatggcaacgaaagtagaatgtaaaactcgcagcagatatcagtgggaagggctgggggagggggcacccagctgcctttcctccctcacaggagccaccaccagccacctctcaggagaagccagaggccctggccaaagataggaggaagaaagagaactctccatagaatgtaatttatagatgcgtgtatatgtatatatatctatttatatgtaaataggcatatatgaagatatatatatatatagtctactttttaaactctgcagggatttggttaagttgttgagctgatttcttccatgttttagaaaatgaggcctgtttggggaaggtaccctggtgatgtttttgctagacattagctgtagctgacagcataaggagagtcgcatcagagcttttcacagccccccgaaaccccagcctggttttgatggcagcagtaatcatgatagtgtgaacccgcgaaggcctcaggattatggttaacctggagaggagcaggccatggaggcaggtgccaggtcagtattgagtcacagtagaggccccacaaggacctgcttgggtgagaccacctctcccctctcagcagcgctggtgggctctttgtcctggtgcccaggagccctccagccccctgcccacagaagggaaggcctgcagagggggccaggatctacctaaccatttccccacccctaagtccctcagtgggctttgccttataggtgccacagggcacagctccatcattgccactggtttttcctaagtcatgcaccaaggacttcagaaagttcttcctccgagtcagtcagtggtgccgggaccccagggcagcctcctcgactcctgaagaaaaggcagtgcccgtggctgcctctgtcttcactcgctgttgatgtgaccgccaggcctcctctcgtaccttggacaaaggatacacctgaaccagaatagttttcttaccctcacattgaaatgaggattttgcttaaaacagcacttgccgccagtgggaggagggaggttttatttattcccacagtttctcctgggccttctggaatgaccatgttttcctgtggcggtgggtgtgtcattgcgcccgccgtcttccaaagccttacttccccaagctgccagccaggaggtgataaccaccctcccagagtttctctcggctctttttttaaaagtcccccaacaaataggattcttgctgggaaaggaagttcggtaaggaaatgtcaaatctggtttttaaacaaggtccaaccctgcaatgaagcagccacttcagcccagagagattataagaactgatgtggccagagtgcctacccactgtggccccggtgctctgcccccacgccccgaccatctggtcttggtagatgtccctagacgggctgagccatgtgcaataagaacatagatcctaaaggatcctctggaagctgtatttcttgaattagaattctcaaattgtacatctgttaatatatgtttattatgtgactggcaaaaaaaaaaaaaaaaa

SEQ ID NO: 418 - DNA, 5621 bp, Homo sapiens
gccttttccctccggctcgggagcgtctcgcttgcgccccgggcccgcggcgcccgcgcggctgcgagcctcgggtggccgcgtgccggctccaggaagccggagagggcgcggcggccaggatggcgcggcacgggccgtgcggctagacgggagccgagggaaccgccggctcgcgccctccgttctttcccggagccggcttcacgcagggccgggaacggccgtgcctctgggatccgccttcgctgacgccgggcacctacctggacgcgagcgagcgagatgcccaaccccaaaaacagcaaaggcggccgcaaaaacaagcgcgccaacagcagcggcgacgagcaggaaaatggagccggggccctggcagcggcgggcgcggcgggagcggcggccgggggggccctggcggcggcggccggttgcggggcggcggcggcgggcgcgccgggcgccggaggcgcggcgggcgccggaggcgcggggactggcgccgcgaacgctgcggccgccgcgggggctgcggccgcgggcgatgccaaaaacgaagccccatgtgccactcccctgatctgcagcttcggtaggccggtggacctggagaaggacgactaccagaaggtggtgtgcaacaacgagcactgcccctgcagcacctggatgcacctgcagtgcttctacgagtgggagagcagcatcctcgtccagttcaactgcatcggccgcgcgcgcagctggaacgagaagcaatgccgccagaacatgtggacaaagaagggctacgacctggccttccgcttctgctcttgccgctgtggccagggccacttgaagaaggacacagactggtatcaggtgaagcggatgcaggacgagaaaaagaagaagtctggctccgagaagaacacagggaggcctcctggtgaggcggcggaggaggcaaaaaagtgcaggcccccaaataagccccagaaaggcccaagccacgacctcccccgccggcattccatggaccggcagaactcccaggagaaggcagtgggtgccgcagcctacggtgcccgttcccccggtggctccccgggccagtccccacccacgggctactccatcctctctcctgcccacttcagcggcccccgctcctccagatacctcggggagttcttaaagaacgccatccatctggagcctcacaagaaggccatggctgggggccatgtgttcagaaatgcccactttgattacagccctgcggggttggcagttcacagggggggacacttcgacacccccgtgcagttccttcggcggctggacctctccgaactcctcactcacatccccaggcataagctgaacactttccacgtgcgcatggaagacgatgcccaagtgggccagggggaagacttgcggaagttcattctggccgcgctcagtgccagccacagaaacgtggtaaactgtgccctgtgccaccgggcgctcccggtgttcgaacagttcccactggtggatggaactttgttcctaagcccgtcgagacatgatgagatcgaatatgatgttccttgtcaccttcaagggagactcatgcatctgtatgccgtgtgcgtggactgcctggaaggggttcacaagatcatctgcatcaagtgtaagtcacggtgggatggcagctggcaccagctgggcactatgtacacctacgacatcctggctgcctctccatgttgtcaggcccgcctgaactgtaagcactgtgggaagccggtgatcgacgtgaggatcgggatgcagtacttctccgaatatagcaacgtccagcagtgtccacactgtgggaacctggactaccacttcgtgaagccattttcctccttcaaagttctcgaagcttattgatgaaagctttgctttagtaatagctattttattgatattattactttattacatatcttttatagggaaacattctgtgacattaatttcctttctaatttaaaggagagttactttgttgtatgtgtgccactaaaataggggctgcccttgccctgtcttgattcccgagtgttaatctgtggttttgaccagagcccagatgggtaatcctgtgcatttgggttggggttcactcttaccaagaatctttgatgcagctttaagatggtggggaggatggggtgaatttaggaaaggaatttgtggttataaactaagagcttgataggagttggaaggaaactcttactaaaatgttaactttctaaaaaccttcttttagatcttccttgggcctttggaaaaatatgtgacaagtgaatgtaagtctgtgcctggagagctaatagtgcattagtctatctcagcctagtgttctgcagcacacatgggcaggcagtttactcacactgacaggtgacctgaaagtggcacaagtgctgtttctatcactattgtaatttgccagttcatttttcatgctgaaagtaatatccaaattgtaagacatatgaaagatattagtgttgcaaatatgtttaggtaaactgacctataacagaatatgtgaaatgaatttggaaataatgcaagaaggcagaactcaatcatttaaattgtgtctttgaagttggtaatatagcttttaaggagaacccatgaataacctgatttgggcagtgatgatttattacaggttgcactgttgaagtgtcatttggtgtcaggttcttctcacaggtaaatctttcagccacagaatctaactggtgagcttcagaaccaataattgccacatttattgtcctcaaaattgcttatggccatgtataaccaattaattctgagtttccaaaatcaaagatttgaccttaagagggaagggaaaaaagtgtgaaaggatgatgaagaaaataattttactatttcttttaaaagtatgttttggaaaatcaatgattttaatgcatagcagtatgtttgaaaaatagaccattctaaaaagcccatgataccttactgttgatgaaaaaggatgatcatatatatagaacttgattagtcagagcattgggcattccaaaatacagcctttggttcagtagattttaatgctttaaatagactgacgtcgcatacccttatagaattggaatatgatttctcaaaaattaatttgataatttcatgtatgatgtgcatatatgctaaaagaatgcagaaaatcattttatgaatagccaaatttggggttgatgtgaacattttatgttactcatttggtttatacttttttttttttttttttaactgtgtggtttttcttttcagaagtatttaggcaatattgcacgtgagtttcagttctttttttcttttttttgagatggagtctcactcttgtcacccaggctggagtgcagtagtgcgatctcagctcactgcaacctctgcctcctggattcaagcgattctcctgtcccagcctcccaggtagctgggactataggcacgtgccaccacacccggctaattttttgtatttttagtagagacagcgtttcaccatgttagctaggatggtctagatctcctgaccttgtgatctgcctgcctcggcctcccaaagtgctgggattacaggcgtgagtcactgtgcctggccaagtttcagttctatatgaagtatttgatgttttgtttgaaacaatacagcattaaagaaccaatgttattcactaatatcattcatctttcagtttggatgatttggtttgctgcatctaggttggtgtttgatcatctgaaaaaacatttcagtgggaagaaatgcataaaatgcctataagaagtagaaagtcattgaactgacagtgtttgatgcaactaaaagaggattgtaagacatagctttctgcaaacttgtctttaatgcacaaagctgtagtggtgaattaactatctccttattgattctctcctgtacccagatgcaaaaagtgctaagtttctcttgtcctcgtaataccatttggattttatttctgaatttaaatagtaaaatatttatgatgctgatctttaacccacctaaaattttatagtgaaacctgctttatattgttgttctgaagcttacaattgacctatacattgcattcagcaagctcctgaatttagaactgccgtcagtgtagtgtatgctgtgttccatgttgcctttttagatggctttctaccccctgaacaataaataggatgaggttttactgtaattgggtaaagtttactcttggacattatttcgatgctaaagtaaggattctgtggatgttacttaaagagaaaagcataagagcatgaagcatatctgggaatatcttttgcctttaagacgattcattcttgtctagagggaaaatctggctgatttgggaataaaatataatcgaatattcaacaccatgaagataaatcttattttggaaatctactgaccttaataccccaagcttgccctgaatactttgattggaattggaatatatcaaaaaaggttagtatttttgttgtagttaggatactaaaaggatattagttacccaagagatccaatttgtttttctgatgaatagtgttcagtaaaatgaagcagtcttaagagtgactaataatttcaaagtgatttttcgtctattcttaatattttttaattatttatttttaagagttttataccttgagcagatacaatgatctgctttagtgagaggacaatttctgattgattgttttctcttcaggccatctcacctcttcattctcttgttacatttgaagcagttgatataatgggtttatactttaaaagatagacatggtgccatgaagttggggagttgggtgaattatcccattctagttacagaggagctttccttaaatgccctttaacttctaggttttgttcaagaagttcattttctgagtaaaaggtattttcatatatgttgggggaaaattaactcatctaaaaagaatcttattaggtatttgaactctaaaactaacagataagacagatatgtaccttattagagcaccagaactaatttgctaagtcttttgtttagtcctgcaagactgatgcttaatacacagtctgttctcctgtgtctaggtcaggaactccagtttgcttttctgttttgtgtcctggtagcagctgttgagtaactttcattggaggttgggaaggaagtgaggagaaagtgttcttgtttagtgttttatttcctataataggatgctgcctaacccagttcatctctatgtcctgttcactgaatattccgggtaattgaaagaaaatataatggatgggctccattaaaaccagctcaaaaataaattcttgtcagtaaagatttcttgtcaagatgtcttggattgcacttttgttgaggaaagacagtgtaaatagttaaagaatgttgataaaattgaaacatttggttgtggaattgtgtgtggttttagagggtttctgtttgtgaaatgtatgtattaaaaataataaaattccagaaactaacattgta

SEQ ID NO: 419 - DNA, 1250 bp, Homo sapiens
gcttctgccctcaaccaaaatggcgctagctcggaagctgccgaggtgctaggagttgccgaagcaagtccggaagctaccgagcgagtccggaagttgccgaaagggagcagcggggaaggaggatggcggatatcatcgcaagactccgggaggacgggatccaaaaacgtgtgatacaggaaggccgaggagagctcccggactttcaagatgggaccaaggccacgttccactaccggacgctgcacagtgacgacgagggcaccgtgctggacgacagccgggctcgtggcaagcccatggagctcatcattggcaagaagttcaagctgcctgtgtgggagaccatcgtgtgcaccatgcgagaaggggagattgcccagttcctctgtgacatcaagcatgtggtcctgtacccgctggtggccaagagtctccgcaacatcgcggtgggcaaggaccccctggagggccagcggcactgctgcggtgttgcacagatgcgtgaacacagctccctgggccatgctgacctggacgccctgcagcagaacccccagcccctcatcttccacatggagatgctgaaggtggagagccctggcacgtaccagcaggacccatgggccatgacagacgaagagaaggcaaaggcagtgccacttatccaccaggagggcaaccggttgtaccgcgaggggcatgtgaaggaggctgctgccaagtactacgatgccattgcctgcctcaagaacctgcagatgaaggaacagcctgggtcccctgaatggatccagctggaccagcagatcacgccgctgctgctcaactactgccagtgcaagctggtggtcgaggagtactacgaggtgctggaccactgctcttccatcctcaacaagtacgacgacaacgtcaaggcctacttcaagcggggcaaggcccacgcggccgtgtggaatgcccaggaggcccaggctgactttgccaaagtgctggagctggacccagccctggcgcctgtggtgagccgagagctgcaggccctggaggcacggatccggcagaaggacgaagaggacaaagcccggttccgggggatcttctcccattgacaggagcacttggccctgccttacctgccaagcccactgctgcagctgccagcccccctgcccgtgctgcgtcatgcttctgtgtatataaaggcctttatttatctctctctgaaaaaaaaaaaaaaaaaa

SEQ ID NO: 420 - DNA, 454 bp, Homo sapiens
tctctctccggtccgtgcctccaagatgacaaagaaaagaaggaacaacggtcgtgccaaaaagggccgccaccacgcgcagcctattcgccgcactaactgtgcccgatgtgtgcccaagggcaaggccattaagaaattcgtcattcgaaacatagtggaggccgcagcagtcagggacatttctgaagctagcgtcttcgatgcctgtgtgcttcccaagctgtatgtgaagctacattactgcgtgagttgtgcagttcaccgcaaaatagtcaggaatcgatctcgtgaagcccgcaaggaccgaacacccccaccccgatttagacctgcgggtgctgccccacgtcccccatcaaagcccatgtaaggagctgagttcttaaagactgaagacagactattctctggagaaaaataaaatggaaattgtacttaaaaaaaaaaaaaa

SEQ ID NO: 421 - DNA, 6435 bp, Homo sapiens
acctcctgctgctcacacactccagccagggacctgcccccggggtccaacaaggacggctgtcctcagcgaggggccgtgcacccgctcctgagcagcgccatgggcctgctggccttcctgaagacccagttcgtgctgcacctgctggtcggctttgtcttcgtggtgagtggtctggtcatcaacttcgtccagctgtgcacgctggcgctctggccggtcagcaagcagctctaccgccgcctcaactgccgcctcgcctactcactctggagccaactggtcatgctgctggagtggtggtcctgcacggagtgtacactgttcacggaccaggccacggtagagcgctttgggaaggagcacgcagtcatcatcctcaaccacaacttcgagatcgacttcctctgtgggtggaccatgtgtgagcgcttcggagtgctggggagctccaaggtcctcgctaagaaggagctgctctacgtgcccctcatcggctggacgtggtactttctggagattgtgttctgcaagcggaagtgggaggaggaccgggacaccgtggtcgaagggctgaggcgcctgtcggactaccccgagtacatgtggtttctcctgtactgcgaggggacgcgcttcacggagaccaagcaccgcgttagcatggaggtggcggctgctaaggggcttcctgtcctcaagtaccacctgctgccgcggaccaagggcttcaccaccgcagtcaagtgcctccgggggacagtcgcagctgtctatgatgtaaccctgaacttcagaggaaacaagaacccgtccctgctggggatcctctacgggaagaagtacgaggcggacatgtgcgtgaggagatttcctctggaagacatcccgctggatgaaaaggaagcagctcagtggcttcataaactgtaccaggagaaggacgcgctccaggagatatataatcagaagggcatgtttccaggggagcagtttaagcctgcccggaggccgtggaccctcctgaacttcctgtcctgggccaccattctcctgtctcccctcttcagttttgtcttgggcgtctttgccagcggatcacctctcctgatcctgactttcttggggtttgtgggagcagcttcctttggagttcgcagactgataggagtaactgagatagaaaaaggctccagctacggaaaccaagagtttaagaaaaaggaataattaatggctgtgactgaacacacgcggccctgacggtggtatccagttaactcaaaaccaacacacagagtgcaggaaaagacaattagaaactatttttcttattaactggtgactaatattaacaaaacttgagccaagagtaaagaattcagaaggcctgtcaggtgaagtcttcagcctcccacagcgcagggtcccagcatctccacgcgcgcccgtgggaggtgggtccggccggagaggcctcccgcggacgccgtctctccagaactccgcttccaagagggagcctttggctgctttctctccttaaacttagatcaaattttttggtttttaatcagttatcttgggaacttaacctggcccctcacctcttctgcaccccccgcccccgaaactgtctcgtaatgaatttctgctgtcctcctgggagtggacggccgggtcccgtcccccgggagcatcgctcggctcagcaccttggctcccagtgggggccccgtggagggcgcccgtagtgataagcacaccggcacgaacgtcaggtccattcctcgaagtcggagccctcactctgccctgtcctggggctggctgagggcgaacgccccacctcactttctagagccctgtctgtcctagctcctatctgaccttgtgtgtaaatacgtacatctgtttttaaagtggatgggcccctgagaactcagtgaaatgcagagttctccatgcacctaaagctcctttgtcgctctcatggctgtcagatcctggtccctccacactgggtgctggggagggaggaccctcggggctaccgcgcgcccccccatcccacagatcaggagccaaggagggagaacagggcagcctgtgggactctaggatgcttcagaagaagcgacggcaccgtcaaccctctgttttttaaaggtggttggagactgttaacactgagctcattgacttctagagattttatttttactggttgatctcttggtggttttcaacttcctgctggaaactagaggtggggcaccccccaccccccagcctcgcactgtgtccttggggaaggcccgcccccatcctggccggtgtcactgtggcccggccacccctgagcgcccagctccctacctcctggacgtctctgagagtccaggcagagcagagggcagcgctcggccggtcatgctggctcccttggccttgcagcgagcccctggcccacgccgagcgagggatgcttctccctacagcatgtccactcccccggcatggccaggtggggcccctggggcaatggcagtggtagaacgctcaacttggttgcggtaccatcagcccacctgcatttggctttcgacttgcttgttctaagtcacagcgccctcatctttttagcaaggtaaaaaaaccaaaatgggtgttatctctgatatcttgaaaccagcgttctgaatagaggtaggttgagttttctaggggaaaacaaatggagaaaagaggcatgaagaaaagtaaaccgagaacataattaggcatcgggcctaagtgtcctggggagattggaggggacggcagcgttctgcatgatggaggcgctgccgggccccgggtctgtgggggccgtgctctcagggcgtgtgcgggacgccacctgtgcacacctgctcagagcacggctcctcgcaggggtgaaggggcagaccaacgaaaccagatgagaccaacgacaccatgcgagacacgcttgcagacactgttgttttggaaatgtgcttccctccatctgaaatctcatccctccacccgcccactcgggcagctgtgccgtgggcagggcatgcgctcccctggctgagcaccccagagattctcctgcaccttcctcatgccgcacgctgctcatccgtctccatgtgtgtttagatccatgccattcactgactcactaacacctgcaaaatctttaaggaaaaaagctgaagggtacgaccatgcacatatgtgacctggaaaatgcaaatttagatcttttatgatttaattattattgtttcccatagaagttccctccctttgaaattaatatataatgtataaattctgcactgagccatggcggagctgggcagcccctaggttagagtggagacggaggcccaggcgcaggggtcacacctcatctggtttccttcccatctcacagcttagcttgtgcttctcaacaccaagtctttaagagcaataaaaactacaccatgaatgtttgaattttttttttttgggggggggagggtggattttgcttttcatccagaaggaaaaggggaggagagctcctttacattttttaaattaaattcataaatcccagaacagtcttttttttttctttttcctttacaccctacttctgagcttaattcagttgatgttatgtccaaattcaggctgagtgctcaggctgaagcaactctgtagcccacagtccgtgctggccactgtcggggtgaggcacattctaggcctggcatcgctgatgccctctgcacccagtccttgagccaggccgaggacaggaagggcattgctggcctgtagctcctgttacccacccagagccaggcgccacactggaggctcccaggcgggagggcccaggcccacccacgggcgtctggccggtcaagctcccagcctgggccgtggtctcctggggacgccgctggcctcccagcttaggcccaggtgccaggtgtcatggggtctcctgcccatcttcccaaggatgccattgctgtcttcatcgtcttcccccgtgtgagacactggttgtctggtactcggcgacagtgtaccagacgcgcaccctatgtgaggtgctttaaggtccctgtcctcaggaagcgcagtctggtggaagagatgagcgctgaacaaatcactaaataacacaaaacaacaatgtaagcagcactttcttgtgtaaaaaaaaaaaaaaagcacgtcctgtcgatgaattttgagtctctctgccttgcctgtcccgactccctttcgcgcaccgtggcatgagaatctttcctcacgctgttcgttgcggtattgctgagcattgatgttgatttgaaggaaaagccgtggttggacccagctgtgtgtttcactcacgtgcaattgagtagctgttgccaggctgtccatgcctgttgtgactaccggttggggtcagatttggggtgaagaatgagtaagtttctgcatgctttgtctctacctgagacacttctacaacaagccaagtataatctctccagccctgcagattttcacctgacttgttcagccccatgcgtagactcccgctgcaggcctctggcctgtggctcactgcatgcagcccctggcgtgcaatactagtgctccacggcgcgatgtgcttctagcccttgcactgcacctaggctcagggttcaaacggccagcccgaaaagcctgcctgccttctttctggaaacagcacgtccccggccgtgtgcctgcccctttctctactgagctagtccccaaaccaaaggcaagccccctcgggcctcgggggatggggccggccacacccctgactccgccctggctctgccccatacccctgccgtggggccgacctgggggatgcagacatccggctccgtattcctgcctatcggggccaggatgcaaaaacaatttttgcgtaaaagatgtcacactgatctgctggagtggggtggacacatgaattcagttttatcatgaacactcgccactggctgcttgttaattcagggataatggtggcattcttacaaactgctcgggaaatagaatgacgggaacacttttagggagcccaggaagttaccagggacattggtgtcgccggcccaggcaacagcagcgtacgcttttcaaagatcattgagttgtcttagaatttgaagctgtgtaatgacaatgtcacctggagttcgtctccatttcttaactttttgttgcacaagtatttggacagaagtcgaactgtgaatgagatactgaaatgcactaaattgtattacattaaactggagttacttgatacaatgaagaaatgcatctgatctacttgtatttattgtctcagaattgtacgttgtgacaatcaaatgttacttgcctaaatgccaggaaattcaactggccttttaatcagcaagatcgccagcaagtactgtaactgtaaaggaaaatctctctctctggagaacccacacaaaccattgacctgagtgcgcatgacagccactggcttctttttctatgattgaaaatctgccatcgctgactgttggccagtttcaaagggacccattgtatacagggtgcaaatgtattatacggatgtttccttttgtacacttcatttttacaagttttgctactcacaagctttatgtagtggaggatagaggtatttttggtctttagaagcttgtcggggtgagggctgctaacttacacttcagaggcctgtgtcccaaaggcctggctgcgtttgccgtgctgtgcgaggacctgtgtacacaggcaggtgtgcgcctgcccgagcgcgagtagctcttgtgtagtggtgaaatgctgcaggcatctgtttattaaaattgctgctgtgaaagacagggataaaatatccacaatataagagaaagcgactccgtgcctccttctgtttcttcgtttccagtctgcatagatgtctccaaggggaaaccagggccaccaggcactcctgtcccatggggccacccaccttcagagcccactcccacgggctctgtttccttggaggccatcctgccgatggcacttttcaaggccctcccttccctacgagttgctttctgggaggggaaattgaaaaggagagcggtcacctggcaaaaacacaggggaaatcagccagtccacaaaaatacgcaaaatgacctgatgatgtccaaaaaagggttttaaaagcgatcaaggacaaaaggttttcctaagtggcatgtatacatccaaaactactctttttttgtaaaaacattcatctgtggagaaaaccaaggaacccctttctcttctttattaaaaagcaaaacaaaaactcttgttagaaccaaaaga

SEQ ID NO: 422 - DNA, 4869 bp, Homo sapiens
agcggtgcacaagaagagaccgaggcgggtggccccgagagagccagggccatggaggccaacatgccgaagcggaaggagcctggcaggtctctccgcatcaaagtcatctccatgggcaacgccgaagtggggaaaagctgtattataaagcgatactgtgagaaaagattcgtgtctaaatacctggcaacaattggaattgactatggagtcacaaaggtacacgtcagagacagagaaatcaaagttaacatctttgatatggctggacatcccttcttctatgaggttcgaaatgagttttacaaggacacacagggtgtgatactggtctatgatgttgggcagaaagactcctttgacgcccttgatgcgtggctggcagaaatgaagcaagagcttggacctcatggaaacatggaaaatattatatttgtagtttgtgccaacaagattgattgtaccaaacatcgctgtgtagatgaaagtgaaggacgtctttgggctgaaagcaaagggttcctgtactttgaaacttcagcacaaactggagaaggcattaatgagatgttccagaccttttatatatccatagttgatttatgtgaaaatggcgggaaacgccctaccaccaatagcagtgctagtttcaccaaagaacaagcagatgccattcgcagaattcgaaatagtaaagacagttgggacatgctgggagtcaaacctggggcctcaagggatgaagtcaataaagcgtatcggaaacttgctgtgcttcttcaccctgacaaatgtgtagcacctggcagtgaagatgccttcaaagcagttgtgaatgctcggacagccctcctgaaaaacatcaagtagaaagtacagaaaaaagccacatgtgggactcaaatgcaaacagactttccctagaggtgaaataaccaacgtggagttttccttcccagaatctcactgctcttttcattcatgtgttgtcatttgtatatcagtaattcaggtacccatttcatagacattttactgagaaatgacctgcatttgtatgaagtgaactgagcgtcacaccctgtacttcatttcatatttctagataattctgaatttttttctcattcgtcagctctgtaattatagtatcacttagacatttcacttggggaaatccacaaggttcctggaggagggaagagaggacaagaggaccctttcactttttcttttttacggaattcatcatcagagaagaaaataacaaaaatggaagcaaacaacatcagaacccctgtaagtttggtgtgaccttacagacaagttgctgcttttacaatgagttccttaggtggtattttaacccatcgatctataatgatgactcttggcagccctttgggagtttgtaaaatgaggtgatacagttctgaattgagcattcctttatgatattcactctgttcctcttctgcagccaccagtgggagagacaagccagtcctaagagaaaaggtggtggcagccacaaattctaggtacactggctgctgcctatcctgtccctggatctgaggcctttcccttgccatagaaatggttgctggtagcagtagagagcactgtgcacctgggaatgaggaatcaggccccaagacagaagtacttggaggagccagctgcagtagtatccgcctgtagtcccagctactcaggaggctgagacaggaggattgcttaagcccaggagctcaagtcccacctgggcaacatagtaagatcttgtctcttaaagaaaaaaaaaaaaggtacttagaggtcgcacttaaagattatgcacatcagcagaggaaaggccagccaagcttggggcaagcttgatgcagtaggagagactccttatgaggcttagcccttgtcttactgccagcctttgccacaggcaggtgagaaaggcagggccactcctcagcaaagttggcctcttctacacttcctcaccagtgttgtttcttccttttttcccctcttccccttcccgtcttgtgttttttctgaaccccacatctgccatcatttctctcctctagagtccctggcttctggccactgcctcctccctcttctaagccttggcctgaatctggttgatcagaggcaagtgtggatcctttgggtggcagtcaggggagatctcagggcctctgttgggaggaatctctgtaattcctgcttgggctccaaatttctgaagagtaatatttttaaactatagcttacaaaatacattctctgaccacagtctcctccttgatatacaagggatggatgaagttcatgtattaggactggcactccttacggtgcttatagaactagtctcacaacttgactcattacgtcgtcattcttgttacatcactcatacttttagctgcaaccacactaattcacatttttatatactttcaattagctgtactaattggggcttgaaagtatataaaatcttcctgtcctgtgaattttaaaaagctatcccatatcgattgccaaagagcatctaccttacctcctaagaagaaaagccactttcttccaatccaagcccactgcagccttgtggattttccacacagcagcttttcactgtatgcctgtacttgggctgcactgagcttgtcttcaggaaaccagagcgttgctttatcatcgcacttttcatcttggtaatatcaaaacaactttttaaatgaactgattgatatatgttatttcttgcgaggttttcctctggcctttaactggcttctgaggctacagaactccaacccagagttcttcgggacctaaattttgcttaaggaaggcctttatcatgctgaaagcactcagacatgtctgtcctcacagcagaatgtagaagtcatatgaatgagggatcgtgcacggtagcgtcagcccgaattgacacgacaactctgaatgtgtggccctctatgaaagctggtgccagttttcatcactgttattaaatactagattgggaacctcattcagccgtattgcacagatgagcaattacagcagagaaaattcattagtgctcccactcatatccttatgtgtgagttggtgaaatttagcctgagcttgattcttaggtcttgagactcagtttccaacaccttcattattaatgttaagaatggccatataccacttcatttacgtaaaaggaataaaataagcaagttaagcttcagggtcctagaatttttctgatttctataatccttcagcagaatattaagaaataaagcatgatctgcaatggaaaggtttttttggcactaacttcatgcagaatttcacagacatctatgcattaatttaaattcgtggtgcaaatgtgtgctttgtagttcaaccttattaaaaattcttcagccagttaggatttcaaaatacattagtgagagtaacagctagcagaataattacaatggctaaaacgtttttatagagaatcttgtttttcaaaaaagaataaaaagtttgaatagctattattaaagaaaagccatgtcttcaacatctgagtcaccaagaagtaacactttttaaacttgttagaaatccctggaggcatttcaaattcatcttctaacctacctaagcactttaaaatacagcctccttctgttcctctgttccccttcatgcctccttttgaattgatatctcagctgtcaatatttctttgacttcagcattgttattttatttctctatatcaatgtgtccttagttttcttagcctgttaatttaaaaatccagacttgggggtcattgtgttgctacccaagagaaaatgctacagttttatagattgcacatcattctttaaggcatacttttacctcaggaaacttactctagtatgttctcatatattgaattctcaactaagtaactatttctttatacctataaactagtacctaattcactgttagttaaatgagctatagataaggcagctaaatttctgaaagatagccagagtaagtaagcagccactgcaagctctgaatcagttttttaaaaaaaagaaaaaaaaaaaaaaggagctgtgccccattgaacaatgacaacatcacaaggggaagggagggattttgccaaaagttagaaaggtggagctgtaagccatgtgcttgttgcctttgacagtgacagtgcgcgtcttacaactaattccactaggcatgggaatgtcacctcctttgccactgtaccccatcaagcttactctgaatcaaaggttttgtaaaacttttgaaaatgaacttagctgcaaaatatagctaaccactttcaattgcaagctttgcaaagtgaagagaggttcgtacttctcataattggtatttagcacaattgtaagatacagttttactgtttgtacatcgtttttttccattaaacttttctagagaagacaaaagcttacactggtgacatggataagtgagatggtgtctaacgagcagtgcaatattaggcggtgcaatagaggccctgttggcaagatgagttttgctggagagctggacagtgttggttagcttcctgcattgattgcccctgggcgttcttcccccttaactgtgaaagcagagtctataaatgaactctttgctcttacaaggtaatttacatattttctttctgttgaaataactgaaaatgttaaatctaccagtttatgtcttgtaaacagagtgtcatatgtatttaagttgtgtatttttataaagtaaagccaagtatcaaacaccggaaaaaaaaaaaaaaaa

SEQ ID NO: 423 - DNA, 1664 bp, Homo sapiens
gcatttggtgccgtggaagggaaaaagggggactgcagtatgcgtcacacccggaagcggcgagccggaagtggggttagccaggttatccccaggggtggagaagcggaggcccaggaggagggggaataaagaaggtggaggatcctggctaccactctgaatccgataccgcttctcttagacctcagcgacagaaaaagggaagggtgtctcatcccccttcctcctctcctccctgtcctgagccttagccatggccgaggcaggggctgggctgagcgagaccgtcactgagacaacggttaccgtgacaaccgagcccgagaaccggagccttaccatcaaacttcggaaacggaagccagagaaaaaggtagaatggacaagtgacactgtggacaatgaacacatgggccgccgctcatccaaatgctgctgtatttatgagaaacctcgggcctttggcgagagctccacggaaagtgatgaggaggaagaagagggctgtggtcatacacactgtgtacgtggccaccgcaaaggacggcgtcgtgcaaccctaggaccgacccccaccacccctccccagcctcctgacccttcccagccccctccagggccaatgcagcactaaatccctctctcctccagcattcctgtgtctgtctggccctaaatgtatccatgtggctacttctccagccccctccttccctctcttctgcctgatagagggaagaggaagaggaggacgaacagagatcctgaaattctgacttgctgctattccagaacccagcctcctgggtttccccagtcctcatttttcctcccaatacccacccttctctctcgagggatctaggcaccttggtcccagtgtcttccttttgttctcactgccaaactgcctgtcctgggatctagttatcttggccctgcactctcaacatgagtagcgaacacttaaattgggttttcaacagtcccagctttcactgccagggtcccagtcagattccaggaatttgcgccctaactttgcttgctaatcctggtttagagctatcccactaaaatatttaatcctaattcttagtccttgcctgtgagatatgaggtcttacaggagacctcagagctcccagcccttctcctcctgctaacccttctcacaccctcaagaggagttagaaaagaggtccttgtcattctcacctcttatggaaaatggaataagaaataatcatatcctttcttcccacccttctcctgttatttaggatttctgacaaagctggcttgagattggtcacttagagccgactgtctcctctgccttttgtttttcagcttcagagacagatccaatatagtcccagggacctgggtctctgggagaggaaggaagagggagggagcaaagagattggggtatgtcccctgtagtacactcttacctcttacttcctagactttgatttctccggcagcccagatgttcagttctcttggcccctctctaccccttactgggatccggttttcattttccggtccttttgccatacacagttacagagatcagtcaaatccataccaccactgagatctcatttattgccacagatgcacaaaataaataacccaaaatcacaaaa

SEQ ID NO: 424 - DNA, 1613 bp, Homo sapiens
actcggcgccctgcggcgcgcgatgagcacctaccactagcggagccgcgagggagaggccgcggccccttcccgttgcctgcggccaccggccggcattcagagcccctcgcctggcgctaaatttaaaaacgtaacacgagcagcaggctggtctcggaaacgaaacgaaattcggtccctgggcctcctcccgggcgctgccggtccctcagcgcgccgcgccacccggaacagacccttctcccgccattttcggcggggctgggagactgaggcccgcggcgctgagcctgcggcgccccggaagaggcgggcggcatggccgctggcgtggactgcggggacggggttggcgcccggcagcacgtgttcctggtttcagaatatttaaaagatgcttcaaagaagatgaaaaatgggctaatgtttgtaaaactggttaacccctgttcaggagaaggagccatttacttgttcaatatgtgtctacagcagctgtttgaagtaaaagttttcaaggaaaaacaccattcttggtttataaatcaatcagttcaatcaggaggtcttctccattttgccacacctgtggatcctctatttctgcttctccactacctcataaaggctgataaggaggggaagtttcagccccttgatcaagttgtggtggataacgtgtttccaaattgcatcttgttgctgaaacttcctggacttgagaagttacttcatcatgtgacagaggaaaaaggtaatccagaaatagacaacaagaaatattacaagtacagcaaagagaagacattaaagtggctggaaaaaaaggttaatcaaactgtggcagcattaaaaaccaataatgtgaatgtcagttcccgggtacagtcaactgcatttttctctggtgaccaagcttccactgacaaggaagaggattatattcgttatgcccatggtctgatatctgactacatccctaaagaattaagtgatgacttatctaaatacttaaagcttccagaaccttcagcctcattgccaaatcctccatcaaagaaaataaagttatcagatgagcctgtagaagcaaaagaagattacactaagtttaatactaaagatttgaagactgaaaagaaaaatagcaaaatgactgcagctcagaaggctttggctaaagttgacaagagtggaatgaaaagtattgataccttttttggggtaaaaaataaaaaaaaaattggaaaggtttgaaactttgaaaataaaatctagcaaaaatatttgctttttacatgtttcagtttgtccttcctgactgttaatgactacctttggttgggggaaggaagaggccaatttcatgttctcttaaacatttctttgcatttggtttttgtgttcctgaacaaaatatgggaaagtgtctaacttcatggctatggccttttggagtctcatctgacataatgaaaagtaatcacttgaagagaattaacatatagcatcatgattttctcaataaactgatgtgtgacaatgttaaaaaaaaaaaaaaaaaaaaaaaaaaaaaaaaaaaaaaaaaaaaaaaaaaaaaaaaaaaaaaa

SEQ ID NO: 425 - DNA, 1865 bp, Homo sapiens
ggtgtctctggccgctgcgctccaccccagcccgccatggcgtcaggcgccgcggccccggggaggtggctcccactttaagaagtgaagttttgcgcccctccccctccctgcccacctcctgcagcctcctgcgccccgccgagctggcggatggagctgcgcagcgggagcgtgggcagccaggcggtggcgcggaggatggatggggacagccgagatggcggcggcggcaaggacgccaccgggtcggaggactacgagaacctgccgactagcgcctccgtgtccacccacatgacagcaggagcgatggccgggatcctggagcactcggtcatgtacccggtggactcggtgaagacacgaatgcagagtttgagtccagatcccaaagcccagtacacaagtatctacggagccctcaagaaaatcatgcggaccgaaggcttctggaggcccttgcgaggcgtcaacgtcatgatcatgggtgcagggccggcccatgccatgtattttgcctgctatgaaaacatgaaaaggactttaaatgacgttttccaccaccaaggaaacagccacctagccaacgggatagctgggagtatggccaccctgctccacgatgcggtaatgaatccagcagaagtggtgaagcagcgcttgcagatgtacaactcgcagcaccggtcagcaatcagctgcatccggacggtgtggaggaccgaggggttgggggccttctaccggagctacaccacgcagctgaccatgaacatccccttccagtccatccacttcatcacctatgagttcctgcaggagcaggtcaacccccaccggacctacaacccgcagtcccacatcatctcaggcgggctggccggggccctcgccgcggccgccacgacccccctggacgtctgtaagacccttctgaacactcaggagaacgtggccctctcgctggccaacatcagcggccggctgtcgggtatggccaatgccttccggacggtgtaccagctcaacggcctggccggctacttcaaaggcatccaggcgcgtgtcatctaccagatgccctccaccgccatttcttggtctgtctatgagttcttcaagtactttctcaccaagcgccagctggaaaatcgagctccatactaaaggaagggatcatagaatcttttcttaaagtcattctctgcctgcatccagccccttgccctctcctcacacgtagatcattttttttttgcagggtgctgcctatgggccctctgctccccaatgccttagagagaggaggggacggcacggccgctcaccggaaggctgtgtgcggggacatccgaggtggtggtggacaggaaggacttgggaaggggagcgagaaattgctttttctcttcctccctgggcagaatgtagcttttctgcttcactgtggcagcctcctccctggatccttagatcccagaggagggaagaaaatttgcagtgactgaaaacagtaaaaaaaaaaaaaaaaaaaaaaaaaaaaaaaaaaaaaaaaaaaaatttatgtatataaaagttgcattacacagtacaaaatagatggataatgtttatcctttatttttctatgtagaagtttttgaatttgtgtgtgtgcttgtgcgtgtctacacctagtattacggctgggactctccagctgtttttgttgttgttatgtttttaagagggttgaattcttccatcaggtgaacgaaaaaggcaacaaagtaataaatcagtgaatgtggccggcagctgtgtttagcccctccagatggaagtttcacttgaatgtaaaataataaagtttatattttgaa

SEQ ID NO: 426 - DNA, 2780 bp, Homo sapiens
gcgcttgtgacccgccttccggaaggaagcggctaactatggcgaccgccacggagcagtgggttctggtggagatggtacaggcgctttacgaggctcctgcttaccatcttattttggaagggattctgatcctctggataatcagacttcttttctctaagacttacaaattacaagaacgatctgatcttacagtcaaggaaaaagaagaactgattgaagagtggcaaccagaacctcttgttcctcctgtcccaaaagaccatcctgctctcaactacaacatcgtttcaggccctccaagccacaaaactgtggtgaatggaaaagaatgtataaacttcgcctcatttaattttcttggattgttggataaccctagggttaaggcagcagctttagcatctctaaagaagtatggcgtggggacttgtggacccagaggattttatggcacatttgatgttcatttggatttggaagaccgcctggcaaaatttatgaagacagaagaagccattatatactcatatggatttgccaccatagccagtgctattcctgcttactctaaaagaggggacattgtttttgtagatagagctgcctgctttgctattcagaaaggattacaggcatcccgtagtgacattaagttatttaagcataatgacatggctgacctcgagcgactactaaaagaacaagagatcgaagatcaaaagaatcctcgcaaggctcgtgtaactcggcgtttcattgtagtagaaggattgtatatgaatactggaactatttgtcctcttccagaattggttaagttaaaatacaaatacaaagcaagaatcttcctggaggaaagcctttcatttggagtcctaggagagcatggccgaggagtcactgaacactatggaatcaatattgatgatattgatcttatcagtgccaacatggagaatgcacttgcttctattggaggtttctgctgtggcaggtcttttgtaattgaccatcagcgactttccggccagggatactgcttttcagcttcgttacctcccctgttagctgctgcagcaattgaggccctcaacatcatggaagagaatccaggtatttttgcagtgttgaaggaaaagtgcggacaaattcataaagctttacaaggcatttctggattaaaagtggtgggggagtccctttctccagcctttcacctacaactggaagagagcactgggtctcgcgagcaagatgtcagactgcttcaggaaattgtagatcaatgcatgaacagaagtattgcattaactcaggcgcgctacttggagaaagaagagaagtgtctccctcctcccagcattcgggttgtggtcacggtggaacaaacagaggaagaactggagagagctgcgtccaccatcaaggaggtagcccaggccgtcctgctctaggcagagtcccgggaccatggcctcctgccacacaacacgcagagaggactcaagactcccgctggccatggagtggcctgaaagagagcaagaacatgtggatctttgataggattgttaccaaatggtgtcagtatggaccaattgtgtgaccatgagaaggatgcttattttttttaaaaagaaaacacatctaaaagcccaggaactgatttttttaagaggaaaactaatgacagtgtataactgatgtttaaattgtgcatttagtactatttaaatgttttcttatactagtattttatattcttttgttgtcgtttaaaactggagcttcagtgtctcttccctccctctaatagtaatggttcagtaagcactccttaactccttagtatttcatagaaaaatgactgcaacattaaagctaagaggaacacttcaacatatgtggtacaaatttatattgaagatctaaataaaccacgtattttccagtcttcgttgtgtgaagctaaatggtggctaaaaggaacactttttgtgtgattattataaactttgcattgtatttgaatcttagaacttttgtacacactaaatattgatgtcacaccatttctaatctgagcatccttagccagagaatattcattatacttcctaagtgagcaataatttaaatcagaagctattttattttaatgtaattaacctttctttacatttcttatgtgttcacctctaatctgttttaggaagagagttggttattatgttgatcccataatataaatcatatcctttatattttagaatatctcaaatgtattccttttttgtatggtgggtttgcctagggacgtgtaactacaggcttttactaagccaaggaaaaagagaatttttcttttcatcttacaaattccagatatctacaaaagatgtgaaagcactaaaaataccatttttaagcagtactttacctgttttttctttagcaaaccaggttatgtggtgtaaaggtttgttatacgtgccacaatatagcatataaatattatgccatcattccttctcttgttaaaggtagaagaataaaattgtgatttttataacctgtgcttattactcaaatggtcttcaacatctttttaaacaacacatactttttgaatgttcagtttctattttgcttgaggtattttgtacatatgtgccttgtgattgctgctgctttaaaggataaagtactctttgggggatgagtctggtttgttttgttttattttttaatgaaataaacctatattcctgatt

SEQ ID NO: 427 - DNA, 755 bp, Homo sapiens
ctcttcctgtctgtaccagggcggcgcgtggtctacgccgagtgacagagacgctcaggctgtgttctcaggatgaccgagtgggagacagcagcaccagcggtggcagagaccccagacatcaagctctttgggaagtggagcaccgatgatgtgcagatcaatgacatttccctgcaggattacattgcagtgaaggagaagtatgccaagtacctgcctcacagtgcagggcggtatgccgccaaacgcttccgcaaagctcagtgtcccattgtggagcgcctcactaactccatgatgatgcacggccgcaacaacggcaagaagctcatgactgtgcgcatcgtcaagcatgccttcgagatcatacacctgctcacaggcgagaaccctctgcaggtcctggtgaacgccatcatcaacagtggtccccgggaggactccacacgcattgggcgcgccgggactgtgagacgacaggctgtggatgtgtcccccctgcgccgtgtgaaccaggccatctggctgctgtgcacaggcgctcgtgaggctgccttccggaacattaagaccattgctgagtgcctggcagatgagctcatcaatgctgccaagggctcctcgaactcctatgccattaagaagaaggacgagctggagcgtgtggccaagtccaaccgctgattttcccagctgctgcccaataaacctgtctgccctttggggcagtcccagccaaaaaaaaaaaaaaa

SEQ ID NO: 428 - DNA, 2107 bp, Homo sapiens
gcaccggcgaacctgcctgggcaggcagctcgcgcaggacggggcgggaccagacagttgcgcgcacagaaggctggcgtagcaggtaaagatggcagctaccatgttccgggctacgctgcggggatggagaaccggtgtccagcggggctgcgggctacggctgttgagccagacccagggccctccagattaccccaggtttgtggagtctgtggatgaatatcagtttgtggagcgcctgttaccggctaccaggatcccagatcccccaaagcatgaacattatcctacccctagtggctggcagcctcccagagaccccccacccaacctgccttactttgtacgacgctctcggatgcacaacatccccgtctacaaggacatcacgcatggcaaccggcagatgactgtgatccggaaagtggaaggggacatctgggccctgcagaaagacgtggaagattttctgagcccgctgctggggaagacacctgtcacccaggtcaatgaggtgacaggtaccctacggatcaagggctactttgaccaggagcttaaagcctggctcttggagaaaggcttctgaggcccagccgagcagcctgcttgtcagcatgccctgtggatcaagtctagggggcctcaggaggagggaggtgggtgttggagcccctgagacaggggatacagaaactagggctaaaggactttggggtcaggccttgcttgcataaaggagaaaacaactctatgtacatgctgggggagagtgcctaatgtgggagaccaaatagggatcaccaggctaatggggggcgtcagcagctttctctccctcctatcttggcctgttcttttttgttttttgagacggagtctcactctgttgcccagggtggagtgcagtggcatgatcttggctcactgcaacttccacctctgggatcaagggattctcctgcctcagcctcttgagtagctgggattacaggcgcccaccaccacagcctgctaatttttgtatttttagtagagatggggtttcaccatgttggccaggctggtctcaaactcctgactcgaagtgatccgcccaccttggcctcccaaagcgttgggattataggcatgagccatgtgcctggtccaccttggcctgttttgtttttctttccttgggctcagcaattcaaattctagttgttatttggtggaagcagtagcccaaccccagtttaggggaaggtagcacagggcagagccactgggcactttgtttccttggccctccgaagctcactgttgcaaatacccccaagcctttgctctaggccagatcttgtttggtgcaggtgatggagaacacagatgactcgggcatgggtcttggagatcttctgttcaaagtacagtgctggcactggggcacagagtgcccacgttagccccgggctctgatagagaggtaggaggcacgttcttggtcactgttccattgcagaccagacttgctggcctgaccacaagggagtggctgggaactcacagccagcatagggacatccccctgcagccttctgacctgcaatcaaggctggggaggggtttgcaggcaggaatatgctgacctttcaccctgccatcccatcccaaccccagctcactagccttcatatatgccttatacttggagtcacaggggccaaaggcctgagaccccaccctgcccccaaactggctaagacagctttcagttcctgactccccaacttggtctctgccctgaagcagggcactgaactctgggctgcttctctgtgtgtaaaatgggcacatcttcctaatctgttaatggtcagtggtgtccccaaggatagtgctggcttccatggaaaccctcactcctggagattccattccattttcaagtgtacagccacagcaaggagcccgacactgatttgatcgattctgtgacacaaaccccaccaattgttaatgcaagtttttatttggctgtatatacaatttaagctattaaaatttgtacaatatttacaaattaaataatcatctgaaactgaaaaaaaaaaaaaaaaaa

SEQ ID NO: 429 - DNA, 1738 bp, Homo sapiens
ggcgggcccgcgctcacttcctcggggaggggttggggccgcgctcccactcgcccacacggtccgtctgcagtcggcagcctcgccggcagctcgctcggcccccgcttggcccggcccgcaggtaggagccgccgagggacgcggcgcccggttcccggccccgcctgcgccgcgcgctccccgctcccgccgcccgcttcgagggttctctccccttgccaccatgagcgagtcatttgactgtgcaaaatgcaacgagtccctgtatggacgcaagtacatccagacagacagcggcccctactgtgtgccctgctatgacaatacctttgccaacacctgtgctgagtgccagcagcttatcgggcatgactcgagggagctgttctatgaagaccgccatttccacgagggctgcttccgctgctgccgctgccagcgctcactagccgatgaacccttcacctgccaggacagtgagctgctctgcaatgactgctactgcagtgcgttttcctcgcagtgctccgcttgtggggagactgtcatgcctgggtcccggaagctggaatatggaggccagacatggcatgagcactgcttcctgtgcagtggctgtgaacagccactgggctcccgttcttttgtgcccgacaagggtgctcactactgcgtgccctgctatgagaacaagtttgctcctcgctgcgcccgctgcagcaagacgctgacacagggtggagtgacataccgtgatcagccgtggcatcgagaatgtctggtctgtaccggatgccagacgcccctggcagggcagcagttcacctcccgggatgaagatccctactgtgtggcctgttttggagaactctttgcacctaagtgcagcagctgcaagcgccccatcgtaggactcggtggaggcaagtatgtgtcctttgaagaccgacactggcaccacaactgcttctcctgcgcccgctgctctacctccctggtgggccagggcttcgtaccggatggagaccaagtgctctgccagggctgtagccaggcagggccctaagccagggctcctggacccaggctttcccataccacgggcccaggactgtggctccttttctaaaccacctctgggactcagctccccccgccaaaaaaaatgggtctccttctgggctccaggattgtctccccactccagcatccccaaactggtactccctgacccaggcccccaatcctgggctcttacagagcctccatgagtcaagccccctccccacacctggactccagaattcaccctctcccctgcagtctgggttcccagactgagtcctctccccaaatcagggctctagacccgagccctccaaacctggactctgggacttaggcccccttaaatctagacttctctttataggtttcaggtctcctatgggtgcctgggaagtccttgaaagtggactgttctcaggcttgacctgccccaccccatccccgcggttgaggctgtgggggcagcagatcaggagcccactgataaggggccctagggtacagggtgctgcccagcaggtcgccaccgagtgtcttctcattttatttcagctccattttgcccatagatgggcagaggggtgagattggctcatcccccttccagattctgcaataaagcggtgtgaggaaaaaaaaaaaaaaaaaaaaaaaaaaaaaaaaaaaa

SEQ ID NO: 430 - DNA, 9336 bp, Homo sapiens
gcggccgcgggagctgcggggagcgcgggggcggcccggagcgtgccggggtccccgcgcctcgctcgccggccgcgctccgaagatggtggcggcgccgtgcgcccggaggctggcccggcgctcgcactcggcgctgctcgcggcgctcacggtgctgctgctgcagacgctggtcgtgtggaatttcagcagcctcgactccggggccggggagcgccgcgggggcgcagcggtcggcggcggggagcagccgcccccggccccggccccgcgccgggagcgccgggacctgcccgccgagccggctgcagcccgaggaggaggaggaggcggcggcggaggaggaggaggacgggggccccaggcgcgggcgcggggaggcggccccggagaaccgcggggacagcagccggccagccggggggcactgcccgcccgggctctggatccacacccaagtccgctcatcaccctggagactcaggatggctacttttctcatcggccgaaagagaaagtgcgaacagacagcaacaacgagaactctgtccccaaagactttgagaatgtcgacaacagcaacttcgcacccaggactcaaaagcagaagcaccagcctgagttggcgaagaagccaccgagtagacagaaggagcttttgaaaaggaagctggaacagcaggagaaaggaaaaggacatacattccctgggaaaggccccggtgaggtgctgcctcccggggacagagccgcagccaacagcagccacgggaaggatgtgtccagaccgcctcatgccaggaaaactgggggcagctcccccgagaccaagtatgaccagccccctaagtgtgacatctcaggcaaggaggccatctctgccctgtcccgtgctaagtccaagcactgccgccaggagattggggagacttactgccgccacaagttagggctgctgatgcctgagaaggtgactcggttctgccccctcgagggtaaagccaacaagaacgtgcagtgggacgaggactccgtggagtacatgccagccaacccggtcagaatcgcctttgtcctggtggtccacggccgtgcctctcggcagttgcagcgcatgttcaaggccatctaccacaaagaccacttctactacatccacgtggacaagcgctctaattacctgcatcggcaagtgctccaggtctccaggcagtacagcaatgtccgcgtcaccccctggagaatggccaccatctggggaggagccagcctcctgtccacctacctgcagagcatgcgggacctcctggagatgaccgactggccctgggacttcttcatcaacctgagtgcggccgactaccccatcaggacaaatgaccagttggtggcgtttctctcccgataccgagatatgaatttcttgaagtcacacggccgggacaatgcaaggttcattcggaagcagggcctggatcggctcttcctggagtgcgacgctcacatgtggcgcctgggagatcggcggatcccagagggcattgccgtggatggcggttcggactggttcctgctgaaccggaggtttgtagaatatgtgaccttctccacagacgatctggtgaccaagatgaaacagttctactcctacaccctgcttcctgctgagtccttcttccatacggtcctggagaacagcccccactgcgacaccatggtggacaacaacctgcgcatcaccaactggaatcgcaagctgggctgcaagtgccagtacaagcacatcgtggactggtgcggctgctcccccaatgacttcaagccgcaggacttccaccgcttccagcagacagcccggcctaccttctttgcccgcaagtttgaagccgtggtgaatcaggaaatcattgggcagctggactattacctgtacgggaactaccctgcaggtaccccgggcctgcgctcctactgggagaatgtctacgatgagcctgacggcatccacagcctgagcgacgtgacactcaccttgtaccactcctttgcccgcctgggtcttcgacgggccgagacgtccctgcacacggatggggagaacagctgccgatactacccaatgggccacccagcatctgtgcacctctacttccttgctgaccgcttccagggctttctgatcaagcatcatgctaccaatctggctgtgagcaaactagagactctggagacctgggtgatgccgaaaaaagtcttcaagatcgcaagcccacccagtgactttgggaggcttcagttttccgaggtcggcactgactgggatgccaaggagaggctattccgcaactttgggggtcttctggggcccatggatgagccggtgggtatgcagaagtgggggaagggacctaatgtgaccgtgaccgtcatttgggtggatcccgtcaatgtcatcgcagccacctacgacatcctcattgagtccactgccgaattcacacactacaagccccctttgaacttgcccctgaggcctggggtctggacagtgaaaattctccaccactgggtgccagttgcagagaccaaattcctcgttgcgcctctgaccttctcgaacaggcagcccatcaaacctgaggaggcactgaagctgcacaatgggcccctccgcaatgcctacatggagcagagcttccagagcctaaaccccgtcctcagcctgcccatcaaccccgcccaggtggaacaggcacggaggaacgcagcctccacgggcacagcgctggagggatggctggactcgttggtgggcgggatgtggactgccatggacatctgtgccacgggccccacagcctgcccggtcatgcagacctgcagccagacggcctggagctccttcagccctgaccccaagtcggagctgggggcagtcaaacctgatggccggctcaggtagcactgggcacgaggagtgggccacagcaggatctcaacgggaaagcagccagaggggttgtggggcctgaaccccggcctcccaccctgggggaggccctctgtgaatgggtctctcctggccatagaatgatggaaagggaaggtcagcaggtcaaagcaggatcagccaacaacctgcctttggcaagctgcgggtgggatggctcagtccctgcactgtgactgtctcacctcttctggttgatcctcaagtcctacaggttccttgtcttccccttccagtgacccacccctgaccccagacgtgtgattttcagacttttctttcgagcagcagaacttcgtttacggagcacagtcataagtggaggttcagggtgctgacgaaatccaagctgctctggttgaagctgacaagtgcgaggttccctcccaaagctcagccctctgggcggtccccttgcccagggtatctcctacggtacctcttcagaacccaagggctctgcaaatgccagtttgacaagcactgcccagaccaaccatgggttcaaactccagccctgccctttggttcatttttctgcttctcttggctgggggactctggtgccagccttgaaagtcatggtcgtgggccctttcccatggaggctgcagccttaggagagctctgagcctctcagcagccctccttgggttgaactattctccttagtaactaggtaagtgggaaagccttttgatgtggcatggccaaggtccagccacaagtgcaactgccacctgtccaggggtctgggcctccttccctcaaggctgccacacaaagtagcagaaataggatgatgtttgtgagcaccagactcaagaccatgaccttctttgatccttgaaaatgggaactttgacagccatgaccatgaaactcacaaggcaacgcgatgaaactcacaaagcaatgcttggagcaaaactcctgagctagacagcacagcagcacccatcccctgccagagcccttccgttctgaggtcagacacacaaaaccttcgtcaattgcacaccggtgctgttgggagtgaccaaaccacatgaaccagacttttcccgtccaggaaatagcatttcagatttggtttttaatttcatgcccttcggccacaggctcaacgggacatgcaacataaaaatgggaaggttatttaaacaacaaaaaacagtatgatttaagtgttgagttaccagaaacccaaaaggtttccttgccacgagccccctggagtgtcatccctgttcaccaggagagctcttcgcaggaggcctcccttgctcctgtaatcccacctcccctgaatgatgggattcccttggaaaaaggtctcacccctggtagccatctgcccttcccatggagagccagtcctgacacttctctccagcgtgggtttgaaggggctgcccttcgctttgtgtgacttgtcctaatcctagccagatgtgttgccccatcccaagcctcgcaaggcagggtgtcctgttggcaatggaggacgtagagaagggacactttagatatttattatttacatgttttagtcgatgactaattagtaggtgctgtttttgcagcttgtcaattatgttaccttactaactgaagctgcctttattcacaaaaggccccttttcccatcttttcccaccccctggtgtctctctctctctcggtttctctttctctgcgtctaccccccatcctcctcatcctcagagtaaagcaggggcatcgaacaccacgcaaagaaagctccaacccgcatcttccactggctttgagtggggtgccttggggaccgttggagccttgtttttttccttatgcagagtgtcagcctcactctccctcggattccaagagtattggaattcctgagcctcccatcctccccctactcaccccccgtcacaggcacaaggaggtgacaggcagaaaacgtggagggtgagtggggaatgtgctagctgcagagagtttgtggggaatgtgctagctgcagagagtttgggccattcctgcttgctccgtggttgccttcccatggcccatctaattatgggcattcatgcgaccttaacagagggaaacaggctcctttgagagagatccatcttaggaggagggtcgtcagatccaggcagcagagtccgggagatagccattctcaacagcgattccagggatctcagggtacttttctcagaaagcccctatgatctcttttacagactctatggtggccacgcgctgggtgccacatcctctttctgcccccggcctctgcctctggccagggtttccctggggctgccgaagccactttgggagcttccctttcaccctccttgctgggccaccagtgctttgtgttcgcagcgttatttgcagtggctttggggactcagcagtggcaagtccctgtgcataatgtgaacctgcagacttcaagatggggcccctcctgcacccactaacatgtctgcctttttttgtttttatcctggaacaagtggagaaatggcagagctggctgactctggggacccttccctttttcccatggcttcatttcttcctcaccacaactaattcggggagctgagaagtcacacagggtattcctctcccttctctgatgttattaattaatagaccagagaataaggttgcagatattacatttgttgtgtttttgtgttttgtttttttttttaaggaaaatcccaaacaaagcccagcatgatttgagaaaagaggatgttttcccagggaaaataatttttttaacctgcctgagaatgatttatttatttgttggaggccattggtcagacagcctggagcttgggctgtggaagatttcaaaagcatagggctgtggtctctggaaacctattacagcctgcagctgtgagctgagccagtgacgaggtccctggaaactcaggaaggctgacaggtgggccttggggtattggtttgtggagaaggaagcattctttaggctgcggcactccttatagtttcccacccaccgagtgacattcaggcagaaattgagctcaggagacagccagccttcccacatcccacttcacttcccggtccacacgtaaagcagtgtgtctccaaggaggcagtgagcaattcccaaggtccccgtgttgtgagaagcgcgctgctttctccctttgcaggggaaaaaaaaggctttcctggtgagatcatgagtccttccggcttcatttctcattgtgggtttaacttctaaaacgcaaatggagtttagagaggatgagcagaaccacaggacctgcccccatctctcactcactgcaattgcttctactctgggcacaagtagggtgtctgaagaccatgtttccctctggttctctagtttgcagataacacagaagacactggctagaaccttaagctttctgccaaaaagatgcagagagcagggcagtagctactggcagtggggtgtgaataaagagtcctttcacaaccaagttcactgaggatttggagcaccagcttcccagcagtatcgaggggtggagaggtgtacattcaggtggaggggtacatctaggggtggagaggtgtacattctagaaacagctgttaacacactccactttaaagacagcaagctagacctgcaggatcaaagccacacactgtggtaggggttacaaatgtttatggggcccagaatactagcatagatgcgtgaaatggttggtgtgaggcaaaagggcatggtgggggcaaggatggggactgtggtcttactggcatgcacgtgacctacccagaatgagcagctgctactcagccccaacctgtcattgtttgtaaaaatgtaagcacagtgtagtggaatcttccaatttggaagggaagccggaaatccagatttaatggaaaaaatctgatttttcaacgtcgggttgtttgtttgtttgtttttgttttttttaacagatagtgggcaaagaaaaattccactgttccacgtgtacactgccagcaacctctgctctctggagaggtggtttaaagtgagattatgcattgccctggtagaagaggaaaaaagccagcatcaggtcagggcaaaaataacagcccatgttgaactcggaatggggacctcttgctaagtcattccactcctcaagagaccattccacagaggggggatggatcattcagctctcctggtcccaagattgtgctgaagggaagaaggaatagaatctggagatctggactgctgccccttagatatgcagaggtccacatctgcctggggctacagcttgtgggactccatcaaaccaggccgaaatggcaaagacagtctaggaggaggaggaggtagggtgtgaaacagccaggctctctccaaatcccaagtgttgacacagccatcttgtcccatccctggaagcctctttggaaaccacatagagctgtgctggctcacgggatgtcctgtttgcttctgcctcagttaccttactttgcccatgggtctaccacaggcgctacctcattgtgtctgctgagaagtttacctgggaggggggaacaaagttgtccaaatctgcttgagctgaatgtatgatctatgcaaattctctctctcctctctctcttcctctctggctctcttagaagtttttttgttttgttttgttttgttttgtgtttaccttgcaaacaagatactgtataggaccctcttaagatggaggagggctttcttgcgccacctgtgtctacccctcacgttgtctttggctctggtcttaccaggcgtatgcagggagaaagtgacctctcttccctctccacttggctgggaatattccaactgcctctgcctacagataccaccagaaagcgggttctgcaccttgtcatccccctccctaacgtcatctactccatccctcatgttcctccaacttgcttctcccatccctccttcaaaaacaaaacaaaacaaaacaaaagccttaggtttctcctttttgaaatgtggccttaacattatttttgggaagctgaccatccatcctttccctcccatctccaccaacatcagagaagacagcatcgtgaagcttctgtggcagcctcctaaggaaggggctgccaatctgtagttggcagatgctataggaattgcttacaaatgtcgtctttaagaaaaatgttcttatatttttcctatgggcaaaatgaaggcttgggtgctcatctaaagctcagccaactcctgaagcactctctcagagcatactgctgctgtaatgggctggcttaattatcggcagagtgcttgaaaaggctttgcagacctcccctgcccccaagactgggtgactttatatgtacttcattcaagggtaaatcaggagacgttctccatttatctcttcgtccttcctgcctggaaagtgatagcactaaatattcccagcagatgggtagtgttctcaaaggaatcaccctttccctaccttcagactctattctttacccttccattgctccagtgctgatggaggccaaagacaaccccagggttttcataggaaattcactggaattgtgcgcaattgtctttgtagtccttttgccttttttttttttaaatattatgttgtcaatagcatttgtttgggtatttgttttagaggcctcactctaagttattaccgtccccttcattgttttcaaagacatgtggtgatatagtttttaaaaataactattttgttatagatcataatatgcataaaactgtacagaaatattttgtaatgtgttgattttaaaaaaaatctgtaaataaagttttaaaaaaagaattcaaatggcacacgctgaaatatgtagatattttgctatttatttaaaggagtattttaagagatattgaactatctgaaattgaccagtaatcaaagttccaatcatctgaatgcttttccttgaggtagaatgtgagtctcagaaatgactgcattacctgcccttttttgcaccttttctgtctttttattttgcagaacaacaacaacaacaaaattgtgccttagctgtatttttttgtctaggggagtttgtttctgtctgacaaagcaacattttttgcagaaaacagtggatgtattaaatactgtatcataccaaaaacactgcaggtgtatatagatgctttctgtcatactgtgttttcagatgcagaattttaaaattaaaaaaacactgcctttatggaa

SEQ ID NO: 431 - DNA, 1029 bp, Homo sapiens
gaagtcactatctcccgggtgaacggagctttcgcagctggagaaggctcatccacctgcagacatggggcgcagaaagtcaaaacgaaagccgcctcccaagaagaagatgacaggcaccctcgagacccagttcacctgccccttctgcaaccacgagaaatcctgtgatgtgaaaatggaccgtgcccgcaacaccggagtcatctcttgtaccgtgtgcctagaggaattccagacgcccataacgtatctgtcagaacccgtggatgtgtacagtgattggatagacgcctgcgaggcggccaatcagtagcgacacagaggacccgccccctgagcagccccgcgtactgtggatccagctgttcggttctggtccagagacattccaggggtccagggtgtgggtcctgggctgtcacagccgtgtgtgtgtgtgtgtgtgtgtgtgtgtgtgtgtgtgtgtgtgtgtgtgtagtgggtgtgcgtgtgggtgtgggtgtgagtgagtgtgggtgtgtgtggctgcacgtgtcactggggtggccgtgagtgtgtgctcacaggtacgcggtggtgtcgggttcctgggcctgaggggcctgaactgatctcacttggctccgaaagcctttgctgtgttccctgcagcccctggccccccagccttggggctctggctccccccggcggaattgggggactgtttcctgacatcctggacaagggaagcccactagaggctggaacaggacctctccagcctcctcaccagcaccgtgcccatctcaactggacttcccgctctccttctccaccttctagtgcccgtggccggggattcaaagccgccgttccccaggtccctgggctgggccctgacagggagccgcccccctccccatggtaaccaggaagcccgtttcatgttcagttgcttttgtagaggaagcaagggctgggatggggacagctgtcaatcacaagcccttaaataaagcagccagcgcacatccaaaaaaaaaa

SEQ ID NO: 432 - DNA, 7099 bp, Homo sapiens
atgcggaagagatgggcctgctggagcggaagtgacgctcccggcggctgtggcggcggctgcgggagaaggaggaggaggagccggaggaagagggctgcctccgaagaaaggagaatggcgttcagtaaaggattccggatctatcacaaattggatcccccacctttcagcctcatagtggaaactaggcataaggaagaatgtctcatgttcgagtctggggctgtcgctgtgctctcatctgcagaaaaagaggcaatcaagggtacatactccaaagtactggatgcatatggactcttaggtgttctgcggttaaatcttggtgatactatgttacattatctggtcctagtcactggatgtatgtctgttggaaaaattcaagaatctgaagttttccgagttacttccactgagtttatatcactgcgaatcgattcttcagatgaggatcgcatttcagaagtgcggaaagttttgaattcaggaaacttttattttgcatggtctgcatctggcatcagtttagatttgagtcttaatgcgcatcgtagcatgcaagaacagacaactgataatagatttttctggaatcagtctttgcatttgcatctcaaacactatggcgtgaattgtgatgactggttattacgtcttatgtgtggaggagtagaaatcagaacaatttatgctgctcataaacaggcgaaggcttgcctcatttcaagattaagctgtgaacgagctgggaccaggtttaatgtccggggaacaaatgatgatggtcatgttgccaattttgtagaaacagaacaggttgtgtacttagatgactcagtttcttccttcatacaaatccgaggatctgttccattgttctgggagcaaccagggttgcaagtgggatctcatcgtgtccgtatgtcaaggggatttgaagccaatgcacctgcttttgacaggcattttagaacacttaagaacttatatggtaaacaaataatagtaaatttgcttggatctaaggaaggtgaacatatgctaagtaaagctttccagagtcatttgaaagcttctgaacatgctgctgatatccagatggtgaattttgactatcatcaaatggttaagggaggaaaggcagaaaaattacatagtgttcttaaacctcaagtccagaagtttctagattatggatttttttatttcaatggaagtgaagttcaaagatgccagagtggtacagttcgaacaaactgcttggattgtcttgatagaacaaatagtgtgcaggcatttcttggcttagagatgctagctaaacagttggaagctcttggtttagctgaaaagcctcagttggtgactcgctttcaagaagtttttcggtcaatgtggtccgtgaatggtgattcaatcagtaagatatatgcaggaactggagctcttgaagggaaagcgaagttaaaagatggtgctcgctctgttacccgaacaattcagaataacttctttgacagctccaagcaagaggccattgatgttttgctactgggaaatactctgaatagtgatttagctgacaaagctcgagcacttttaactactggaagtttgcgtgtttctgagcagacattacagtcagcatcttctaaagtactaaagagcatgtgtgagaatttctacaaatattcaaagcctaagaaaattcgagtatgtgtcggaacctggaatgtgaatggtgggaagcaatttcgcagcatagcttttaagaatcagacactcactgactggcttcttgatgcacccaagttagctggcatccaggagtttcaagataaaagaagtaagccaactgatatatttgcaattggttttgaagaaatggtagaattgaatgctggaaacattgtgagtgcaagcacaacaaatcagaagctctgggctgtagaacttcagaagacaatctccagagacaacaagtatgtgctgctggcttctgaacagttggtgggcgtctgtttgtttgtttttatcagaccacagcatgctccttttatcagggatgttgcagttgatactgtgaagactggaatgggaggtgcaactggaaataagggagcagttgcaatccgaatgctcttccatacaaccagcctttgcttcgtctgtagccactttgctgcagggcagtcacaagtcaaagaaagaaatgaagattttatagaaatagcacgaaaattgagttttcctatgggaaggatgctattttcccatgactatgtattttggtgtggtgatttcaactatcgaatcgatctccctaacgaagaagttaaagagctcataagacagcaaaattgggattctcttatagcaggagatcaacttatcaatcagaaaaatgctggacaggtttttagaggatttttagaaggaaaggtaacctttgctccgacatataagtatgacttgttttctgacgactatgacaccagtgaaaagtgccgcacccctgcctggacagaccgtgtcctttggagaaggaggaaatggccttttgatagatcagctgaagatctagatcttctaaatgctagttttcaagatgaaagcaaaattctgtacacgtggactccaggcactttgctgcactatggaagagctgagctgaagacttctgaccacaggcctgtcgttgccctgattgatatagatatatttgaagttgaagctgaagagaggcaaaacatttataaagaagtaattgcagttcagggtccaccagatggtacagtattggtctcaatcaaaagttctttaccagaaaataatttttttgatgatgccttgattgatgagcttctgcagcagtttgcaagttttggtgaagttatacttataagatttgtagaagataaaatgtgggttacatttttggagggaagctctgccttgaatgttctgagcctaaatggtaaagagttattgaatcggactataactattgctttaaaaagtccagactggatcaaaaatttggaagaagaaatgagtttagagaaaattagcattgcattgccatcatcaacaagctctaccctgcttggtgaagatgcagaggttgcagcagattttgatatggaaggtgatgttgatgactatagtgctgaagtggaggaacttcttcctcagcatctccagccatcttcaagttccggccttggtacttcccccagctcttcaccccgaactagtccctgccagtcacctacaatatcagagggtcctgtaccttcccttcccatcagaccaagccgagcaccgtcaagaactcctgggcctcccagtgcacagagttctcctattgacgcgcagccagcaacgccgctgccgcagaaagaccccgcccagcccttggagcccaagcggccgccgccgccccgcccggtcgcccctcccacacgcccggctcccccacagagacctcctccgccttcaggggctaggagtcctgcacccactagaaaggaatttggaggtattggagcccctcccagtcctggggtagctaggagagagatggaagcacccaaaagccctggaacaacaaggaaagataatataggacgcagtcagccttcacctcaagcaggacttgcaggcccaggacctgctggatacagtacagccagaccgacgattcctcctcgtgctggagttatcagtgccccacagagccacgcgcgggcatctgctggaagactgactcctgaaagccaaagcaaaacatcagaaacgtcgaaaggttcaactttccttcctgaaccactgaagcctcaggctgcttttcctccgcagtcttctttgcccccgcctgctcaaaggttgcaagagcctcttgtccctgtggcagcacctatgcctcagtctggcccccagccaaatttggaaaccccaccacaaccaccacctcgaagcaggtcatcccatagcttgccttcagaagcttcctcacaaccgcaacaggagcaaccatcagggtaacaggtaaaaacaaatggaatctctgatggcaaaagagaatcaccattaaagattgacccatttgaagatctgtcatttaatctgcttgctgtatcaaaggctcagctatctgttcaaacgtcacctgttcccaccccagacccaaagaggttgattcagttgccttctgcaacgcaaagtaatgttttgagttctgtaagttgcatgccaacaatgcctccaattccagctcggagtcaatcccaggaaaatatgcgaagttctccaaacccatttattactggcttgaccaggacaaatcctttcagtgacaggactgctgctcctggaaacccatttagagccaagtctgaagaatcagaggcaacttcatggttctccaaagaagagcccgttactatcagtcctttcccttctctgcagcctcttggtcataacaaaagcagggcttcatcttcacttgatggctttaaggacagttttgatctacagggccagtctacattaaaaattagcaacccgaaaggatgggtaaccttcgaggaagaagaggattttggtgtgaaagggaagtcaaagtcagcttgttcagacttactgggtaatcagccaagttcattttctggctccaacctgacattgaatgatgactggaataaaggtacaaatgtctccttctgtgtgttgccgtcaagaagacctcctccacctcctgtccctctgctcccgcccggcaccagccctccagtagatcctttcacgaccttggcctctaaggcttcacccacactggactttacagaaagataacgccatgcaatagaaaacagtgggtacttgcttttggcaggatagagctaagagaattgggcattagtatttcattatgtgcaataagtcattgtaagtgcactgatatcttcacaaaacaccactatttgatgtgtacagagttggactatgtgtatattggaaataaggaaaaacccttctcattgttaactggagttttgatgtatttctctttggatgaataggagacagtagtagccataaaaagtacttatactttagaaaacagtccttattcagaaacttttcggtcagtcttctgaagaatctcaaaaagcccacccaactttcagctgacatttccaccagccctctcatacttgttaacaattggtatctttgagtatttaccaaagagctgccaaggttacagtgaacagagttttgaaaggcattgctttaaaggaaaaaagtataggtatgtgtacatatataatacatacaaacacatgtacttctgtatacatttacatatttttacaattcatactttaatttctaggctataactcagaccaaattatacctaaaagttccaacaaagtccctttttcaatatcacattaccaaaaagatggctgcaaatgtaatttggacctttcattaattttgttttcaaaactagaataatctcaccacagaatcagaattttctaccgttccacacccaaccccttcaaatacacacaaccttgttacttttcactccagcaccttcatacgcttttctccaggaggaggttcttgcagctggaaacagcctattttgtggtcactgtcaagtggatggatattctagcgctcccaaaaaagcactatggccttatatgcagggaaggcacataccaccaagttcaatgagaaatattagagctaaccgtactctcttctctgcgtacgttcgagtatacgttgcccatatccctcccatattttctttttgctgcttttgctctggaactttgcttttagcagggaaagcagctgtcccctgagtgctttgaattgggaatatacccagtgtgtgttctcccccctcttacgaggctacataacacatctatgatgctgctttaagtttttagaggctatacctcaaagtagctgcggattttgtctcctgcactgccaatatgcaactgatcccgcttttattaattttttgaagaagtacacagaatttttacagaatgtagtattttgatatcattaagtaaaccaatcagaaaactccttgagcaatagttgtttctttgtcagtttcagttacaatcatctttacccattaagacttacattaacattccttttatataaagagttgtatatgtccacctaaattcctatgtccacacttaacctttaaagatgtacattgagggaatatcaaaaaatagcgttcatggctacgaatatgtagaatgttaaaagcacagcaaactgcactgcacttataaagcaaatctattagaaaaaaagcatttttctaaatgctcaaatgttatcaaaatactatatttatagaagtaatcttctctgttaacagccaagatttgctgttagaaataactcttgtgagttttatattgtgctttttggaggttctaatcatttcagcagtagcgtcttaaacagcagtattactataagcagttgcttcaaaatgtgaattaacttgttgaaactgtggctttaacatccatgtgactagtgtatatggtatttgctctccattagcaaaataattcattgttaggtaaacttcactagtgcaaattgcagatctgtgagcaatgtttcctattgaatataaactactgtctaaaatatacatatcagcagcccagcctttatcaggaaaattatacttggcaagttgctgaaaatgcacaaagttatgaaagttaaaggtatgctgcaaataactagccattattctatgtattattaaatatttactagttctgttaaaagcagagcagaagttagacactaaggatctctttgtgaactctgtgttctctatattagattgctgtttatatgtaagaattttattgcttatgtggcatacaatatttataactataaactttatagaagtacagtattaaagtcagtggtacacagacattctgtacatatcctgtgaaacgtgctgtcatatgaaataaatatatctgtctttaccatg

SEQ ID NO: 433 - DNA, 1104 bp, Homo sapiens
aataggggaaaataagccagatggataaaggaagtgctggtcaccctggaggtgcactggtttggggaaggctcctggcccccacagccctcttcggagcctgagcccggctctcctcactcacctcaacccccaggcggcccctccacagggcccctctcctgcctggacggctctgctggtctccccgtcccctggagaagaacaaggccatgggtcggcccctgctgctgcccctactgcccttgctgctgccgccagcatttctgcagcctagtggctccacaggatctggtccaagctacctttatggggtcactcaaccaaaacacctctcagcctccatgggtggctctgtggaaatccccttctccttctattacccctgggagttagccacagctcccgacgtgagaatatcctggagacggggccacttccacaggcagtccttctacagcacaaggccgccttccattcacaaggattatgtgaaccggctctttctgaactggacagagggtcagaagagcggcttcctcaggatctccaacctgcagaagcaggaccagtctgtgtatttctgccgagttgagctggacacacggagctcagggaggcagcagtggcagtccatcgaggggaccaaactctccatcacccagggtcagcagcggactaaagccacaaccccagccagggaacccttccaaaacacagaggagccatatgagaatatcaggaatgaaggacaaaatacagatcccaagctaaatcccaaggatgacggcatcgtctatgcttcccttgccctctccagctccacctcacccagagcacctcccagccaccgtcccctcaagagcccccagaacgagaccctgtactctgtcttaaaggcctaaccaatggacagccctctcaagactgaatggtgaggccaggtacagtggcgcacacctgtaatcccagctactctgaagcctgaggcagaatcaagtgagcccaggagttcagggccagctttgataatggagcgagatgccatctctagttaaaaatatatattaacaataaagtaacaaatttaaaaagataaaaaaa

SEQ ID NO: 434 - DNA, 1177 bp, Homo sapiens
tcaccacggcggcagccctttaaacccctcacccagccagcgccccatcctgtctgtccgaacccagacacaagtcttcactccttcctgcgagccctgaggaagccttctttccccagacatggccaacaagggtccttcctatggcatgagccgcgaagtgcagtccaaaatcgagaagaagtatgacgaggagctggaggagcggctggtggagtggatcatagtgcagtgtggccctgatgtgggccgcccagaccgtgggcgcttgggcttccaggtctggctgaagaatggcgtgattctgagcaagctggtgaacagcctgtaccctgatggctccaagccggtgaaggtgcccgagaacccaccctccatggtcttcaagcagatggagcaggtggctcagttcctgaaggcggctgaggactatggggtcatcaagactgacatgttccagactgttgacctctttgaaggcaaagacatggcagcagtgcagaggaccctgatggctttgggcagcttggcagtgaccaagaatgatgggcactaccgtggagatcccaactggtttatgaagaaagcgcaggagcataagagggaattcacagagagccagctgcaggagggaaagcatgtcattggccttcagatgggcagcaacagaggggcctcccaggccggcatgacaggctacggacgacctcggcagatcatcagttagagcggagagggctagccctgagcccggccctcccccagctccttggctgcagccatcccgcttagcctgcctcacccacacccgtgtggtaccttcagccctggccaagctttgaggctctgtcactgagcaatggtaactgcacctgggcagctcctccctgtgcccccagcctcagcccaacttcttacccgaaagcatcactgccttggcccctccctcccggctgcccccatcacctctactgtctcctccctgggctaagcaggggagaagcgggctgggggtagcctggatgtgggccaagtccactgtcctccttggcggcaaaagcccattgaagaagaaccagcccagcctgccccctatcttgtcctggaatatttttggggttggaactcaaaaaaaaaaaaaaaaaatcaatcttttctcaaaaaaaaaaaaaaaaaa

SEQ ID NO: 435 - DNA, 1836 bp, Homo sapiens
ccggaaggcacggcgctcagctcaggaccgcgcgccgtggtctgaggtccgcggcagggtcccgcatggcggcgcacaggaagcacgtgtttgtggagaaggtgctgcagagactttttcctcctgttccaagtggccaaggaaagagggaaccccagacgctggccgtccaaaatccaccaaagaaagtgacctctgagaaagtgagccagaaacatgctgagcctttgacagacactggctctgagaccccgactgcccgacggctctacactgccagcgggcctcctgagggctacgtcccctgttggccggagcccagcagctgtgggagccccgagaacgcctccagcggggatgacacagaagatcaggatcctcatgaccagccaaagagaagaagaattaggaagcataaatcaaagaaaaaatttaaaaatcccaataatgttcttatagaacaagcagaattagagaaacagcagagtctgttacaggagaaatctcagcgacagcacacagatggcaccacaataagcaaaaataaaaaaaggaaactgaaaaagaaacagcaaattaaaaggaagaaagcagccggcttggcagcaaaggctgctggtgtcagtttcatgtaccagcccgaggacagcagcaatgaaggggaaggcgtgggagaggcttgtgaggaggatggtgtggacaccagcgaggaagacccgacactggccggggaggaagacgttaaagataccagggaggaagatggtgcggacgctagcgaggaagacctgacacgggccaggcaggaagagggtgcggacgccagtgaggaagatccgacaccggccggggaggaagacgttaaagacgccagggaggaggacggtgtggacaccattgaggaagacctgacacgggccggggaggaagacggtaaagacaccagggaggaggacggtgcggacgccagcgaggaagacccgacatgggctggggaggaagagggtgcagactccggggaggaggacggtgcagacgccagcgaggaagatgatacaattaccaatgaaaaggcacacagtattctaaattttttgaagtcaacacaggaaatgtatttttatgacggtgtctccagagatgcagcttcagctgccctcgcagatgccgctgaggagctgctggaccgcctcgcgtcacacagcatgctgccctcagacgtgtccatcctgtaccacatgaaaacgctgctgctcctgcaagatactgagagattgaagcatgctctggaaatgttcccagaacattgcacgatgcctcctgaccatgccagagtaatctcagctttctttagttactggatcacacatatccttcctgagaagagcagtgactaaaatggaatatctctttaagaacagctcctctttaacaaaaaaacttaaaagacaaatgtgagatgggcttagagttagttctctgggaacttgaaagacatttatgccatattatttattcacgtgtttgttcctggtgggcaagatgccatctgaggcttcagatgagaaattggggtaaaatggaaatttttcacttatttgcaattatatatatcttgaattactacataaaacttgattctgtttctctacttattgtaaaaattgaaaatggacattctgttaagttaaatgtatagtttgaagctcatatatttttatgaagttttgaatcaccttgtatctgaaagtctctgctttaagaatgctttctgggtattaaaatgttctagtttaagtaaaaaaaaaaaaaaaaaaaaaaaaaaaaaaaaaaaaa

SEQ ID NO: 436 - DNA, 3828 bp, Homo sapiens
cagtgccaggctggaggcggcagcggttggaggcttcgcccggctttgcagcggggacttcggcggcggcgcctcaggcacctcggcccggacacgatgaggcgagtggtacgacagagcaagtttcggcatgtatttgggcaagcggtgaaaaatgaccagtgctatgatgacatccgggtttctcgtgtgacctgggatagttccttttgtgctgtcaatcccagatttgttgccataatcatagaggcaagtgggggaggagcgttccttgtcctccctctgcacaagactggtcgaattgacaaatcttaccctacagtatgtggccacacaggaccagtgctggacatagactggtgcccacataacgatcaggtcattgccagcggttcagaggactgcacggtcatggtatggcagatcccagaaaatggactcaccctttccctgactgaacctgtggtgattttggaaggccactcaaagagagtcggcatcgtggcttggcatccaacggcccgcaatgtgcttcttagtgcaggctgtgataatgccattatcatctggaatgtgggaacaggggaagcccttataaacttggacgatatgcattcagacatgatttacaatgtgagctggaaccggaatggcagtctgatctgcacagcttccaaagacaagaaagtgagagtcattgatcccaggaaacaagagattgttgctgagaaggagaaagcacatgaaggagcaagacccatgagagccatcttcctggccgatggcaatgtcttcaccactgggttcagccgcatgagcgagcggcagctggctctctggaatccgaaaaatatgcaggaaccaattgctcttcatgagatggacactagcaatggggtgttgctgcctttctatgaccctgacaccagcatcatttacttatgtggaaagggtgacagcagtattcgctattttgagatcacggatgaatccccgtacgtccactacctcaacacattcagcagcaaggagcctcagagagggatgggttacatgcccaagaggggacttgatgttaacaaatgtgagattgccagattcttcaaacttcatgagagaaagtgtgaacctattattatgactgttcccaggaagtctgaccttttccaagatgacctgtatcctgacacagcggggccagaggccgcgctggaggcagaagagtggttcgaaggcaagaatgcagacccaatcctcatctccttgaagcacgggtacattccaggcaaaaacagggatctcaaggtggtcaagaagaacattctggatagcaagcccactgcaaacaagaagtgcgacctgatcagcatccccaagaaaaccacagacacggccagtgtgcaaaatgaagccaagttggatgagattttaaaagagatcaaatctataaaagacacaatctgcaatcaagatgagcgtatttccaagttagaacagcagatggcaaagatagcagcctgaaggtcccacccccacccctacagaaaaaatgggagcaagaacttgtgcttgggagctggttattggtgtggtcctagggagggcggaaagggaggcactgccatttggagacattccatttcagatttgtcaaccagcgataggccacattccagtaagaactcaatttgtctcccaaatttgcagaaacaaaacgtgatttaaaagctgagctttttatcagaaagcttttttgatgttttaagtgttatgtgacttgttgaactttttaaaaagtgctacttttaaaatcccagatactctgaattttagaaaacaaactaattctgattgtgtcgtgcccaagtacccttttttttttaatgaatagggaccaatgccacattgctttttatatttctttcttttttaatgttgccaaaaccaaaagtagctttgttttcctttgtattttgctactttgcagtatttgtgtgtgtggttttttttccttaatttgaaagggacagcactgtgtatgtttataaactaaatgaagataagatattattttgtataaacattcatctgagaacaatcaaagcagtagccacatggtgctggctcctttgcagcacaaacctggtcattttgatgactgtacaacaggaagacttgaaaaatcacgtggattcatattaccaccgctctcatttcatggagtcttctgatcaaaaaagctcacgtcgtatttcttcttttcctttctcttttctagaaattgggtgtttgtaccagaatggaattttgcttctcggttatcctgtgcttcagatgattataatctaacccaaactagcatgtgtttctgcagtttgttacacacctaggatcatattgcattcatcactttaaacatcatgtttcaggttttggtcaatacttgacaagggtgcccaggacaggaagacgtgtactgctgagtgttccttcttgcccttttcagcagcttgcccagctcttgagtacagtggtggggactaaaaatgtgggcatgtggagaggggtatttgccctgggtgatcctgtttccctgtgctgtccccatgctgtgttggaggaggaagtggctctccttccaccaacaaagctcctgctctaccctcttcctcacatgtgctgcgacctctctcagggctcccccagccattccttctttccttcctgccttttagctctaaccacattaagctaagacaaggccagagggtgcgattgaatgagtattgagactgaggagaatgatagagagtgaagcagaaacaggagcacagacctctgctgtagctttaatgcatacaaacatgtccctccgcacaactaacctgccctgcctctccatctctcaccaaggctgcgtcaaagcacagaggctccccggactcggagggggccagagactgagctctggtcacctgttcattcctcggttagctggaactttgccccgtttccagtttcttatagtgcatgcttgggaaacaagatttaaggagcctctgttttggaagggctgtctgtgattgaacgtgaaatgtgtagtgccattgggaccacgaagggaattcttgcacatgctcgtgctggtgtgggcatgggactggctggaaacgtctgtatgcagggagccagggtgagggcagagtgtggtgacagccgaacttggagtaatgtccgtgtagaaaaaggaccatgttcttatccagccaatactgggagtgctgtctccacaatttcagggcatctgaatgtttgatgtggttttgtgtgtgtgtatgtatgtgtttaatattgaagtggatcatgagatgtaaagaaaacaataatggcaatgacttatattcaaatctgtatttgtttctttatcaatgtaatctgctgaggaccttttgtctaagattcagtagtgttttaaggttctgatatcgaattaatgaagtaaagttgttgatggtggtgaaacaccgtagggcatgtggttcaaagagaagcaggagggcaagggaaagttaccctgatcttagtttgtagcttatgacttatttaatgaatggatgcccagccaagctcagagtaggcgcccaaagcattgtggattattttcctgttttgtctttttttttttttttttttaagccatgacatcccagaagaggacagtgaattactcctaggtcggctcttatagagtggccatagtgttctgtcaaaacacttgcttccattttcagagataaaaatcattgattacaaaaaaaaaaaaaaaaa

SEQ ID NO: 437 - DNA, 10607 bp, Homo sapiens
attctgcgaggaatggcagcggcagcagcatccccgccagaggcggcggcggcggcggcagcggccacggccaccaccgcggacgctattgttccctggtgttagacgcgctctccctccttctcatctgaagcgaacaatagcaggaaagagctttgctttctgtactctttgaaaagacgttccaagagcggagaaaaattccctgccgagcgtgctacggctctggaccctggagtggctgcaggcggcatggggctgcaagccaggcgctgggcgtccgggagccggggcgctgcggggccgcgccggggcgtcctgcagctgctgccgctgccgctgccgctgccgctgctcctgctgctgctgctacgcccgggcgccggcagggctgcggcgcagggcgaggcggaggcgcccaccctctatctgtggaagactggtccatggggccgatgtatgggagatgaatgtggtcccggaggcatccaaacgagggctgtgtggtgtgctcatgtggagggatggactacactgcatactaactgtaagcaggccgagagacccaataaccagcagaattgtttcaaagtttgcgattggcacaaagagttgtacgactggagactgggaccttggaatcagtgtcagcccgtgatttcaaaaagcctagagaaacctcttgagtgcattaagggggaagaaggtattcaggtgagggagatagcgtgcatccagaaagacaaagacattcctgcggaggatatcatctgtgagtactttgagcccaagcctctcctggagcaggcttgcctcattccttgccagcaagattgcatcgtgtctgaattttctgcctggtccgaatgctccaagacctgcggcagcgggctccagcaccggacgcgtcatgtggtggcgcccccgcagttcggaggctctggctgtccaaacctgacggagttccaggtgtgccaatccagtccatgcgaggccgaggagctcaggtacagcctgcatgtggggccctggagcacctgctcaatgccccactcccgacaagtaagacaagcaaggagacgcgggaagaataaagaacgggaaaaggaccgcagcaaaggagtaaaggatccagaagcccgcgagcttattaagaaaaagagaaacagaaacaggcagaacagacaagagaacaaatattgggacatccagattggatatcagaccagagaggttatgtgcattaacaagacggggaaagctgctgatttaagcttttgccagcaagagaagcttccaatgaccttccagtcctgtgtgatcaccaaagagtgccaggtttccgagtggtcagagtggagcccctgctcaaaaacatgccatgacatggtgtcccctgcaggcactcgtgtaaggacacgaaccatcaggcagtttcccattggcagtgaaaaggagtgtccagaatttgaagaaaaagaaccctgtttgtctcaaggagatggagttgtcccctgtgccacgtatggctggagaactacagagtggactgagtgccgtgtggaccctttgctcagtcagcaggacaagaggcgcggcaaccagacggccctctgtggagggggcatccagacccgagaggtgtactgcgtgcaggccaacgaaaacctcctctcacaattaagtacccacaagaacaaagaagcctcaaagccaatggacttaaaattatgcactggacctatccctaatactacacagctgtgccacattccttgtccaactgaatgtgaagtttcaccttggtcagcttggggaccttgtacttatgaaaactgtaatgatcagcaagggaaaaaaggcttcaaactgaggaagcggcgcattaccaatgagcccactggaggctctggggtaaccggaaactgccctcacttactggaagccattccctgtgaagagcctgcctgttatgactggaaagcagtgagactgggaaactgcgagccagataacggaaaggagtgtggtccaggcacgcaagttcaagaggttgtgtgcatcaacagtgatggagaagaagttgacagacagctgtgcagagatgccatcttccccatccctgtggcctgtgatgccccatgcccgaaagactgtgtgctcagcacatggtctacgtggtcctcctgctcacacacctgctcagggaaaacgacagaagggaaacagatacgagcacgatccattctggcctatgcgggtgaagaaggtggaattcgctgtccaaatagcagtgctttgcaagaagtacgaagctgtaatgagcatccttgcacagtgtaccactggcaaactggtccctggggccagtgcattgaggacacctcagtatcgtccttcaacacaactacgacttggaatggggaggcctcctgctctgtcggcatgcagacaagaaaagtcatctgtgtgcgagtcaatgtgggccaagtgggacccaaaaaatgtcctgaaagccttcgacctgaaactgtaaggccttgtctgcttccttgtaagaaggactgtattgtgaccccatatagtgactggacatcatgcccctcttcgtgtaaagaaggggactccagtatcaggaagcagtctaggcatcgggtcatcattcagctgccagccaacgggggccgagactgcacagatcccctctatgaagagaaggcctgtgaggcacctcaagcgtgccaaagctacaggtggaagactcacaaatggcgcagatgccaattagtcccttggagcgtgcaacaagacagccctggagcacaggaaggctgtgggcctgggcgacaggcaagagccattacttgtcgcaagcaagatggaggacaggctggaatccatgagtgcctacagtatgcaggccctgtgccagcccttacccaggcctgccagatcccctgccaggatgactgtcaattgaccagctggtccaagttttcttcatgcaatggagactgtggtgcagttaggaccagaaagcgcactcttgttggaaaaagtaaaaagaaggaaaaatgtaaaaattcccatttgtatcccctgattgagactcagtattgtccttgtgacaaatataatgcacaacctgtggggaactggtcagactgtattttaccagagggaaaagtggaagtgttgctgggaatgaaagtacaaggagacatcaaggaatgcggacaaggatatcgttaccaagcaatggcatgctacgatcaaaatggcaggcttgtggaaacatctagatgtaacagccatggttacattgaggaggcctgcatcatcccctgcccctcagactgcaagctcagtgagtggtccaactggtcgcgctgcagcaagtcctgtgggagtggtgtgaaggttcgttctaaatggctgcgtgaaaaaccatataatggaggaaggccttgccccaaactggaccatgtcaaccaggcacaggtgtatgaggttgtcccatgccacagtgactgcaaccagtacctatgggtcacagagccctggagcatctgcaaggtgacctttgtgaatatgcgggagaactgtggagagggcgtgcaaacccgaaaagtgagatgcatgcagaatacagcagatggcccttctgaacatgtagaggattacctctgtgacccagaagagatgcccctgggctctagagtgtgcaaattaccatgccctgaggactgtgtgatatctgaatggggtccatggacccaatgtgttttgccttgcaatcaaagcagtttccggcaaaggtcagctgatcccatcagacaaccagctgatgaaggaagatcttgccctaatgctgttgagaaagaaccctgtaacctgaacaaaaactgctaccactatgattataatgtaacagactggagtacatgtcagctgagtgagaaggcagtttgtggaaatggaataaaaacaaggatgttggattgtgttcgaagtgatggcaagtcagttgacctgaaatattgtgaagcgcttggcttggagaagaactggcagatgaacacgtcctgcatggtggaatgccctgtgaactgtcagctttctgattggtctccttggtcagaatgttctcaaacatgtggcctcacaggaaaaatgatccgaagacgaacagtgacccagccctttcaaggtgatggaagaccatgcccttccctgatggaccagtccaaaccctgcccagtgaagccttgttatcggtggcaatatggccagtggtctccatgccaagtgcaggaggcccagtgtggagaagggaccagaacaaggaacatttcttgtgtagtaagtgatgggtcagctgatgatttcagcaaagtggtggatgaggaattctgtgctgacattgaactcattatagatggtaataaaaatatggttctggaggaatcctgcagccagccttgcccaggtgactgttatttgaaggactggtcttcctggagcctgtgtcagctgacctgtgtgaatggtgaggatctaggctttggtggaatacaggtcagatccagaccggtgattatacaagaactagagaatcagcatctgtgcccagagcagatgttagaaacaaaatcatgttatgatggacagtgctatgaatataaatggatggccagtgcttggaagggctcttcccgaacagtgtggtgtcaaaggtcagatggtataaatgtaacagggggctgcttggtgatgagccagcctgatgccgacaggtcttgtaacccaccgtgtagtcaaccccactcgtactgtagcgagacaaaaacatgccattgtgaagaagggtacactgaagtcatgtcttctaacagcacccttgagcaatgcacacttatccccgtggtggtattacccaccatggaggacaaaagaggagatgtgaaaaccagtcgggctgtacatccaacccaaccctccagtaacccagcaggacggggaaggacctggtttctacagccatttgggccagatgggagactaaagacctgggtttacggtgtagcagctggggcatttgtgttactcatctttattgtctccatgatttatctagcttgcaaaaagccaaagaaaccccaaagaaggcaaaacaaccgactgaaacctttaaccttagcctatgatggagatgccgacatgtaacatataacttttcctggcaacaaccagtttcggctttctgacttcatagatgtccagaggccacaacaaatgtatccaaactgtgtggattaaaatatattttaatttttaaaaatggcatcataaagacaagagtgaaaatcatactgccactggagatatttaagacagtaccacttatatacagaccatcaaccgtgagaattataggagatttagctgaatacatgctgcattctgaaagttttatgtcatcttttctgaaatctaccgactgaaaaaccactttcatctctaaaaaataatggtggaattggccagttaggatgcctgatacaagaccgtctgcagtgttaatccataaaacttcctagcatgaagagtttctaccaagatctccacaatactatggtcaaattaacatgtgtactcagttgaatgacacacattatgtcagattatgtacttgctaataagcaattttaacaatgcataacaaataaactctaagctaagcagaaaatccactgaataaattcagcatcttggtggtcgatggtagattttattgacctgcatttcagagacaaagcctcttttttaagacttcttgtctctctccaaagtaagaatgctggacaagtactagtgtcttagaagaacgagtcctcaagttcagtattttatagtggtaattgtctggaaaactaatttacttgtgttaatacaatacgtttctactttccctgattttcaaactggttgcctgcatcttttttgctatatggaaggcacatttttgcactatattagtgcagcacgataggcgcttaaccagtattgccatagaaactgcctcttttcatgtgggatgaagacatctgtgccaagagtggcatgaagacatttgcaagttcttgtatcctgaagagagtaaagttcagtttggatggcagcaagatgaaatcagctattacacctgctgtacacacacttcctcatcactgcagccattgtgaaattgacaacatggcggtaatttaagtgttgaagtccctaaccccttaaccctctaaaaggtggattcctctagttggtttgtaattgttctttgaaggctgtttatgactagatttttatatttgttatctttgttaagaaaaaaaaagaaaaaggaactggatgtctttttaattttgagcagatggagaaaataaataatgtatcaatgacctttgtaactaaaggaaatcaaaattatatgttgatttttctttctctctgatttcccagtttcagattgaatgtctgtcttgcaggcagttatttcaaaatccatagtcttttgcctttctcactggcaaaatttgaagcaatctctctcttcaatgtatgatttcaaaactaaaattttaaaagagaagaataaatatcttatccaagacttcattgcatatctagagcaagagtggcaaactttttctgtaaaggactatatagaaaatattttccacaaggtctatgttgcaacttctcaactttgccattctgctaatgcaatcttagtaaataaaagaatgaacataactgttttcctatataacttcccttacaaaaacagccagtaggccacctttgcaggtcatattttgctgacccctggtctggatgttttttaatgctagctctccatggtgtcatctttcgttttcattcatttttcaaaggtgagaatttacagtcattacatttcccactgtatcagaagtagctgtattttctacagatgtagccctgggaatggcacagtggaacaatatttaactaactcagcagacttcttgcaaatgaaaagaaaactcaaaaggtgccattaaaaagcaataccattttcaggcaacattattgcaacaacctttgtgagagaggacactagcttttcaggatatttgaaaaataatataactaacatgctattttatcttaaacagctgtgttcctgtaaaagtgttttggattagaaggtatttttaccttcatactggagtatgaactccccctgctgttcattagagtatttgcaaagattacaaaagacatcaggttaggatgtcattgtccccaaaatgaaaatatttgtatgtatttcaataagaactaaatgcagtaagcgctaattcctcattcaatattcactatattaggaaatgtaaatcatttcaaagagaacaggtagtcaggaagatgaaaattttactttaaagcaaggatttaaacaaagaaaaccataaaaacaaagtccattttatctgttttattaaagaggaagaaaaaataatattgttactttaaaactgtgattgtcaatatatataatcaggggtcttccagataatcctaaagttgatctctttgaataaaataaactccatttgtccaaaatagttaagaaagactctattgtggttacttgaaaaattcagctaaccctcttatgaaatgtgtgcaacacctattaattttgaaatgtgggatagaatacctactaaagctatatttaaggtattgtaaaatgtcattaattcagaaaagattagtatcatcctacctataagaattaaattagcaaatcaaaattatagaatgttatgaaaaatacattttattcataaattaattagattttacagcatatatgcatgcatatatatatatacacacacacacacacacacccatatatatgagagagaggaaattaggttcaacatgacctaatattagagaacatattggaaggtcactgtttgttaggataaataaatactggataacctcgttagaaaggtggaaagaggagaacgtagcaatctggctattttggacaaagggaaggttattatattcatgtttataacatgaaaatggccttatttttgtttctgacatgagacaataatgagttaaatattttattggaatttcatcaaaaccttatttttactgttccttctaaaaatttgggaggggaatatagtagtaacttctctattgacacttttacctcaccgagggggtaaaagatgtagaactgctgttccctagaatgaaggtctgttgtttggtttttaaaaaaagaagagcagaaaaagtttgacacagtattatatgattttgctggactatttcactagaaaccacgtagaataggactaactgatctcttttgaaaggggctgatttgcttattcatcaataactaatccaatatgtggacagtaatcttaatttcaaagccttttttgaggatactacggtgtagcttaagtgaatttaaaaagagtgcataaaagcttgtttttaattacttataacaaagcacaaattacttctaacaaggcaaatatttattgacatataagacattctgctaggcattgtaaaaaaaaaaaaaaaagtaatggcttttgtatacataggtacttaagacagacatccaaaagaaggaaaaaatgcttaatgagtgaagatagcactgaaacatgttgacttttactctaggtttgtttttagatggggttagtattttcccctacgtaatgtacatgtctttaggccacagtattaggagtttgatttttccctgccccaccctcaggtaggtggcagtggtcattgtagcttaatcagacccctgttaagttcctgggcatttcaaggtaaattcacgtcttccttctcacagaaattgaatagacctctcacacacttatttacctcccccaacaacctgtatccttggccctttctgattttctctgcttggtctctttctactcttgacagctattcttacctacttcccactaaacatgcccaattttttaattaaaaaaaaaagaattcctatatttccttccctattagaatcaaagtgtcactcactcagagtgtgaacatcctgatttacaccaaatccactggtcaaagaaatgaataaagggaaaaggaaaaatgtggaaggcatgcaggaaaaaaaaaaaaaaaaaagcccttttctgtaaaaatgtccatgcctacacttgctttagaccatcccatatcctcctgcctccatctcgagtctttgttcacattccacaccacaagacagtgagggaggactgtacttttcagtaccatacagaagggagagcctgttctaaagctgacgtgggtctcaatagtacatgagaagcacaattcccaaatgatctgggatctcctgtttataaatatattaccaaattcaagtgtgggttcttcttctatttccactgtaagattgagggtgttgaaaaaacagtagtccttgagcaaatctgtgaggaatcttgtcagaatgtgatctttcctgggactagtttagttgtgagaactacatctgcttgttctgggaataagggtctccccaggtcctgccctcaggtggccctggctgcaggacaggatttcaggtatcagaaactggtgtgtgagccaagcaaatagttatccatttataaaaaggatggtttgcagtgtgttataataattttatatctagcagggacaatgaaaaatggttatgtctacattattaaatgaatgaaactaatgctaaacagttaattttgcatttttatttttctgtgtttctaccaagtcagatcttaaaaatgggcagtatatgaagagctttagtttgtgggagtcatgttttcagtgatcaaaaatctctatattatttagaatataattgtcagtcttgttgtgttttgtagatttattgtttttaagccatagtttctagattacctacttttaaccctcaagtaaacttttccctatttttcagaaatctgtttgtgtttatttttagaaagtaaacatttagattccttttctggtactttttttctccatttctatcacacagatttgaagagatcagtatctatcattgtaaaatataactttattaaaatttgcaatctgtctttctataaattattattccctaaatgtgtattttatgttaatttaactacctgaatatttattttgtttaaataaggaggcagctgtctaagaatttttgttaatattactttgtaaattgcgtaatgtaatttattttacattatgtacatttcctttttaacgcacaaaatgtctatgtacaattaactacagatttgcaaataatgtcactaagctttattcagtcaatacagatggcatgtgaagatgtaatatgcttttttacattttcatatgggttatttgtaaataactatattgctgacaaacataaatacggaaatcattttcattctaaaaaaaaaaaaaaaaaaaaaaaa

SEQ ID NO: 438 - DNA, 4252 bp, Homo sapiens; identical to SEQ ID NO: 146

SEQ ID NO: 439 - DNA, 4443 bp, Homo sapiens
ggacactcccaacttgagactgaaagctgggcgaaagcggtttgtgaagctaacctaaaagacaaaatggtctagagccaccttttccccgcaaataacagaggattaaggatctgaaatcttcaagcctccaggaccacggtgcaagccctcagcaaaaatttctgctggaggccggagcgccttttgatttcgggagactggcccaggaactctagtcacttggaaggcggaagagaaggtggtacctgagccaggtaggagccactcagaggcagcccggggccgccactcacctaggagaggaggtggagtccgatgacctggactgagaggaaacgcgagactgagtctaccaggtgaggtaaaaaacacccacctgctcacctcggaaggggcgggcgaggtgcggctcccggtgacccgcgggggtgcagcgcacctgggcggaggcggaactgggagggtgtgggcactgctcgtagggcctggaactaaactcacctgtgacggaggcagaggaggggcccgggcaaaaacccacctgagctggcgggaaacccgacccgcgagcagtccccgggcttgcgcggcgcggagagggaggcgccccgcggcggggcccccactcggtcagcccgcgcgtcggtccccgcgcggccgccatgacctggagcgccacggcccggggcgcccaccagcccgacaacaccgccttcactcagcagcgcctccccgcctggcagccgctgctgtcggccagcatcgcgctgccgctcttcttctgcgcgggcctggccttcatcggcctgggcctgggcctctactactcctccaacggcatcaaggagctggagtacgactatacaggcgacccgggcaccggtaactgctcggtgtgcgccgcggctggccagggccgggcgctgccgcccccctgctcgtgcgcctggtacttctcgctgcccgagctcttccagggcccagtgtacctctactacgagctgaccaacttctaccagaacaaccggcgctacggcgtgtcccgcgacgacgcgcagctgagcggactccccagcgcgctgcgccaccctgtcaacgagtgcgccccctaccagcgcagcgcggccggcctgcccatcgcgccctgcggcgccatcgccaacagcctcttcaacgactccttctcgctttggcaccagcgccagcccggcgggccctacgtcgaggtgccgctcgaccgctccggcatcgcctggtggaccgactaccacgtcaagttccgcaacccgccgctggtcaacggcagcctggcgttggccttccagggcacggcgcccccgcccaactggcgccggccagtctacgagctcagccccgaccccaacaacaccggcttcatcaatcaggacttcgtggtgtggatgcgcacggcggcgctgcccacgttccgcaaactgtacgcgcgcatccgccagggcaactactcggccgggctgccgcggggcgcctaccgcgtcaacatcacctacaactacccggtgcgcgcgttcggcggccacaagctcctcatcttcagcagcatctcgtggatgggtggcaagaaccccttcctgggcatcgcctacctggtcgtcggctccctctgcatcctcaccggctttgtcatgctggtcgtctacattcgctaccaggaccaggacgacgacgacgaggagtgattccggctttccagggatccctcctgcttcttgccaaaactcttgcaaggtgcttttggcatctcctcctcgcccgtcacccaattccaacctcgcctagcttttcctccctttgtgaatgaggggaccagataagggaattaccccccttgctcttggggggctgctagactgtcttgccgcggggagggatgttgactgcagagtgaaacatccttgcaaactcttcccacctccttcacgacactgagttgccatgtgaggttcttcaagtctgagagtggaagggatccctatggagactcctattaaacccctattagaggaagagattgagagacctagcaatgtgaagtaacaaagatcaggcagctgcaagtgactcctgaatcttgagtccagggctttcgccactacagtacagtggttttcttttctttggtcggggagagtgggctggaatggagagtgaggcccacaaattacctgcagagacgtggaggcgtgagggagaacatgcttgttaaatatgcaggtagattaggagacaccaaacagagattcagacacagtaaggctgggatgagatcctcgaagctgtgttttaacaaactccactggagagtcccatattccctcaaatttgggaatcacgaccctgaaccaggttgggcctgaagcagtcaactgaattcactttttcggatagtaatttgttcccaggggcagtgacaaccatgatgttccaggtttggtctggcactctgccttgaacgtaggaagctcttgatgatttgtggaatgaatttttaaaaaattactatctggggaaaactagttggcatacagagttgtaggacagggtttatgtgattcatttgatattttagtattttggtgtaaaagccaacaggcaaactttgccaggtactgtgtagaaactcgaaaatgtgaggccagtttgtacagttcagaggaaatgctttaacgtagaatcagatagctggaagagatcttcgagggaaagtaagttccctaaagtcacatctatgtctcctagctcagtgttctttgtcattgtgtgtgtgtgtgtgtgtgtgtgtgtgtgtgtgtgtgattagaaagggcttcattcataccttttcccttggacctggaaaaaaaattttttttatcttttcaaatgaaatctattgatttctagtaatcatatttgaatcaatgttaaagcatatatagtcttatatgtaaactagattcttaagattatttgaacctttgagatgaagtttacactcaactaaaatcattccattgattttattgattaacatcaatcagtatgtttaaagttattctaagaagcaatagtttatttttaaaaaccttgtatagcaaaataacttaaaaccctttgtgatatcatcttaccagtttatttggtaaaaacaaacagttatttggtatttgtcagaattcttcagtgcctgctattacagctattttccaattactaacttgattatactcactcaaggcagtgcaagatcttgaagtactttttagcagttaagtaatattgaattgtattgaatagtttacatagtttattctagtctttgaaaattactgaacatggacaatgtgcatgtcattgacatctgccttagaacttctgggacaatcctgattcgagagattctatcccattatttacatataccaaaaatactttgttaatttaatgtgttggcttcccaactcctgaacacgacacaattttattattagattttgtatggtgattttaggctatgaaaacatgatcattatatgtatatagatacatttttatttgttacaaatgtttgagcagctcactagcccacccctcctctattttgggtaagagaatttactaccttttttaactatgtagttgagagcaacatgtattttgttatttttagaatggtcagtatattgctataaaattttaaatgagactatgaaagttaaagtattctgattctggttaaattaacgaatatggttccaggccctgttctctgggtttttgagagagaataaaggttatgtttgtcttacctttgttatcgagtttgctgaattcttttgaacgatgatcttaaaggcacaaacaccaccagccactttgctaatttcttaatagcagatttacattgcagcaagaaaaccatcttttatagtaacattcagttaaaatgaactcaattcattgttaacttcctaaaacagaatttgaactttatcaacctcaacgtgtatataaactagatagtcctcaatactttatcaacctcaacatgtatataaactagatagtcctcaaatactgtttgaatttaataaatgtcaatttaaaaatttttgtagtagtcttctgcattttacttcaattataaattgcaattatttattggatattttggacttcaaagcagcagaaactttaaaactgaaatgggaaacgttttcctgcaatgatccctgtgctgtaacattttgtctggtgtctcaggcttccaggttcttgttggcctgaattcccttgttgcccagtaaatgttcactagctagaagtatcttcaggaagtgagatagaaaagagtgaacctcaacaattggactggaaatgagctttgacctaactttgtaaaataaaagcataaaagagaaa

SEQ ID NO: 440 - DNA, 3513 bp, Homo sapiens
tgggcaggaactgggcactgtgcccagggcatgcactgcctccacgcagcaaccctcagagtcctgagctgaaccaagaaggaggagggggtcgggcctccgaggaaggcctagccgctgctgctgccaggaattccaggttggaggggcggcaacctcctgccagccttcaggccactctcctgtgcctgccagaagagacagagcttgaggagagcttgaggagagcaggaaagggcggcagtaagtcttcagcatcaggcattttggggtgactcagtaaatggtagatcttgctaccagtggaacagccactaaggattctgcagtgagagcagagggccagctaagtggtactctcccagagactgtctgactcacgccaccccctccaccttggacacaggacgctgtggtttctgagccaggtacaatgactcctttcgcagcctcccccgttgcccctctggatccactgcttaaatacggacgaggacagggccctgtctcctcagcttcaggcaccaccactgacctgggacagtgaatcgacaatgccgtcttctgtctcgtggggcatcctcctgctggcaggcctgtgctgcctggtccctgtctccctggctgaggatccccagggagatgctgcccagaagacagatacatcccaccatgatcaggatcacccaaccttcaacaagatcacccccaacctggctgagttcgccttcagcctataccgccagctggcacaccagtccaacagcaccaatatcttcttctccccagtgagcatcgctacagcctttgcaatgctctccctggggaccaaggctgacactcacgatgaaatcctggagggcctgaatttcaacctcacggagattccggaggctcagatccatgaaggcttccaggaactcctccgtaccctcaaccagccagacagccagctccagctgaccaccggcaatggcctgttcctcagcgagggcctgaagctagtggataagtttttggaggatgttaaaaagttgtaccactcagaagccttcactgtcaacttcggggacaccgaagaggccaagaaacagatcaacgattacgtggagaagggtactcaagggaaaattgtggatttggtcaaggagcttgacagagacacagtttttgctctggtgaattacatcttctttaaaggcaaatgggagagaccctttgaagtcaaggacaccgaggaagaggacttccacgtggaccaggtgaccaccgtgaaggtgcctatgatgaagcgtttaggcatgtttaacatccagcactgtaagaagctgtccagctgggtgctgctgatgaaatacctgggcaatgccaccgccatcttcttcctgcctgatgaggggaaactacagcacctggaaaatgaactcacccacgatatcatcaccaagttcctggaaaatgaagacagaaggtctgccagcttacatttacccaaactgtccattactggaacctatgatctgaagagcgtcctgggtcaactgggcatcactaaggtcttcagcaatggggctgacctctccggggtcacagaggaggcacccctgaagctctccaaggccgtgcataaggctgtgctgaccatcgacgagaaagggactgaagctgctggggccatgtttttagaggccatacccatgtctatcccccccgaggtcaagttcaacaaaccctttgtcttcttaatgattgaacaaaataccaagtctcccctcttcatgggaaaagtggtgaatcccacccaaaaataactgcctctcgctcctcaacccctcccctccatccctggccccctccctggatgacattaaagaagggttgagctggtccctgcctgcatgtgactgtaaatccctcccatgttttctctgagtctccctttgcctgctgaggctgtatgtgggctccaggtaacagtgctgtcttcgggccccctgaactgtgttcatggagcatctggctgggtaggcacatgctgggcttgaatccaggggggactgaatcctcagcttacggacctgggcccatctgtttctggagggctccagtcttccttgtcctgtcttggagtccccaagaaggaatcacaggggaggaaccagataccagccatgaccccaggctccaccaagcatcttcatgtccccctgctcatcccccactcccccccacccagagttgctcatcctgccagggctggctgtgcccaccccaaggctgccctcctgggggccccagaactgcctgatcgtgccgtggcccagttttgtggcatctgcagcaacacaagagagaggacaatgtcctcctcttgacccgctgtcacctaaccagactcgggccctgcacctctcaggcacttctggaaaatgactgaggcagattcttcctgaagcccattctccatggggcaacaaggacacctattctgtccttgtccttccatcgctgccccagaaagcctcacatatctccgtttagaatcaggtcccttctccccagatgaagaggagggtctctgctttgttttctctatctcctcctcagacttgaccaggcccagcaggccccagaagaccattaccctatatcccttctcctccctagtcacatggccataggcctgctgatggctcaggaaggccattgcaaggactcctcagctatgggagaggaagcacatcacccattgacccccgcaacccctccctttcctcctctgagtcccgactggggccacatgcagcctgacttctttgtgcctgttgctgtccctgcagtcttcagagggccaccgcagctccagtgccacggcaggaggctgttcctgaatagcccctgtggtaagggccaggagagtccttccatcctccaaggccctgctaaaggacacagcagccaggaagtcccctgggcccctagctgaaggacagcctgctccctccgtctctaccaggaatggccttgtcctatggaaggcactgccccatcccaaactaatctaggaatcactgtctaaccactcactgtcatgaatgtgtacttaaaggatgaggttgagtcataccaaatagtgatttcgatagttcaaaatggtgaaattagcaattctacatgattcagtctaatcaatggataccgactgtttcccacacaagtctcctgttctcttaagcttactcactgacagcctttcactctccacaaatacattaaagatatggccatcaccaagccccctaggatgacaccagacctgagagtctgaagacctggatccaagttctgacttttccccctgacagctgtgtgaccttcgtgaagtcgccaaacctctctgagccccagtcattgctagtaagacctgcctttgagttggtatgatgttcaagttagataacaaaatgtttatacccattagaacagagaataaatagaactacatttcttgca

SEQ ID NO: 441 - DNA, 1400 bp, Homo sapiens
ctccacgcgcggcctggcggcggcggccactctaaccagcgcaaaatgtccctggaacaggaggaggaaacgcaacctgggcggctcctaggacgcagagacgccgtccccgccttcattgagcccaacgtgcgcttctggatcaccgagcgccaatcctttattcgacgatttcttcaatggacagaattattagatcctacaaatgtgttcatttcagttgaaagtatagaaaactcgaggcaactattgtgcacaaatgaagatgtttccagccctgcctcggcggaccaaaggatacaagaagcttggaagcggagtcttgcaacagtgcatcccgacagcagcaacctgatccccaagctttttcgacctgcagcgttcctgcctttcatggcgcccacggtatttttgtcaatgacgccactgaaagggatcaagtccgtgattttacctcaggttttcctctgtgcctacatggcagcgttcaacagcatcaatggaaacagaagttacacttgtaagccactagaaagatcattactaatggcgggagccgttgcttcttcaactttcttaggagtaatccctcagtttgtccagatgaagtatggcctgactggcccttggattaaaagactcttacctgtgatcttcctcgtgcaagccagtggaatgaatgtctacatgtcccgaagtcttgaatccattaaggggattgcggtcatggacaaggaaggcaatgtcctgggtcattccagaattgctgggacaaaggctgttagagaaacgctagcatccagaatagtgctgtttgggacctcagctctgattcctgaagtcttcacctacttttttaaaaggacccagtatttcaggaaaaacccagggtcattgtggattttgaaactgtcttgtactgtcctggcaatgggactgatggtgccattttcttttagtatatttccacagattggacagatacagtactgtagtcttgaagagaaaattcagtctccaacagaagaaacagaaatcttttatcacagaggggtgtaggcgtgagttttaggtgaatttatgtggttcctgcttgaaaaccttcccctctccaggttcggtttagagaactttgccacaggtcttctggggaccccagaggtgtctgtgctgacaaggcgacttcagattccatactgagatcgttcccaggctggcgtctctggggtttttaaggctggctggagaagacagtgggagggtgccccgtctgacacccctggggttgctgagggaacggttggagtggggatcggcctgcgaaaggatactgtgaaatcactaattaactaataaacctgtctcaagttgaggatttgaagaaagaaaaaaaaaaaaaa

SEQ ID NO: 442 - DNA, 1352 bp, Homo sapiens
ggagaagactgaataagccgtgaactgggcagctgtgacacgcgcaccttgtcaccttgtcaccaatttcctgcccgggatcccagagctacccttcttggagcccacaggggtaaggttgagcttctcactttccctccaatgaagcgtggcagcatgggaaggattttggcagtgtcgaggtctgagttttagtccgttcccctctctgggtctcagtttctcgctggaataaagtgaaacacctcaggctccaaccctcccaacccaaggctccctcctggagggagagagaggatggaggacatcaggcagcccttggctggtccctgcgagcccgtggagactgccagagatgtcctctttcggttacaggaccctgactgtggccctcttcaccctgatctgctgtccaggatcggatgagaaggtattcgaggtacacgtgaggccaaagaagctggcggttgagcccaaagggtccctcgaggtcaactgcagcaccacctgtaaccagcctgaagtgggtggtctggagacctctctagataagattctgctggacgaacaggctcagtggaaacattacttggtctcaaacatctcccatgacacggtcctccaatgccacttcacctgctccgggaagcaggagtcaatgaattccaacgtcagcgtgtaccagcctccaaggcaggtcatcctgacactgcaacccactttggtggctgtgggcaagtccttcaccattgagtgcagggtgcccaccgtggagcccctggacagcctcaccctcttcctgttccgtggcaatgagactctgcactatgagaccttcgggaaggcagcccctgctccgcaggaggccacagccacattcaacagcacggctgacagagaggatggccaccgcaacttctcctgcctggctgtgctggacttgatgtctcgcggtggcaacatctttcacaaacactcagccccgaagatgttggagatctatgagcctgtgtcggacagccagatggtcatcatagtcacggtggtgtcggtgttgctgtccctgttcgtgacatctgtcctgctctgcttcatcttcggccagcacttgcgccagcagcggatgggcacctacggggtgcgagcggcttggaggaggctgccccaggccttccggccatagcaaccatgagtggcatggccaccaccacggtggtcactggaactcagtgtgactcctcagggttgaggtccagccctggctgaaggactgtgacaggcagcagagacttgggacattgccttttctagcccgaatacaaacacctggacttaaaaaaaaaaaaaaaaaa

SEQ ID NO: 443 - DNA, 4500 bp, Homo sapiens
ggtgcagtgttggaagctccggttctcccggaagtggcccaggtctctctgtcggggtcccctccatctcgctgctgctgaaggccgcgagggcggcggcgatggcggaggcggcgctgttgctgctgcctgaggcggcggcggagcgggacgctagggaaaagctggctctctgggatcggagaccggacacgacggcgccgctgaccgacaggcagacggactcggtattggagctgaaggcggcggcagagaacttgccggtgccagctgagcttccaattgaagacttgtgcagtttaacatcccagtcactgcccattgaactgacttcagtagtgcctgaatctacagaagacattctcttgaagggcttcacttccttaggaatggaagaagaaagaattgaaaccgcacagcagtttttctcatggtttgcaaagctgcaaactcagatggatcaagatgaaggaactaaatatagacagatgagggattacttgtctgggtttcaggagcagtgtgatgctatattgaatgatgtaaacagtgctcttcagcatctggagtctttgcagaaacagtatctttttgtgtccaataagacaggaaccctacatgaagcctgtgaacagctcctaaaagaacagtcggaacttgttgatctggctgaaaacattcaacaaaagctttcctattttaacgaattggaaactattaacacaaaattgaattcccctacattgtcggtgaatagtgacggatttatacctatgctggccaagttagatgattgtataacatatatctcatctcatcctaattttaaagattatcccatatatttgctgaagtttaaacagtgtctttctaaagctttgcacctcatgaagacatatactgtgaacacactacagaccctcacaagtcagttactgaaaagggatccttcatctgtacctaatgcagacaatgccttcacattattttatgtgaaatttcgagctgctgcccccaaagtcagaactcttattgaacaaatagaactgcggtctgaaaaaatacctgaataccaacaactgctaaatgatatccaccagtgttaccttgatcagcgggagctccttttgggccctagtattgcttgcactgttgcagagttaaccagccaaaataatagagatcactgtgccttggttcgtagtggctgtgccttcatggttcatgtctgccaggatgaacaccaactttacaatgaatttttcacaaaaccaacatcaaaattagatgagcttttggagaaactgtgtgtgtcattgtatgatgtcttcaggccattgatcattcatgttattcacttagagactctgtcggaactttgtgggattcttaaaaatgaagtgcttgaagatcatgtgcagaacaatgctgagcaactgggggcatttgcagctggagtcaagcagatgttagaagatgtacaggagcggctcgtctaccgaacccacatctatattcagacggacatcacgggctataaaccagctcctggagatctggcatatcccgataagttagtcatgatggagcaaattgcacagagtttgaaagatgaacagaagaaggtaccttcagaagcttcattttcagatgttcacttagaagaaggagagtctaacagtctgacaaaatctggttcaacagaatccctcaatcctagaccacagaccacaatttctccagcagatcttcatggaatgtggtatcctacggttcgaagaactcttgtctgtctctccaaattatacagatgcatagatagggcagtgttccaaggattatcacaggaagcattgtctgcctgcattcagtccttacttggagcgtcagagtctatcagcaaaaacaagactcagattgatggacaacttttcttaattaagcaccttttgatacttcgtgaacaaattgctccatttcacactgaattcaccattaaggaaatttccctggacctcaagaaaactagagatgcagcatttaaaatcctgaaccctatgactgtcccaagattttttaggctgaatagcaacaatgccttgatagagttcttgttggagggtactcctgagataagagaacattatcttgactctaaaaaagacgtagaccgtcatctgaaatcggcctgtgagcagtttattcagcagcagaccaagctgtttgtagaacagctggaggagttcatgacaaaggtttcagcgttaaaaacaatggccagtcagggaggccccaagtatactctctcacagcagccttgggcacaaccagcaaaggtcagtgaccttgcggcaactgcatataagacaataaaaacaaagctgcctgtgacattgagaagtatgtccttgtacctatccaataaagataccgagttcatcttgtttaaacctgtgaggaataatattcagcaagtcttccagaagttccacgctctgttaaaggaagagttcagccctgaagacatccagatcattgcctgtccatctatggaacagctgagccttctgctgtcagtttctaaataagcaggccagccgggctgtgcacctaaatgtctgtctgggaggagcaggctgagaagtcttgcagtctgcaggacaccgaggaatcgtatgtgggaacgtccccgagaaccacacgagcgtgctgctcagtgctgactgcagaatgaaatagaagcaaagtgttacaggatcagtgttttcttttctaaaacatcaaaatgccaaagattaatctgtgattggtgataactgcctcgtttaaatggtcacaagaaatgtgaagagagagctagggcagacatgcagtgaaatggttctttgttaaaaatgtgcaataaaaatagattacaataagtagtgcaaagaactttacagaaatcaagcgaattagaaggcctgtaagagtaaggtttgctaaaacgtgaaacactgtaacacttttaaccactgagcattccacagtgaaatgttatttctatgctcttatttaatgtaatgtttctcctgtcatttttgaagttgagtttggagtagattggttgcttctgagaacacattctgccttcctgggaagtcggggtgtcatcctttcctctgtttgatgtgaggtagtttaaagatacaaggactttgtgtgaagctccagcatctgtgccccttgaattgcttaggtgcagacagttctaaagcaaggagctgcagcattctcatcatagatacgtgcagtatctttaatgagtatcttcatggtatgatagtgtgtgtttgtgagtgcgaagtaccaattaaggtgtcttaaatttggcgcatagaggagagaaggaaacctgaggagtagtgttcctcctgaatgaaggttcaggtcaccagccttctgtacactgcctttggttttagcagttctttgaaaagcaaacactttcatgtcctgtctattcattcagctggctgtgctgtgctgtggaccagctgtgtggatctctagcccagctacagcagaatacattttaccagcaaacctaaggatgacaaacactatccacatctgaaaactaccacaccatatcagggatcataaattatgcatatctatgaattttccaacaaattcctacttcctgattggattggttttgccgctgatgttaaggcagccagcttcttagttcaaaaagaattctgagtttttcaaacactagtctagaggtggacattgtcaggggttctggaatgggaccaggggaccttttggtgcagtgggtgcctgtaactcattagacgtactgaggcagcacttctgcagggtgcataccctgattgttgtcatttgtaacaggtcacttccttttcactcagtttaaattggtgatggacgttgcttgattgagcttattactctctattttgagaaggtagaaggtaagagggcccatattcattctttgccatgaaatgaatgaattaggaagattgtatttacttaactgttttttaaatacatgtttaatgaaataaactgtaaaatatccagttttgtgtattatatgtacatttgatttttaatagcctttccaaagaaatgagggcatgattattgtacagtaagtacgtgactgatttaatttgatttacagagcggagtgtgttcttataaaaatatttaatgacattggttcttgtcttttgatcttttatttctgaaacactcaaacaccttacaaagtgctgagtaggtaatagtgacccaacttgtttgctaaatgattatttgtttaaatctgtacagttttaagtgttcacttatacaaagagtgtatatactttcaaataatttaaaatgctttatattatttggctagaaattgctgtttttaataaatgtgaattttttaaaaataaagatttttgcttcctaaaaaaaaaaaaaaaaaaa

SEQ ID NO: 444 - DNA, 3714 bp, Homo sapiens
gagccgcagccagagccagagccggagccgcagccggaaccggagccggagccgcggggcaggaggcggcgcccgcgggcggccgggcccggcatggagaagcgcgcggccgcggggctggagggcgcgccgggcgcccgggcgcagctggccgtcgtctgtctggtgaacatctttctcaccgggagactcagcagtgcggttcctgccttagcggcctgcagtgggaagctggagcagcacacggagcggcgtggggtcatctacagcccggcctggcccctcaactacccgccaggcaccaactgcagctggtacatccagggcgaccgtggtgacatgattaccatcagcttccgcaactttgacgtggaggagtcccaccagtgctccctggactggctcctgctgggcccagcagccccaccccgccaggaggccttccgcctctgtggctccgccatcccacctgccttcatctctgcccgcgaccatgtctggattttcttccactcagacgcctccagctccggccaggcccagggcttccgtctgtcttacatccgagggaagctgggccaggcatcctgccaggcagatgagttccgctgtgacaacggcaagtgcctgcccggcccgtggcagtgcaacacggtggacgagtgtggagacggctctgatgagggcaactgctcggcgcccgcctccgagcctccaggcagcctgtgccccggggggaccttcccatgcagcggggcgcgctccacgcgctgcctgcctgtggagcggcgctgtgacggcttgcaggactgcggcgacggctcggatgaggcgggctgccccgacctggcgtgcggccggcggctgggcagcttctacggctcctttgcctccccagacctgttcggcgccgctcgcgggccctcagaccttcactgcacgtggctggtggacacacaggactcccggcgggtgctgctgcagctggaactgcggctgggctatgacgactacgtgcaggtatacgagggcctgggcgagcgcggggaccgcctgctgcagacgctgtcctaccgcagcaaccaccggcccgtgagcctggaggccgcccagggccgcctcactgtggcctaccacgcgcgcgcccgcagcgccggccacggcttcaatgccacctaccaggtgaagggctattgcctcccctgggagcagccgtgcgggagcagtagtgacagtgacgggggcagcctgggcgaccagggctgcttctcagagccacagcgctgtgatggctggtggcattgtgccagcggccgagacgagcagggctgccctgcctgcccgcccgaccagtacccctgcgagggtggcagtggtctgtgctacacgcctgccgaccgctgcaacaaccagaaaagctgtcccgacggcgccgacgagaagaactgcttctcctgccagcccggcaccttccactgcggtaccaacctgtgcatcttcgagacgtggcgctgtgacggccaggaagactgccaggacggcagcgatgagcatgggtgcctggccgccgtgccccgcaaggtcatcacggcggcgctcattggcagcctggtgtgtggcctgctgctggtcatcgcgctgggctgcgccttcaagctctactcactgcgcacgcaggaatacagggccttcgagacccagatgacgcgcctggaggctgagttcgtgcggcgggaggcacccccatcctatggtcagctcatcgcccagggcctcattccacccgtggaggactttcctgtctacagtgcgtcccaggcctctgtgctgcagaatcttcgcacagccatgcggagacagatgcgtcggcacgcctcccgccgggggccctcccgccgccgcctcggccgcctctggaaccggctctttcaccggccgcgggcgccccgaggccagatcccactgctgaccgcagcacgcccctcacagaccgtgctgggcgatggcttcctccagcctgctccaggggctgcccccgaccccccagcaccgctcatggacacaggcagcaccagggcggccggagacaggccccccagtgcccccggccgtgcaccggaggtgggaccttcagggccacccttgccctcgggcctgcgagacccagagtgcaggcccgtggacaaggacagaaaggtctgcagggagccactggtagacggcccagctcctgcagatgcacctcgggagccctgctcagcccaggacccgcacccccaggtctccactgccagcagcaccctgggcccccactcgccagagccactgggggtctgcaggaaccccccgcccccctgctccccaatgctggaggccagcgatgatgaggccctgttggtctgttgaccgctgggctcgctggtgaccgccacagccccgctttgtaaccagggaatacacagtcatttctaccctgcctctgcgtcctttcttatggagaggccctccggggaccccagcggaggggctggcccctaagccagctggctgcactggtgggcgggagctgtgggactgaacggcgggggggagaagagtggagtggtgagcccgtctgcagggtcccattgtacacaagcaccctggggtctcacttctctccccccactccattctgggaacccatttccagagaagcaggggaccagagcctttttgcttcatctgccctgcagtggcaacagctgcccctagagctgggagttgtcatgaggatggggccgggccatggggacgctgggtctcatccgtggtgactattttgctcacgcctcaccctcttcctgtccagcaaggcctctggaggacctgggttgggtggctcctgccaaaccctcatgcccctggccaggcaggcgccctttgccctccctgaaggtccaatctcctgggcaccgtggaagggctggggtgtgtgcctgctgtacatgaagcccctggagttccctgcaggcctcaaagcccccaggacatgctgctctgtgctttctggggacagagaggccgaggcaccaacagcagtggccacgtctgttccatcctatctcagggcctcggtttccccacctgtaagccagggtgagactgtgggctctgaagtcctgaccttcactctgtggtgatttacgggaagaaagacaatcccagcctggagcccctgagctctcctgggtggccgagctcagactggcatcgaggggcctggggtaggggcggactgagctgctaccccatcctcgacatccctttagggcagggggactctgggtgccatggtagggagcgcctgtgtcaagcagcaaagccccctaatgtcaagagcctcctccagggcctgccacggcatcttcctggccagcaacatgtgtgcacccaccgaggtacgccccagccactcccatctgtgcccatcagggactccccatagcacgagcgaacagccagccctgtttatttataggccttttcaggaagagctagcagggcagtgctaagacaggaaacccagtccacattttagggcttccttaaacaggcttctgagagtcgtatcttttttcttttttttccagaaaaaaacaaaacaaaacttttttgccaaaacacctcctcaataaacaacatgtaaacagaaacaaaaaaaaaaaaaaaaaa

SEQ ID NO: 445 - DNA, 1578 bp, Homo sapiens
gagggccgtcgagcaaaggcgggaggcgcagccgggctgtcggtggacctgcccactgctcagtggagcgtggaggacgaggaggaggccgtccacgagcaatgccagcatgagagagacaggcagcttcaggcccaggacgaggagggaggcggccatgtccccgagcggccgaagcaggagatgctcctcagcctgaagccctcggaggcccctgaactggatgaggacgagggctttggcgactggtcccagaggccagagcagcggcagcagcacgagggggcgcagggcgccttggacagcggagagcccccccagtgcaggagtcctgagggggagcaagaggacaggcccggcctgcatgcctacgaaaaggaggacagtgatgaagtccacctggaggagttgagtctgagcaaggaggggccaggcccagaggacactgtccaggacaacctgggggccgcaggggctgaggaggaacaggaggagcaccagaaatgtcagcagcccaggacacccagccccttggtcttggaggggaccatcgaacagagctcgcctcccctgagccctaccaccaaactcatcgacaggaccgagtccctaaaccgctccatagagaagagtaacagtgtgaagaaatcccagccagacttgcccatctccaagattgatcagtggctggaacaatacacccaggccatcgagaccgctggccggacccccaagctagcccgccaggcctccatagagctgcccagcatggctgtggccagtaccaagagtcggtgggagacgggtgaggtacaggctcagtctgcggccaagactccgtcctgcaaggatattgtggctggagacatgagcaagaaaagcctctgggagcagaagggaggctccaagacctcatcaacaattaagagcaccccatctgggaagaggtataagtttgtggccaccgggcatgggaagtatgagaaggtgcttgtggaagggggcccggctccctaggcgtcccatctcgcttcctgggtctgcaggtccagccggctggcaccctccatgtacccaggggagattccagccagacacccgccccccggccctggctaagaagttgcttcctgttgccagcatgacctaccctcgcctctttgatgccatccgctgccacctccttttgctcctggaccctttagcctctctgcccttccactctctgaccaccgcccccgccctccccacccagctccgcttcttgttacttgggggaggaaagaaactcctgatcattggccaaagggacttacccctggagaggccaagtgccttctaggaagttaggaggttgaggcacagcctgtgcagagagggtgggtcacccccccagatccaaggagaaactgcaggtcaagggctgataacggccatgcaggatgcttgatgctgcgtcccccgctgcttgccgccccccaccccgccattttgtataataaagctccctgtgtattctcaaaaaaaaaaaaaaaaaaaaaaaaaaaaaaaaaaaaaaaaaaaaaaaaaaaaaaaaaa

SEQ ID NO: 446 - DNA, 4217 bp, Homo sapiens
acatgcgcattgcgcccgcagccctggaccatttgtcaggactactcgtgagacggagaaaaaaaaaagagaaaatttggggaacccttaggagaaatcttgagagtggacagcaattgtgaagatcgccagagagttctgtgtttcatcaccgccgaaaggttaaaaaataaatcatgactgaatctgcctctagcacaagtggtcaagagtttgatgtgttcagtgttatggactggaaagatggagtgggcacgttaccaggaagtgacttaaagtttcgggtaaatgagtttggagccctggaagttattacagatgagaatgagatggaaaatgttaaaaaagcaactgctaccaccacttggatggtaccaactgctcaagaagccccgacctctcccccgagctccaggcccgtatttccacctgcctactggacatctccacctggatgtcccacagtcttttcagagaagactgggatgcctttcaggttgaaggatccagtgaaagtagaagggcttcagttctgtgagaactgttgtcagtatggcaacgtagatgagtgtctttctggaggaaactattgcagccagaattgtgctcggcacatcaaagataaagatcagaaggaagaaagggacgtagaagaagacaatgaggaagaagatcctaagtgtagtcggaagaaaaaaccaaaattatctctgaaagctgacaccaaggaggatggagaagagagagatgatgaaatggagaacaaacaagatgtaagaatcctgaggggttcgcagagagcacggaggaaaagacgaggggattcggctgtactaaagcagggtttgcctcctaaaggaaagaaagcgtggtgctgggcatcctacctggaagaggagaaagcggtggcagtgccggcgaagctgttcaaggagcatcaatcctttccatataacaaaaatggattcaaagttggcatgaaattagaaggcgtggatcctgagcatcagtctgtgtactgtgtcctcaccgtcgcggaggtttgtggataccggataaagcttcactttgatgggtattctgattgctatgacttctgggtgaatgcagacgctctggatatccacccagttgggtggtgtgagaaaaccggccacaaactccatcctccaaaagggtataaagaagaagaattcaattggcagacctatcttaagacatgtaaagctcaagctgctcctaagtcattatttgaaaatcagaatataacagtgatcccatcgggctttcgagttggtatgaagcttgaggcagtagacaaaaagaatccctcattcatctgtgttgctacggtaacagatatggtggacaatcgtttcctggtacattttgacaactgggatgagagctatgactattggtgtgaagcatcaagtccacatattcatccagttggttggtgtaaggaacatagaagaacccttattactccaccaggttatccaaatgtgaaacatttttcttgggataaatacttagaagaaaccaattctttacctgctcctgcaagagctttcaaagtgaaacctcctcatggattccagaaaaaaatgaagcttgaggttgtagacaaaaggaaccctatgtttattagagtagcaactgtggcagacacagatgatcaccgggtaaaagttcactttgatggctggaacaattgctatgattactggatagatgcagattctcctgatattcaccctgtaggctggtgttcaaaaacaggacatccccttcagcctcctttgagccccttagaattaatggaagcttcagaacatggtggatgctcaaccccgggatgtaaagggattggccatttcaagagagcgagacatctgggccctcacagtgctgccaactgtccctattcagaaatcaatttgaataaagaccgtatttttccagaccgcttaagtggtgagatgcctccggctagtccgtcatttccaagaaataaaaggacagatgcaaatgaaagctcttcttcccctgaaatcagagaccagcatgctgatgatgtcaaagaagactttgaagagagaacagaaagtgaaatgagaacatcacatgaagccagaggtgcccgggaagaacccaccgtccagcaggcacagcgtcggtcagctgtctttctgtcctttaagtccccaattccatgtctgcccttgcgctgggagcagcaaagcaaacttcttccaactgtcgcaggaatccctgccagtaaagtttccaaatggagcacagacgaggtgtcagaatttatacagagcttacctgggtgtgaagaacatggaaaggtatttaaagatgaacaaattgatggagaagcatttctacttatgactcaaacagacattgttaaaattatgagcattaaactgggccctgctctcaaaattttcaattccatcctgatgttcaaagctgcagagaagaattctcacaatgaactttgaagatggtgaattctgaataccatcagcattctgctttaaagctcatgttttattcaaagcacaaggacggttataactcctaagtgagaagtctccaaaactcaaaagagcaacactatcggattatttatattactcaagagacaatatatatgaattcttatgaaagtgcttgagcttttaaccaggtactgtctaacaacagtcatcttttggttctgttcactgagctaaatttatctttgtaaatctttttgagtctggggggtggggggaaggggggcttcattaattatttatggtaatggggggcagagtaagaacttttggcattttgtaaacattgttgaattctctttcatgtacactgtttctttttcaatactttcagaaacctttttatataatcaaatttcaatttaaaccaaattagtcgaaacctggctaagtttagccagtaggactgttatctgtattgttaattttgtgccatattttgaattgcaacattatgctaagtataactttgcaagtcatgatattgcctaactgcttgtcataattgtcagggctgaatagttgtaagaatgacttttctttgaatcagtatttttccttttgcacgcattatgaaatgttaaacaaattacttttcaccagcatctttactataattaccaaaaacatgtatataaaagaatgaaattgaaaaataaaatatataaacataaataaattaggtagtgtattttgagtggcatcagtctcactcatcttggtgccccggtgtttacaagagccagatggtgtcagaggagtacgcagttgtatgcagttatggttggggggaatgtttgtgagggtcttgaactatttatgagatgatcttgagcttctaattttcattgatgaaattgtggtggtttacagagactaagagctcattctgtcaacagaaacactaatctgtacagagcgctgtctcaggtcatgcattgtcctccaaacccaaaggtttttttcagggttggctagagagcgagtattgtgattttgctgaaaagacaaggtgtgaaggagcaacttcagttgacacaaaatttgaaatgctcacagatcagggaggtgatttcccaaagtaattgcccaagaacctccgttttggaaggattcctttttctgtagaatactttgcctcgatatataagcatacagatgcactttaaatgaaaacccttgattataaattgatagctggtagtgtttcttttgcaagaatgcatttctaaggcaaaaggtaaattattttgtccgtcttttgatgtactttctgattccaggattggatatttattcaaggactattttaaaaatagaaagtaagtttgtagcatgctgtctgaattctggggtaagttccacctcttctttagttgctttcgttttttatgatgtaggacttcctttgatatccctgttggaagtccattagcagtcctttgcatttgccaattcaaggtaaaacagggtcagtgacatctgcagtgtcccagtcatttatttgcatgaatctgcttaaataagttttttgttgctgttttttcttttttatgttttgttcagaatttgtacattcaagttgtacttgttatatctgacatgaatgaaataaaatcttaattacagatgctttttaaa

SEQ ID NO: 447 - DNA, 5239 bp, Homo sapiens
ggatccggattcggattagcagcccgggaagagtgccgtggcacaggcgccggagggagcgcgaccctcggaccccgcctggcccgcggggctgggacccggccccggcctgcccgatggggcgcgcggccccggagatgcgccctcgcccggccccgcgcccccggccccgcgcccccggcccgcccgccccggcccgcgcctccgcctgagtcccccgcgccttggcccgccaccccccgccccgcgcccccggcccgcctgcgccatggagcccggccgcggcggcacagagaccgtgggcaagttcgagttctcccgcaaggacctgatcggccacggcgccttcgcggtggtcttcaagggccgccaccgcgagaagcacgatttggaggtcgccgtcaagtgcattaacaagaagaacctcgccaagtctcagacgctgctggggaaggaaatcaaaatcctgaaggaactgaaacatgaaaacatcgtggccctgtacgacttccaggaaatggctaattctgtctacctggttatggagtactgcaacggtggggacctggccgactacctgcacgccatgcgcacgctgagcgaggacaccatcaggctcttcctgcagcagatcgcgggcgccatgcggcttctgcacagcaaaggcatcatccaccgcgacctgaaaccgcagaacatcctgctgtccaaccccgccggccgccgcgccaaccccaacagcatccgcgtcaagatcgctgacttcggcttcgcgcggtacctccagagcaacatgatggcggccacactctgcggctcccccatgtacatggcccccgaggtcatcatgtcccagcactacgacgggaaggcggacctgtggagcatcggcaccatcgtctaccagtgcctgacggggaaggcgcccttccaggccagcagcccccaggacctgcgcctgttctacgagaagaacaagacgttggtccccaccatcccccgggagacctcggccccgctgcggcagctgctcctggccctactgcaacgcaaccacaaggaccgcatggacttcgatgagttttttcatcaccctttcctcgatgccagcccctcggtcaggaaatccccacccgtgcctgtgccctcgtacccaagctcggggtccggcagcagctccagcagcagctccacctcccacctggcctccccgccgtccctgggcgagatgcagcagctgcagaagaccctggcctccccggctgacaccgctggcttcctgcacagctcccgggactctggtggcagcaaggactcttcctgtgacacagacgacttcgtcatggtccccgcgcagtttccaggtgacctggtggctgaggcgcccagtgccaaacccccgccagacagcctgatgtgcagtgggagctcactggtggcctctgcgggcttggagagccacggccggaccccatctccatccccaccctgcagcagctcccccagtccctcaggccgggctggcccgttctccagcagcaggtgcggcgcctctgtccccatcccagtccccacgcaggtgcagaactaccagcgcattgagcgaaacctgcagtcacccacccagttccaaacacctcggtcctctgccatccgcaggtcaggcagcaccagccccctgggctttgcaagggccagcccctcgccccctgcccacgctgagcatggaggcgtcctggccaggaagatgtctctgggtggaggccggccctacacgccatctcctcaagttggaaccatccctgagcggccaggctggagcgggacgccctccccacagggagctgagatgcggggtggcaggtcccctcgtccaggctcctctgcacccgagcactctccccgcacttccgggctgggctgccgcctgcacagcgcccccaacctgtctgacttgcacgtcgtccgccccaagctgcccaaaccccccacggaccccctgggagctgtgttcagcccaccacaggccagccctccccagccgtcccacggcctgcagtcctgccggaacctgcggggctcacccaagctgcccgacttcctgcagcgaaaccccctgccccccatcctgggctcccccaccaaggctgtgccctcctttgacttcccgaagacccccagctcccagaacctgctggccctcctagcccggcagggcgtggtgatgacgccccctcgaaaccggacgctgcccgacctctcggaggtgggacccttccatggtcagccgttgggccctggcctgcggccaggcgaggaccccaagggcccctttggccggtctttcagcaccagccgcctcactgacctgctccttaaggcggcgtttgggacacaagccccggacccgggcagcacggagagcctgcaggagaagcccatggagatcgcaccctcagctggctttggagggagcctgcacccaggagcccgtgctgggggcaccagcagcccttccccggtggtcttcaccgtgggctctcccccgagcgggagcacgcccccccagggcccccgcaccaggatgttctcagcgggccccactggctctgccagctcttctgcccgccacctggtgcctgggccctgcagcgaggccccagcccctgagctccctgctccaggacacggctgcagctttgccgaccccattgctgcgaacctggagggggctgtgaccttcgaggcccccgacctccctgaggagaccctcatggagcaagagcacacggagatcctgcgtggcctgcgcttcacgctgctgttcgtgcagcacgtcctggagatcgcagccctgaagggcagcgccagtgaggcggcggggggccctgagtaccagctgcaggagagtgtggtggccgaccagatcagcctgctgagccgagaatggggcttcgcggaacagctggtgctgtacctgaaggtggccgagctactgtcctccggcctgcaaagtgccatcgaccagatccgggccggcaagctctgcctgtcgtccactgtgaagcaggtggtgcgcaggctgaatgagctgtacaaggccagcgtggtgtcctgccagggcctgagcctgcggctgcagcgcttcttcctggacaagcagcggctcctggaccgcattcacagcatcactgccgagaggctcatcttcagccacgctgtgcagatggtgcagtcggctgccctggacgagatgttccagcaccgtgagggctgcgtcccacgctaccacaaggccctgctgctcctggaggggctgcagcacatgctctcggaccaggccgacatcgagaacgtcaccaagtgcaagctgtgcattgagcggagactctcggcgctgctgactggcatctgtgcctgacctttctggcctggctgggccccccgtcctgccgagccctgcagagtgggctctgtgtgctggctggactcctcgggacaagcccatggcgctgatcgctggtgctgagccctgccctgggccccacggacagtcagcctgccggcctccctgcagctcacggggcagaaccagcacatctggagccacacagcttggggggtgtctcccatcttttacaggtggggatcacagaatttctgcccctccagctgcctggctcagcaggcgtgggtgccaccaccctctagccccagggcagccccggaggacaggcaagggcctgagaccactgccgactcaaagccaaagcgagctcctgcttagggcaggtcagcaggcactgtgcccaggaagagcctgcggcctcggcgtcccccagtctccaggagcctctccctccgagatacccacccagctttgtcaatcacccaagcactttatgcatatagagacagaacctggacctcaccagggactgctgggcagcgattcctggcagtggcctggtgtttgtacatacacatatgcagacacatgccagggccccccaagcccgagcaccggaccacgttgctgcccaggtctggacctcagcgggagaactggctccggggggagtggggccctgcgctagaggcagaggcagttctttgttcaagcgttcctctggggaccggcagcagaggcaccgtgttctctcagccctggatacgtcttgtaatctttcacactttattcctaaaacgtgtcttatttttatgcagctcattttttctttaaaggagaaaacttgtaggtgtttaagaattggttttgggagggcgaggactgggccaggttagaggcagatggcacaggggcgtgtggcgggcgggtgaggctgctttgcacacctgtgttggtggctgtcccctgccgcccctccctgtggcagcagcaggacaggtgtgtgcccagcaccctccctacctgggcctggaagcagatgaggggaatacttcatgcaaagaaaaaagtaacatgtgcaaaagctccccgtccagctttgacagtcagttttgatgtcagctcctcggcagggtaggcctgatgacagccctgtccctccctgcctctgccttgcccaaggccacggagggcatctgcagagaggcctgccttccggattccaggcgggcatgccctgcaaaccccgcctgggcctcccttggtctgcccagccctcggttagccctgcctgaatcagtagatacttgaacgagtccccagtctgcgggaggcagtggtggggccatggacccatgcggggggttccagggtcacacgccacataacagacaaaaatacacacacgtgtgtttttctttgcaatacttgaaatattgccactgtgcttggacttagaagaagaaaatccccgtgacttcttcctcatcaccttgatggctttattctcaccttgtggggcatgtttgtatttattgcttcatggccgactggaatcctgagtcctgggaagctggcactgcggggatcttgcccggtgtcctggtcctcttgcttccgtcgcggccgcatgtgcgtgtgtccaagcaggtcctgggcgcctcaactgctgcccctggttgaatgttctcttgatagtgctggaccctttgtctattttaaagcgaattttgtgtgatttcctgccctttgcgttatattgtataataccaacgtaaggaaataaacctttggaattgttgggctggtgtcaaaaaaaaaaaaaaaaaa

SEQ ID NO: 448 - DNA, 1351 bp, Homo sapiens
ctcttgcggagacgcgcgcgtcggggtttaacgcgtttctgggccgccgtaagcccggcctaggggcagctttgactcgagagccggctataggcgcatggaaggttccctggaacgggaggcgccagcgggggcgctggccgccgtgctaaagcacagctcgacgttgccgcccgaaagcacccaggtccggggctacgacttcaaccgcggtgtgaattaccgcgcactgctggaggccttcggcaccaccggcttccaagcaaccaacttcgggcgcgctgtacagcaagtcaatgccatgatcgagaagaagctggaaccactgtcacaggatgaagaccagcacgcggacctgacccagagccgccgcccacttaccagctgcaccattttcctgggatatacatccaacctcatcagttcaggcatccgtgagaccattcgctaccttgtgcagcacaacatggtggacgtattggtgaccacagctggcggcgtggaggaagacctcatcaagtgcctggcgcccacatacttgggcgagtttagcctcagggggaaggagctccgggagaacgggatcaataggatcggaaacctgctggtgcccaatgagaattactgcaagtttgaggactggctgatgcccattctggaccagatggtgatggagcagaacacagagggtgtaaagtggacgccttctaagatgatcgcccggctgggcaaggagatcaacaacccagagtccgtgtattactgggcccagaagaaccacatccctgtgtttagtcccgcacttacagacggctcgctgggcgacatgatcttcttccattcctacaagaacccgggcctggtcctggacatcgttgaggacctgaggctcatcaacacacaggccatctttgccaagtgcactgggatgatcattctgggcgggggcgtggtcaagcaccacattgccaatgccaacctcatgcggaacggggccgactacgctgtttacatcaacacagcccaggagtttgatggctctgactcaggtgcccgaccagacgaggctgtctcctggggcaagatccgggtggatgcacagcccgtcaaggtctatgctgacgcctccctggtcttccccctgcttgtggctgaaacctttgcccagaagatggatgccttcatgcatgagaagaacgaggactgagcggctgcggtcccaggaaggtcttaccccctcttctatttattaatttgcagacccagcccctcccctactttttggtcagctacgtctctagaataagatggtatctgaagtccttaaaaaaaaaaaaaaaaaaaaaaaaaa

SEQ ID NO: 449 - DNA, 2165 bp, Homo sapiens
gtggcccccaccccttccctcctccatttccatccattccgcgatcgcggcggaccccaccgtcatcgcgcgccgtgagtcacactccacagccaatccctggccacatccgggctcgcccccgccccgcccccttgttcccgcaagcccggaactgcccaaatcccgcccctcccctcccaaaaaaacacccctcatccagtctcttccagcctagagatcctggcctacccctccgccaaagcgcgcactgagtgcaaaccccagagtcaatccctgtcccggctccgccccccgcgtccgaatcccgcccagccgggccctcaagcccagtcgggactcgagcctagggaggcgaggttcccgcaccggatagcatgtttttggcccagaggagcctctgctctcttagcggtagagcaaaattcctgaagacaatttcttcttccaaaatcctcggattctctacttctgctaaaatgtcactgaaattcacaaatgcaaaacggattgaaggacttgatagtaatgtgtggattgaatttaccaaattggctgcagacccttctgttgtgaatcttggccaaggctttccagatatatcccctcctacatatgtaaaagaagaattatcaaagattgcagcaatcgatagcctgaatcagtatacacgaggctttggccatccatcacttgtgaaagctctgtcctatctgtatgaaaagctttatcaaaagcaaattgattcaaataaagaaatccttgtgacagtaggagcatatggatctctttttaacaccattcaagcattaattgatgagggagatgaagtcatactaatagtgcctttctatgactgctatgagcccatggtgagaatggctggagcaacacctgtttttattcccctgagatctaaacctgtttatggaaaaagatggtctagttctgactggacattagatcctcaagaactggaaagtaaatttaattccaaaaccaaagctattatactaaatactccacataacccacttggcaaggtgtataacagagaggaactgcaagtaattgctgacctttgcatcaaatatgacacactctgcatcagcgatgaggtttatgaatggcttgtatattctggaaataagcacttaaaaatagctacttttccaggtatgtgggagagaacaataacaataggaagtgctggaaagactttcagtgtaactggctggaagcttggctggtccattggtccaaatcatttgataaaacatttacagacagttcaacaaaacacgatttatacttgtgcaactcctttacaggaagccttggctcaagctttctggattgacatcaagcgcatggatgacccagaatgttactttaattctttgccaaaagagttagaagtaaaaagagatcggatggtacgtttacttgaaagtgttggcctaaaacccatagttcctgatggaggatacttcatcatcgctgatgtgtctttgctagatccagacctctctgatatgaagaataatgagccttatgactataagtttgtgaaatggatgactaaacataagaaactatcagccatccccgtttcagcattctgtaactcagagactaaatcacagtttgagaagtttgtgcgtttttgcttcattaaaaaagacagcacactggatgctgctgaagaaatcatcaaggcatggagtgtacagaagtcttgatttgtgcagaatggattaatgtttctgttagatgacctagtatggaattgttacttagtgctgccacctgctggatgttaaaaggtatttcagtacaactggaatttaaatatttccattgtttttccaaagcagttaacccaactcctaacaacattttcgggggatctgaccttttttttccagttgaaatgtattaacacaccttccacaatcattttataagagtcagcataacatagtggataagaaatgtgagatgtttaacctctcagtaactcggttctctcattataaaataggaataaaatcagtacctgtttcatatgaaggtcgtttctgagaattaaatggactaatgtatgcaaaaagcctggcaaacaataaacactcatctgactttagccggtaaaaaaaaaaaaa

SEQ ID NO: 450 - DNA, 5282 bp, Homo sapiens
ctcatttccaaggtcccctgaagtgctggctcacctctgtttcccaaagcacttgcttgcttgtctctcctccctccccagcatccttttcactttcttcccttataacttcttgcactctgtgtgcgtgtgtgtgtatgcgtgtgtgcatgtgcgtttcttctttttttttatcctaacgaatttgttttgcaggttttgaaaaggaaaaaccagcgttatccaggattgttaaattaattcttatctgtttccacatcttggaccgtgatctctgtggttttaaaatcccatattttgagtgggttccgctgttgtttaagaaaagttgctttaaacctttgctctgcaagcacccgaagagaactcataaaaaggaagacaacagcagatgcaatcgcggatgtggcttagtccttgcagctgccccagagtgctgtttggagtgtaccgtcctcagtaatgaatccagaagaacaaatcgtgacatggcttatatctttgggagttttagagtcccctaaaaagaccatctgtgatccggaggagtttttaaagtcctcgctgaaaaatggggtagttctgtgcaaactgatcaacagactcatgcctggctctgtggaaaagttttgtctggatccccaaactgaagctgactgcatcaacaacatcaatgacttcctgaaaggatgtgcaaccctccaagtggaaatatttgatcctgatgacctttattcaggggtcaatttctccaaggtactgagtactcttttagctgtcaacaaagcaacagaagatcagctatcagaaagaccatgtggacgttcctcttctcttagtgctgctaatacttctcagacaaacccacagggagcagtttctagcacagtttcagggctgcaaaggcagtcaaagacagtggagatgacggaaaatggaagtcatcagttgatagtaaaagcaagattcaactttaagcagactaatgaggatgaactgtcagtttgtaagggggacatcatttacgtcacacgagttgaagaaggaggctggtgggaaggcacattaaatgggagaacaggctggttccccagtaattatgtccgtgaaattaaatccagtgagagacctctctccccaaaagccgtcaaaggatttgaaactgctccacttaccaagaattattatactgtggtgttacagaacatcctggacactgaaaaagaatatgctaaagaacttcagtctcttcttgttacttacttaagacccctgcagtccaataacaatctgagtactgtggaggttacatctttactgggaaacttcgaggaagtatgcacatttcaacagacactctgccaagccttggaagaatgttcaaagtttccagaaaaccagcacaaagtaggaggttgtctactgagtctcatgcctcattttaaatctatgtatctggcttactgtgcaaaccatccttcagctgtaaatgtgctcactcagcacagtgatgagttggaacaattcatggaaaatcaaggtgcatcgagcccaggtatcctcattttaacaacaaacctcagcaaaccattcatgcgactggagaaatatgttactctcttgcaagagttagaacggcatatggaggatactcatccagatcatcaggatattctgaaagcaatcgtagcattcaaaactctcatggggcaatgtcaagatctgaggaagagaaaacagctggagttacagatactgtccgaacctattcaggcatgggaaggagaagatattaaaaacttgggaaatgtgatttttatgtcacaagtaatggtgcagtatggagcatgtgaggaaaaagaggagcggtaccttatgttattttcaaatgtcctgataatgttatctgcaagtcctcggatgagtggctttatctatcagggaaaaataccaatagcaggaacggtggtgactagattagatgaaattgaagggaatgactgcacatttgaaatcactggtaacacagtggagagaattgtggtccattgtaacaacaaccaggacttccaggaatggttggagcagctgaacagactgatcagaggacctgcctcttgcagttcattatccaaaacctcatcgtcatcatgtagtgctcattcttcttttagctctaccggacagccccgaggacccttggagcctcctcaaattataaaaccgtggagtttaagttgtctacgacctgcacctccacttagaccatcagcagcactaggttataaagagaggatgtcttatatcttaaaggagtctagtaaaagccctaaaacgatgaagaaatttcttcataaaaggaagactgagagaaaaccatcggaggaggaatatgtgattaggaaaagtacagctgctctggaagaggatgctcaaatccttaaagtgatcgaagcctactgcaccagcgcaaattttcaacaaggccatggctcaagtactcgaaaagattccattccacaagtcctactccctgaggaagagaaactcatcattgaagaaaccagaagcaacggccagaccatcatggaagaaaagagccttgttgatactgtttacgccttgaaggacgaggtcagagaactgaagcaggaaaataaaagaatgaagcaatgcctggaagaagaactgaaatcaagaagggacctagaaaagctggtgcggaggcttttgaagcaaacagatgagtgtattcgaggcgagtccagtagcaagacctcaattcttccataaccatcactgtgccactgggtggagtgtgccttcagggcatcttgaaatgtcccgctgaatgatttgactcagtttgctcacttctttggcttttgttttgtgtttgagtctctctctctctctccctctctcttctctttctctccccgctgtgtgcatatgtgtgtgcgtgcacgtgcgcgcttgggcatttgctgttgtttggttattggttggttgttcattttttttttcaacaggtgaaaaagcaggaagtggtggtagagatggcctcagagtcttttccattcagtaagaaagagaaagggaatgcaggccagttacttaaaaggtcttcagattgccttcagttcacagtgcctctgcaacagccattgccctcaggtcacattctttgggctggctgcccttgcaaagcagctggccaaggcttattaaatgtgaacccaacttttccccagggctttcctgtacctgcaagcctcttagtacttaatttaccgaaggcaaatcttccagactatggcttgagtaggatgaaagacaaacacatctgcccaatgatccagctgcccttccttagaccatcacatgcctcccctcaatcacaggttttaaaattactgccctatgttgtctataagaccaagaaaactgtagtacccttattccttttgtgtcatgtaaattgtaactcaggggggcagaagctctggtcacccacaccaacaccaaatccatcagcaaattctactggacaatcctcccttttagtagcagagttgaccgccttttcccattgcatgataggtttctttccctcattctgcctagtgtgtaagttttctatttccccagtacttttagccaaccttaccaagtggtgtgtaaactagtatgtatgtgctttgcttactttttaaaaaaatgtagttagactgtgaggagttactttatgtacgttgcatattcaaactgtgatgttttatccttcaaaacaatctgcattaagaagatattgtgccctactagacagctttcattcactttattactctctcatatatgctgtgagaagttgtaatattaattggcctctttgggtgggactctaagcagtatttgcagaaatatgcttctggtccaacttgtacatccagaacaaaagggcccctctagtagctgtgtgctggattattcaggactgattaactcaagttgctcattgaatcacatcatccactttatcccagaaactagaactgtgagaaaccaggtttagaagacagtcacagaacagcacacatccaaattcagcgccattgaaagttggcctaaggctcagtgccactcacccctccctccccaaaagacaagagaaatttggccagatggggaaggtcactggaaattgaggccaaagggctgatcagaattgcctttataatatatttgatggatgcctataaatgtgggttttgcaaatattgtttaaaaaccaaacttgaagccaggcatggtggcccacacctgtggtcccagctactcaggaggctgaggtgggaggatcatttgagcccaggaggtcaaggctgcagtgagctgtgatgacaccactgcactccaacctaggtaacagagagacacctctgtctctgaaaaaacaaaacttgaagtttgaaacccccagcttgctgaggagccctttttatttttggtactgagagtctcaaggtcccatagctacatggtacagggctgttgtctgcttgctgcacagcagaaattacaccatccacaggaaatggactatttttgcagtccaacatcagccaaccacacacagccgtgtttggaagctgaagagtaaagaaatttctaggaatggctgttgttctgttttttagcacagccatttagatataacatccttcacttaaaaattaaaaacatcagtactaccaccaccaccaacaacatcaacacagatcttcacatctgcccattctgtggttagtcaatggcttgcaataaatgtgcaaactgcatctataggaaacatttttgtgattacggaatactttagttgattgctgaaaatattgaaaggtcttcattttacagtgatgagtacatatgcatgtttcggggacttggcccttctgatgaggggccctcggtactctggataacgaagcttgtgcagagtggtaaccatgcttacacactaaactataatataaaggaaatgaagccatgttaatctgagagcagtgtcgccatagttgtgttgtttacaatactctataaatgggttcctgttgccctgtaattaaactgctgcccgtagaggcctttcagttccttttctgtccttccccttcttaacacaagctcaaattttctaacttgtttttattttgaagacttttaaaatggacattttcaatacataaaaataaacagtgctttataaaaaaaaaaaaaaa

SEQ ID NO: 451 - DNA, 4838 bp, Homo sapiens
cgggcgcgggcggccgagcggagccgagcgcagccgagccgggccgagccgggccgggccgggcccaggagcgcgcggatgatgcgggcggccaggcgggggtcgacgggtccctgaagcccgcgccccgggccagcaagggagccccgcgcaggccgcgcgcatccggaggcggccgggccccgccatggccggggtcagctacgcggcgccctggtgggtgagcctcctgcaccggctgccccacttcgacctgagctgggaggccactagcagccagttccggcccgaggacaccgactaccagcaggccctgctgctcctgggggccgccgccctggcctgcctcgccctggacctcctcttcctgctcttctactccttctggctgtgctgccggcggcgcaagagcgaggagcacctggacgccgactgctgctgcacggcctggtgtgtcatcatcgccacgctggtgtgcagcgccggcatcgcagtgggattctacggcaacggggagaccagtgatggcatccatagggccacctactcgctccgccacgccaaccgcacggtggccggggtccaggaccgcgtgtgggacacggcggtggggctgaaccacacggcggagcccagcctgcagaccctggagcggcagctggccgggcggcccgagcccctgcgagccgtacagaggctgcagggcctgctggagacgctgctgggctacacggccgccatccccttttggaggaacacggcggtgtcgctggaggtgctggcggagcaggtggatctctacgactggtacaggtggctgggctacctgggcctgctgctgctggacgtcatcatctgcctcctggtgctggttggcctcatccgcagctccaagggcatcctggtgggggtctgcctgctgggagtcctggccctggtcatcagctggggcgcgctgggcttggagctggctgtgtccgtgggctccagcgacttctgtgtggaccctgacgcctacgtgaccaaaatggtggaggagtactcggtgctgagtggggacatcctgcagtactacctggcctgctcgccccgcgccgccaaccccttccagcagaagctgtcgggcagccacaaggcactggtggagatgcaggatgtcgtggctgagcttctgaggaccgtcccctgggagcagccggccactaaggaccccctcctccgcgtccaggaggtgctgaatggcacggaggtgaacctgcagcacctcaccgccctggtggactgccgcagcctgcatctggactacgtgcaagcgctgaccggcttctgctatgacggcgtggagggcctcatctacctggccctcttctccttcgtcacagccctcatgttcagctccatcgtctgcagcgtcccgcacacctggcagcaaaagagaggccctgatgaggacggggaggaggaggccgctccagggccgcggcaggcgcacgacagcctctaccgcgtccacatgcccagcctgtacagctgtggcagcagctacggcagtgagaccagcatcccggccgcggcccacaccgtcagcaacgccccggtcactgagtacatgagccagaacgctaatttccagaacccccgctgtgagaacaccccactcattgggcgcgagtccccgccgccctcatacacctccagcatgagagccaaatacctcgccacgagccagcctcgccctgactccagcggcagccactagaccgcgcccggcagccacccaccccacgtgccaacttcccctccccgtgccagcactgccgcttccacctgggccacccaccggaccctcgcacgccgtgccaggcctgccccagacgcgtctgcaggccgcttgccctcctgtcccctccccgcaggggcacagtggagacgcaggggctctgggcccgtaccgccaactcgggtcacacctgaacgctgctgccagccgatgccccagccctgcacgccacccactatcccggcacgctccctctgcagatggtcgccgcacctacaagccctggccgcacccaacctgtgttgttgccgcccggcccttccctccacagctctccttcctcccgcccggcacttctgtggaccccttcttagttcacaggcacggctggggccgctctgtgctggcgcctgctggccactgagggacagggacacgtgccacctgctcatctctgccctgaggtcaccccgtggtccctccacgtgcccatctctctgcagtgccctcctcgcctgtgcagcccgcccacccacaggctcacccctcctgccggctgccagaggccccctccagcagggcctctctccgttgccccagcttcactctctccctcagcacctgccctgctggaggccccagccctccgtggacagcaggggccacgtggagcccgggccgctcacccgccacccagtgctggccgccttcttggtgccaaacccccttcccccacccagagactgggcagctgtgtctggttcgttctttgcactaaccacatttgtcatctctagggcaggctggggctgcgggctgagggggaccgctggcaccccccttccctcccttcttggttccatttccatccatgacaggtacagcatcccaggagcccggcctgaggggctggacccgagccggctgtgaacatccctcagcccctgctgtccccccttgggactaaccactaacctcacccccaaactccacgggtgcccctagctggcccagagccggcagtgtgagcccaagtccgggctggagccgaggccggagcagctgtctgggagtcaaggctgcagtagcgtttcttcatggggtgctccagggggtgccacagaccgacaggcagcccaagggcctggacacccctccccaggcaggtgctgccccaggaggactgtcctcgggaatgaacctcccgcgggctttggactgaggtccctgtggcctcggtctcctccccatgaagtgggagcgaggctccccaatggtgcttttggctttagtgtacgatgtttgctgtgcttcccgccgtggagggcagagccaccccacatcaggatcggacgtgctacccctcccggtcccggccctggcccagccagcccagccctcgaggctcgatgcctgtgccaaggccaggggcagccagagggcagctggatggccacgtgcaggggtcaaggctgggccctgcagtggggcgggccgccagccccagcagtttacagacgcatggctcttcctcccagagcagccggcagctacctggaccggaaatgtcctcatcccctccctggggccaggctctgccctggccttcctctgtgaacccctcctttctttgtgctggtgtctgggaccaaaaagggggaatatgggagggcagagtggggaggggagtccatgggcctggggccccaagccggggcgtctgagctccccaggcatgaccaaacctcagtggaggggcctctgcttcaggccccgcctggctgacattctgagcccccctcggaggccccgccacagccaacctgcccagtctttcctctgggcttgacccgccaggggagttctccaggcctagggccaggagagaggccctggcaccctggcgtgggtgcccgccaaacgccctgcgaccgctcagaagcacaaatgctgtccatggccgtgaggctgcctgccaggtgaatggacatagcgtgagaggcggtgaggccagggcttccagcctcgtgctgtctcgggactcctgaccgtggtgtgcgtgtgtgcccgtctgtgactttctactcaccaaggttgaagaaaggaaacggggaaaatcaaaaggggttcaaaccccacctcagtaggtggaggggagcgcctgccattggttgtatttttgttctgagttttcggtgccgtgttcctaactactccatcccatgacctcgccacacctactggggcatctggctggtgcctgctgccatggccagcccccactctcaccctgcacagggggtcttgcagcccccaggcccacagcctcgttgggaggacagggtggccctggggacaagagggaggagcccaggggcttacctcactgagagtgctccccagcaggcatccactaccccagggccccccacatgtcatggcaaggttggtagtgaatgggcctggttgggagcagcccctggcccattgcccacccacccatctcactatgcaattcgagttccaagcaacatttgctcctgccctggggccagctctgccccagccctgagaggggtggtgaggcagccccctggaccccagaaccccagacaagggggcaggcgggggaccagggcctctcctgtgggatctttgttttgtgtttaaccataatggttgtgtactgaaccacttcatatttgttatatataatatatatatatataatctccttaagactcagcctcctggtttacccccccggcctgggcatctgacctcccccaccccagtgtgatttaacatccaggaactgaggcctgaaccattttgcatttccccctcctccagcctctgtagggccatggctgtatgtactgtcgctgtgtttttttgtttttttagaactgggtttgggggctgatttttatttctttgggggctttttttcttggcaaatactaaaaatctcgtcaatgtaatttctgtggtttctattcagcttgggtttcatgttttaaaataaattttaaaaagcaaaaaaaaaaaaaaaaaa

SEQ ID NO: 452 - DNA, 3264 bp, Homo sapiens
gggcgtcagcgagccgtgagatgcgtggtccaccatcggtgacctcaccgcctcggttcgccctcagccgccccgattggccatctgcaagcttcccttctccgtggagagcaggaagacagtcatgggacctcagggagccaggagacaggctttcttggcatttggggatgtcactgtggatttcacccagaaggaatggaggctgctgagccctgctcagagggccctgtacagggaggtgacactggagaactacagccacctggtctcactaggaattctccattctaaaccagaactcatcaggcggctagagcaaggggaagtgccctggggagaagagagaagacgccggccaggcccctgtgcaggaatatatgcagaacatgtcctgcggcccaagaatcttggacttgcacatcagaggcaacagcaactacaattttctgatcaaagcttccagagtgacacagctgaaggtcaagagaaagaaaaaagcactaagcccatggcattttccagcccacccctaagacatgcagtaagctcaaggaggaggaacagtgtagtggaaatagagtctagtcaaggccagagggaaaatcctacagaaatagacaaagtattgaaaggaatagaaaattcaagatggggagcattcaagtgtgcagagcgtgggcaagacttcagccggaagatgatggtaatcatacacaaaaaagcacattccaggcagaaactttttacatgcagggagtgtcaccagggctttagagatgagtcagcattgctcttgcaccagaacacacacacaggagagaagtcctatgtgtgcagtgtgtgtgggcgaggcttcagcctcaaggccaacctcctcagacaccagaggacacactcaggagagaagccttttctgtgcaaggtgtgtggacgaggctataccagtaagtcatacctcactgtgcatgagagaacacacacaggagagaagccttatgaatgccaggagtgtgggcgaaggtttaacgataagtcctcatacaacaagcacttgaaggcgcattcaggggagaagccttttgtgtgcaaggagtgtgggcgaggctatactaataagtcatacttcgttgtgcacaagagaatacactcaggagagaagccttacagatgccaggagtgtggccgaggctttagcaataagtcacaccttatcacacaccagaggacacactcaggggagaagccctttgcgtgcaggcagtgtaagcaaagttttagcgtgaaaggaagtctcctcagacaccagagaacacactcaggggagaagccttttgtgtgcaaggattgtgagcgaagctttagccaaaagtcaactcttgtctaccaccagagaacacactcaggggagaaaccttttgtttgtagagaatgtgggcaaggatttattcagaagtcaacccttgtgaaacatcagatcacacactcagaggagaagccttttgtgtgcaaggactgtggacgaggctttatccaaaagtcaaccttcactttacaccagaggacacactcagaggagaagccttatggatgtcgggagtgtgggcgaaggtttcgggataagtcctcctataacaagcacctgagggcacacttgggtgagaaacgttttttctgcagggattgtgggcgaggctttaccttgaagccaaatctcaccatacatcagaggacacactcaggagagaagcccttcatgtgcaagcagtgtgagaaaagttttagtttgaaggcaaatcttcttagacatcagtggacacactcgggggaaaggccatttaattgcaaggattgcgggcgaggcttcatcctaaaatcaactctcctcttccaccagaagacacactcaggggagaagcctttcatctgtagtgaatgtgggcaaggatttatctggaagtcaaatcttgtgaaacaccagcttgcacattctggcaagcagccttttgtatgcaaggagtgtgggcgaggcttcaactggaagggaaatctcctcacacaccagaggacacactcaggggagaagcccttcgtgtgtaatgtgtgtgggcaaggcttcagctggaagagaagtctcaccagacaccactggcggatacactcaaaggagaagccttttgtttgccaggagtgtaagcgaggctataccagtaagtcagacctcactgtgcatgaaagaatacacacaggagagaggccttatgaatgccaagagtgtggacgaaagtttagcaataagtcatactacagtaagcacttaaagagacacttacgtgagaagcgtttttgtacagggagtgtgggtgaggcttcatcttgaagttatatctcaccatccatcagaggacacactcaggagagtaactttgctttgttacaagctttagttgaggctgcataacttgttcgtgaagatataacagaggcagacagaatccagagggctacagagaacctgaattcaacccatgtgtccccaagagattcagagaaaagaggtcaatgtttagggaacagagatgccagttgaggggagggcattacctgggctattggggaaatgtggtctctttcctactgagcacatattcttgttgtatttgtgccaggctgtgctttctaaggactgctcttagccagtgactgcagagcagggataccaaggcaggcctgttacactctccccaacctccttggactgcaaacaatctaggacacctccaccaaacctcctcttgcactttccctctggcttccctcccagccttccttggtttggatgttttgtcccctccttaatttatgttgaaactctacataaactgtttactgttgaaacagtgtaagtattaggaggtgggacctttgggaagtgattaagtcaagtcacgaagatagagctttgcgaatgggatcaggtgcccttatgaaaaggcttgatagagggagtttgtcctgtggcccttctattttctgctctgtgaggacacaatgctcctcccttccaaaagatgcagcatgaaggcatcatcttggaaacagacatgagccctcaacagacaactgcacctactgatgttttgatgttgaacttcccagcctccagaactctgggaaaataaagtcctctttatacaaaaaaaaaaaaaaaaaaaaaaaaaaaaaaaaaaaaaaaaaaaaaaaaaaaaaaaaaaaaaaaaaaaa

SEQ ID NO: 453 - DNA, 5442 bp, Homo sapiens
taatagtcacatgacacgtttcccgtcaagatggcggatactctcccttcggagtttgatgtgatcgtaatagggacgggtttgcctgaatccatcattgcagctgcatgttcaagaagtggccggagagttctgcatgttgattcaagaagctactatggaggaaactgggccagttttagcttttcaggactattgtcctggctaaaggaataccaggaaaacagtgacattgtaagtgacagtccagtgtggcaagaccagatccttgaaaatgaagaagccattgctcttagcaggaaggacaaaactattcaacatgtggaagtattttgttatgccagtcaggatttgcatgaagatgtcgaagaagctggtgcactgcagaaaaatcatgctcttgtgacatctgcaaactccacagaagctgcagattctgccttcctgcctacggaggatgagtcattaagcactatgagctgtgaaatgctcacagaacaaactccaagcagcgatccagagaatgcgctagaagtaaatggtgctgaagtgacaggggaaaaagaaaaccattgtgatgataaaacttgtgtgccatcaacttcagcagaagacatgagtgaaaatgtgcctatagcagaagataccacagagcaaccaaagaaaaacagaattacttactcacaaattattaaagaaggcaggagatttaatattgatttagtatcaaagctgctgtattctcgaggattactaattgatcttctaatcaaatctaatgttagtcgatatgcagagtttaaaaatattaccaggattcttgcatttcgagaaggacgagtggaacaggttccgtgttccagagcagatgtctttaatagcaaacaacttactatggtagaaaagcgaatgctaatgaaatttcttacattttgtatggaatatgagaaatatcctgatgaatataaaggatatgaagagatcacattttatgaatatttaaagactcaaaaattaacccccaacctccaatatattgtcatgcattcaattgcaatgacatcagagacagccagcagcaccatagatggtctcaaagctaccaaaaactttcttcactgtcttgggcggtatggcaacactccatttttgtttcctttatatggccaaggagaactcccccagtgtttctgcaggatgtgtgctgtgtttggtggaatttattgtcttcgccattcagtacagtgccttgtagtggacaaagaatccagaaaatgtaaagcaattatagatcagtttggtcagagaataatctctgagcatttcctcgtggaggacagttactttcctgagaacatgtgctcacgtgtgcaatacaggcagatctccagggcagtgctgattacagatagatctgtcctaaaaacagattcagatcaacagatttccattttgacagtgccagcagaggaaccaggaacttttgctgttcgggtcattgagttatgttcttcaacgatgacatgcatgaaaggcacctatttggttcatttgacttgcacatcttctaaaacagcaagagaagatttagaatcagttgtgcagaaattgtttgttccatatactgaaatggagatagaaaatgaacaagtagaaaagccaagaattctgtgggctctttacttcaatatgagagattcgtcagacatcagcaggagctgttataatgatttaccatccaacgtttatgtctgctctggcccagattgtggtttaggaaatgataatgcagtcaaacaggctgaaacacttttccaggaaatctgccccaatgaagatttctgtccccctccaccaaatcctgaagacattatccttgatggagacagtttacagccagaggcttcagaatccagtgccataccagaggctaactcggagactttcaaggaaagcacaaaccttggaaacctagaggagtcctctgaataatggatatacaccaaactggatacccaactttggaaattctgactggtctcagagtctacttgatagaaggactgtttgagaaatgttagaaagcagcagcaattataaggcaaaataggtaatagaaatccaaaaggggattttccttatagaggacattccaagaacacacaacacttataaagcacattgacttgctcattttaaataccaaacttgtgtgactagcagatgaaaattataaatcaattgattctcaggaatgtaactgtggatatgaaagtgatcctatgcattgttaataattccatggtcttaggacaattttgcttaccactttggatctttgtttgaaagccacattttcagaaccagctcatgtattttctttggttatttgaattttattttctttatggacaagagcatcataacataatgataaaaacatatagaaaaactaaagtatcatgatctagatagaagcctgtatttggaatacaggtttgttttgctttctatgttgagaagcattgaaaatgctaatataaaggtgtttagacatttttacgaataagtcagtagtgttttttagtatcagtagtgatatttgtttgtaaattatttacatattgggaaaggtcaataatgaagaaatgaaagaatggaaggaaaggtgtggataggctcattggtatttgaatattctgtctgtcaagtaactagagtattaggctaattgtctacagacctaatttaatcctggctgtcctactgatgatatttggtaaattgtttaacttctgagcctacgtttctccatatataaagtggaaatagtattactatgcctactatatgagaatggttatgaagacaatgcaatgccatgtttagaatcggtttgccagaagaaaattgttttagaattttcccattgacttgatgaatctcaaaagtctcacgcaggaaataattgcttgctgtcagtcaacttccaaacaaaatagatcacagtgtttttattgcattaagctttttaaatgaaaatttcttttttaaagtagtattttatagtcttacagaccagtaaaaatagtaacaagtagaattgtggttttgaaatattactaaggaaaacactctataaattgttttattccttttctggtaggtaaacctgcaaccaccaaggactccaaattgtgtatgacagttggtaagccctaatatacactacataaaaacgttagggctgcctgtaatcccagcactttgggaagctgaggtgggtagatcacttgaggtcaggagttcgagaccagcctggccaacatggcgaaaccctgtctctactaaaaatacaaaattttagctgggtgttatggtgggcacctgtaatcccagctactttgaagatgaggtagcagactcacttgaaccagggaggcggaggttgcagtgagccaagattttgccactgcactccagcctgggtgacagagcaagactctgtctcacaaaaaaaaaaaaagggggctgtacataggcagcaaactaagctgcagtgatgttgcctatatttaaattttctcaaatggccaagctctgatggtctactttatttgagcaatagttgagacttataattgcctataaataaacaaacaaatgaactatttgtttttttttctcacaacatctggcctatattgtctgtcaggaagccatggctccaatgtaaagtacatagttcttacatacttcaactgcagctggtccctgacctcaccaggtttcagagatgttcttaaaggaagccagctgtggcaggtcacagattcatgggaaatggaaagaaccaaggaatatagctcttgcctcacctttctacccactgcagatatagttcaagccagagtaatggaagaacttaacttactagcctctcaggctgctcctatccctacctcccagtgtacagcccctccccatctctttagtcccctttccctcacttccccttttataatgtcacacaaatcagggacagtaggatcacattataacctactttgtcatagggattcgatttttcttatatcaaatcatgtttcctgaaacccagctggggcatatgcactcaatgtctaatacatacttattaatgtaccggatattggccttgcccctggatatcagcaatatattataaaaggttccagtagatgagacgattgagtctgaatacaattgcagtaaattgtgccaataaagatattgtactgttacggtcttagagttaaagccgcttgaatgcagcatgcacattcatgtaaacagacaatcagggtaggcctagaataaccacaaaaattctattggccttactgcagccacctatatgtagaacaatggaggagatagtttgtggtccattattgtaccctgtttcatccattagcatcagaatctctctttcaggtcatttattaaatatgattgaaatgtttaaaagttcctgaacatgattcatgatgattaaaatatcatacaactgataaaagactttaagaactttatatatttcctgttgcctcaaaatgtaacagaaattattcttagagctttgattttagctatcctaattactgcaaataaatatttgttcttatagttttaaatcaaaaagaaaagtcttgttataaaaccttaagcttgaaatcatattaataaaatatattgtacatagtggaaaattttcagtagctaatttaaaatttcagaaaatgctattaaagaattttgattcaagtatttaaactgtttagttatgcatgcttcttattaaccgaaaatgataataccatttagtttagtgatcagtatgagaagcaatacctaatcctatgttgctattgtattttttcctagttggtgtgcctgctcagaaaaacatatactgtatgtgtatacatacctgtgtatatataaaaggtcaatttatatatttttctataggaaaatggagtaacaagttccctatctcccatatttatttgtccatagtaaaatggccacattgatgataatttctagaactagtttctgagattgtcagccctttgtctaaaataatggcagtattaatgattgacttctgtcactgccatagttacctggattgtcagccttggtagcctttgtctaaagtcctaaagagttccaaaaaaaatgtgttgaaatttaattgctaaatagtggttggtgattctttacagtaggaattgtaataattttcttgcaaataagttatttactgctattgatattgaataatttgtcttttattcagatatatttcaaaaagcatgaatatatgattattcataaattgtatactttaccagtaagttttcagaggaaataaagacttttaaatccttttca

SEQ ID NO: 454 - DNA, 2705 bp, Homo sapiens
cgtggactgaaagttgcacggcggcgtgtgcgtttcctagttgtctggtgctgctatataggggacgtggggtccccacagacctgcaggttccggcccctcttttctcaacccagagcaaattgaaacgtccgggtaacacaccgctgtgccacggttttggcgagggctgacaattgtgagctgtagaagtaccagcctaacaactgttcaagtgactcctgacctagatgggtggtttcatgcacctccagtacaactgtggctcctagcagctgtggcacaggatttccaaagactcatgttacgtgaggaagccaccaagaagagcaaagaaaaggagccagggatggctcttcctcagggacgcttgactttcagggatgtggctatagagttctctttggaggagtggaaatgcctgaaccctgcacagagggctttatacagggctgtgatgttggagaactacaggaacctggagtttgtggatagctctttaaaatccatgatggagttctcatcaaccaggcacagtattacaggagaagtgatccacacagggacgttgcaaagacataaaagtcatcacattggagatttttgcttcccagaaatgaagaaagatattcatcactttgagtttcagtggcaagaagttgaaagaaatggccatgaagcacccatgacaaaaatcaaaaagttgactggtagtacagaccgaagtgatcacaggcatgctggaaacaagcctattaaagatcagcttggattaagctttcattcgcatctgcctgaactccacatgtttcagactaaagggaaaattagtaaccaattggacaagtctatcggtgcttcctcagcttcagaatcccaaagaatttcttgtaggctcaaaactcatatttctaataagtatgggaagaatttcctccattcttcattcacacaaatacaggaaatatgcatgagagaaaaaccttgccaaagtaatgagtgtggcaaagcctttaattatagctcactcttaaggagacaccacataacccattcaagagagagagaatataaatgtgatgtatgtggcaagatctttaatcagaagcaatacattgtatatcatcatagatgtcacactggtgagaaaacttacaagtgtaatgagtgtgggaagaccttcactcagatgtcatcccttgtatgccatcgtagacttcatactggagagaaaccttacaagtgtaatgagtgtggcaagaccttcagtgagaagtcatcccttagatgccatcgtagacttcatactggagagaaaccttacaagtgtaatgagtgtggcaagacttttggtcgaaattcagcccttgtaattcataaggcaattcatactggagagaaaccttacaagtgtaatgagtgtggcaagaccttcagtcagaaatcatcccttcaatgccatcatatacttcacactggagagaaaccttacaaatgtgaagaatgtgacaatgtttacattcgcagatcacaccttgaaagacataggaagattcatactggagagggatcatacaaatgtaaggtttgtgacaaggttttccggagtgattcataccttgcagaacatcagagagttcatactggagagaaaccatacaagtgtaataaatgtggcaggagtttcagtcggaagtcatcccttcaataccatcatacacttcacactggagagaaaccttacacatgtaatgaatgtggcaaggtttttagtcgaagagaaaaccttgcacgtcatcatagacttcatgctggagagaaaccttacaaatgtgaagaatgtgacaaagttttcagtcgcagatcacaccttgaaagacataggagaattcatactggggaaaaaccatacaaatgtaaggtttgtgacaaggctttccggagtgattcatgccttgcaaaccatacgagagttcatactggagagaaaccttacaagtgtaataaatgtgcgaaggtttttaatcaaaaaggaatccttgcacaacatcagagagttcatactggagagaaaccttacaagtgtaatgaatgtggcaaggtttttaatcaaaaagcaagccttgcaaaacatcagagagttcatactgcagagaaaccttacaagtgtaatgagtgtggcaaagcctttactggacagtcaacacttattcaccatcaagcaatccatgggtgtagggaaactttacaaatgtaatgattgtcacaaagtcttcagtaatgctacaaccattgcaaatcattacagaatccatattgaagagagatctacaagtgtaataaatgtggcaaatttttcagacgtcattcataacttgtagttcatcagtgaactcatactggagagaaaccttacaaatatcatgactgtgacaaggtcttcagtcaagcttcatcctatgcaaaacatagaattcatacaggagagaaacctcacaagtgtgatgattgtggcaaagcctttacttcatgttcacacctcattagacatcagagaattcatactggacagatgccttacaaatgtaagggtggcaaggtcttcactctgtggtcattccatgcagaacatcagaaaattcatttttgagataattgttccaaataaaatgaatataaaaaatcataaaactttaaaaaaaaaa

SEQ ID NO: 455 - DNA, 1634 bp, Homo sapiens
ggagagaaggaagaaggaaggggcgaacggcgtgagctggcgccgaaatgggagaaagcagcgagtgagaggggaaggggcgccaggcgagcacccgggagccagcgggacctgggcaggggcgcccggagcaggcgcgcatggcgggccccgcgcggggatccggctggaagagagcgtagcacggctcgcacgagtccggggccgatgtaccaggtgagcggccagcgcccctctggctgcgacgcgccctatggagcccccagcgcagccccgggcccagcccagaccctatccctccttcctgggctggaggtagtaacaggatccactcaccctgcggaggcagcaccagaggagggctccctggaggaggcggcaacccccatgccccaaggcaatggccctggcatcccccagggcctggacagcactgacctcgacgtccccacagaagctgtgacatgccagcctcaggggaaccccttgggctgcaccccacttctgccgaatgactctggccacccctcagagctgggcggcaccagacgggcggggaatggtgccctgggtggccccaaggcccaccggaagttgcagacacacccatctctcgccagccagggcagcaagaagagtaagagcagcagcaaatccaccacctcccagatccccctccaggcacaggaagactgctgtgtccactgcatcctgtcctgcctgttctgcgagttcctgacgctgtgcaacatcgtcctggactgcgccacctgtggctcctgcagctcggaggactcgtgcctctgctgctgctgctgtggctctggcgagtgtgccgactgcgacctgccctgcgacctggactgcggcatcctggatgcctgctgcgagtccgcggactgcctggagatctgcatggagtgctgtgggctctgcttctcctcctgagcctctgtcgggggctaagccagcctggcgcccctgcagattccagcagggtccctctgagtggggccaggcccaggactgtcacacaaggcttgagaagccccctctccctggtcctctcctacccacccatgtcctctcagaaccccagccttgaaaatagtggggggcactcagaggggccacctcctcagccgtgggtggtgggcccatggcagagaagcctgaactctttactgggttaccaggttcatacattgctgaggacctgacaggacaacctaggggcagggctggggtggggaccgcagggggcagccagggctggggaacactgtgaaagttacttggggagggtgggccggtggggccgtagctctctacctctccctgctcctggtgcctgcctctctcctccaccccaggcttagaggacagaaaaatgtgaagagacgccccacccaccctcagccagccctctccagtctcctttcctaggcttttttgggggcctaacccacgcagtgaccccagagggcagggctaggcgagagcctggggtggggcgggagggggaacagtatggaaaagactggaaggggaaaggaagggaagggagggagggtctgttctatctgttgctgtaaataaagatatttgtccatctcaaaaaaaaaaaaaaaaaa

SEQ ID NO: 456 - DNA, 986 bp, Homo sapiens
tgggaaagagggaaaggcttccccggccagctgcgcggcgactccggggactccagggcgcccctctgcggccgacgcccggggtgcagcggccgccggggctggggccggcgggagtccgcgggaccctccagaagagcggccggcgccgtgactcagcactggggcggagcggggcgggaccacccttataaggctcggaggccgcgaggccttcgctggagtttcgccgccgcagtcttcgccaccatgccgccctacaccgtggtctatttcccagttcgaggccgctgcgcggccctgcgcatgctgctggcagatcagggccagagctggaaggaggaggtggtgaccgtggagacgtggcaggagggctcactcaaagcctcctgcctatacgggcagctccccaagttccaggacggagacctcaccctgtaccagtccaataccatcctgcgtcacctgggccgcacccttgggctctatgggaaggaccagcaggaggcagccctggtggacatggtgaatgacggcgtggaggacctccgctgcaaatacatctccctcatctacaccaactatgaggcgggcaaggatgactatgtgaaggcactgcccgggcaactgaagccttttgagaccctgctgtcccagaaccagggaggcaagaccttcattgtgggagaccagatctccttcgctgactacaacctgctggacttgctgctgatccatgaggtcctagcccctggctgcctggatgcgttccccctgctctcagcatatgtggggcgcctcagtgcccggcccaagctcaaggccttcctggcctcccctgagtacgtgaacctccccatcaatggcaacgggaaacagtgagggttggggggactctgagcgggaggcagagtttgccttcctttctccaggaccaataaaatttctaagagagctaaaaaaaaaaaaaaaaaaaaaaaaaaaaa

SEQ ID NO: 457 - DNA, 1056 bp, Homo sapiens
tctctggctgtcacccggcttggccccttccacacccaactggggcaagcctgacccggcgacaggaggcatgaggggcccccggccgaaatgacagtgctggcgccagcctggagcccaacaacctatctcctcctgctgctgctgctgagctcgggactcagtgggacccaggactgctccttccaacacagccccatctcctccgacttcgctgtcaaaatccgtgagctgtctgactacctgcttcaagattacccagtcaccgtggcctccaacctgcaggacgaggagctctgcgggggcctctggcggctggtcctggcacagcgctggatggagcggctcaagactgtcgctgggtccaagatgcaaggcttgctggagcgcgtgaacacggagatacactttgtcaccaaatgtgcctttcagcccccccccagctgtcttcgcttcgtccagaccaacatctcccgcctcctgcaggagacctccgagcagctggtggcgctgaagccctggatcactcgccagaacttctcccggtgcctggagctgcagtgtcagcccgactcctcaaccctgccacccccatggagtccccggcccctggaggccacagccccgacagccccgcagccccctctgctcctcctactgctgctgcccgtgggcctcctgctgctggccgctgcctggtgcctgcactggcagaggacgcggcggaggacaccccgccctggggagcaggtgccccccgtccccagtccccaggacctgctgcttgtggagcactgacctggccaaggcctcatcctggggaggatactgaggcacacagaggggagtcaccagccagaggatgcatagcctggacacagaggaagttggctagaggccggtcccttccttgggcccctctcattccctccccagaatggaggcaacgccagaatccagcaccggccccatttacccaactctgtacaaagcccttgtccccatgaaattgtatataaatcatccttttctaccaaaaaaaaaaaaaaaaaaaaa

SEQ ID NO: 458 - DNA, 829 bp, Homo sapiens
tggggagtgaaagcgaaagcccgggcgactagccgggagaccagagatctagcgactgaagcagcatggccaagccgtgtggggtgcgcctgagcggggaagcccgcaaacaggtggaggtcttcagacagaatcttttccaggaggctgaggaattcctctacagattcttgccacagaaaatcatatacctgaatcagctcttgcaagaggactccctcaatgtggctgacttgacttccctccgggccccactggacatccccatcccagaccctccacccaaggatgatgagatggaaacagataagcaggagaagaaagaagtccataagtgtggatttctccctgggaatgagaaagtcctgtccctgcttgccctggttaagccagaagtctggactctcaaagagaaatgcattctggtgattacatggatccaacacctgatccccaagattgaagatggaaatgattttggggtagcaatccaggagaaggtgctggagagggtgaatgccgtcaagaccaaagtggaagctttccagacaaccatttccaagtacttctcagaacgtggggatgctgtggccaaggcctccaaggagactcatgtaatggattaccgggccttggtgcatgagcgagatgaggcagcctatggggagctcagggccatggtgctggacctgagggccttctatgctgagctttatcatatcatcagcagcaacctggagaaaattgtcaacccaaagggtgaagaaaagccatctatgtactgaacccgggactagaaggaaaataaatgatctatatgttgtgtgga

SEQ ID NO: 459 - DNA, 2512 bp, Homo sapiens
gtggagggcggcgccgctgcagtgcggggacccgctcgctcgctcgccagccgtccccgcgccccgcgtccccgcgcagccgcctcctggcctcgggcgccgcgcatccaggaaggaagcagccaccctcgccatggcctccccgcccgcctgcccctcggaggaggacgagagcctgaagggctgtgagctgtacgtgcagctgcacgggatccagcaggtcctcaaagactgtatcgtccacctctgcatctccaagcccgaacgccccatgaagttcctccgggagcacttcgagaagctggagaaggaagaaaacaggcagattttggcgcggcaaaagtcaaactcacagtcggactcccatgatgaggaggtgtcgcccacccccccgaaccctgtggtgaaggcccgccgccggcgaggaggcgtgagtgccgaggtgtacaccgaggaggacgccgtgtcctacgtcaggaaggtgattcccaaggactacaaaaccatgactgcgctggccaaggccatctccaagaacgtgctcttcgctcacctggatgacaacgagaggagtgacatattcgatgccatgttccctgtcactcacatcgctggggagactgttatacagcaagggaatgaaggagacaacttctatgtcgttgatcaaggggaagtggatgtgtacgtgaacggagagtgggtgaccaacatcagcgagggaggcagcttcggggagctggcgctcatctacggcacccccagggctgcgaccgtgaaagccaagacggacctcaagctctgggggatcgaccgggacagctaccggcgcatccttatgggcagcacgctgaggaaacgcaagatgtacgaggagttcctcagcaaggtctccatcctagagtccctggagaagtgggagcgtctgaccgtggcggatgcgctggagcccgtccagtttgaagatggagagaaaattgtggtccagggagagcctggggacgacttttacatcatcacggagggcaccgcgtccgtgctgcagcgccggtcccccaatgaggagtacgtggaggtggggcgcctgggaccctctgactacttcggggagattgcactgctgctgaaccggccccgggcggccactgtcgtggcccgggggcccctcaagtgtgtgaagctggaccggccccgcttcgagcgtgtgctggggccctgctctgagatcctcaagaggaacattcagcgttacaacagcttcatctccctcaccgtctgagcacagctcccgccctgcagccccagctccccagtgtggtggccgtgccctgctcgtctgtgtcgggggcccgggagccgctgtgtgaggtgtgggccgggtggggctgggtcccggcagcgtgaggactgccccttccccggactcactttttggaataaatgatcaccttgtgcatttccaaatcaaaggacaagcggacaaaatgcatcccaagatcaaggaagggacaggccagcttcctccccacacgcctccccggctgcctctgtgggcttctcctggggggcccaccccacccctgccagtctcctggagatgcttgaggatcggtcctccccagaaccaggccaggacgttgcccctggggcctggtgaccctgtgaggtcaggtcccccagattgaggtctgagtgtgggcaagtgtgtcaaaaggggctgccccccaggggagatgaggctgagagcagggagttgaggccgaagaagtcaaggcccctcccgcaaatgtgtacccctgcccgcgccactgcaccccgccgcacccccacctcccccgggggccctgctgcggatgccggagtgggagagtctctgagctgtgagattgatcttgcccctaattggagaggaagccgggcgccaagacacacggggctcctgccttgggagccagggccgcggccgcaggtagaccccagtagggggggccgggctcgaagttcctttgggaggggctggcgggactccagcaggccgtcctcacctttcttagaaagtccacccagggcaagttgatgttgggggaaagcagaagtcaagccagccgcgggccccacacgccccgacccgctcaaccgacttgtcccttaaatgtgtcttggatcccgcagtgatgacgtgagccagccaggcccgaaagggtgaggccagtgcagagaagcttcccaggggattcctgggttcccccgaaagacaagcgaggtcattgcagttcacctgatgttgctcctgtcccgtgcgtcccggggaggctgtccttggtccgaggctgctcgttgcagcccctcccctgctggcggttacgatgcgtggggtccccctccccacccagccccggccacgtcgccgtgtcccgcctgtgcctgtgacgtccctgtggacctgtgagccatccccccccttatctctgctctgaatactgcatgaagcattaaacgtgcaatgaagtac

SEQ ID NO: 460 - DNA, 6764 bp, Homo sapiens
atgagggatttcgggtttggggtgctgcagaccgccccgctccgaagtagcagtcctgggcccctgttctgcggcgaggcgtatggtccttacgccgtggggtccgtcaacccgctgccctccgccacgcccttcggcccactgtcgccaccaccgttgcctgtcaccggcttcttagaggccgcctcccccttctccgtccccctcggcggcggcgcgggcagcccggccgccgccgcttcctcttcctccccgttcctggcgcatcagcagaccatgcaggatgagctgcttctggggctgacacagcagccggcgcggccgctttcgggggcggcggccacggagaaactccccgaccaccaccccggcggcggcacgatcgcgggtgtgacccacctcctcccctcccaggacttcaaaccgagtctgcaccacccctcctcctcctccgcctcctcctgctgctgctgccgcacctcctccccgcaggacttcagtaagcggcagcagcagcagctgagcagccagaagaggaaagagttcagccctccccaccttccccaccctccggactcgaagccgccgccgccgcctccgccgctccactgccccggtcggttcagcccgccgccgccgccagccggcccgctcctccagccggcgcagctcgctcagcgccagcagcaacagccgccgcagcagttcagcctcctgcatcagcagcacctctcgccgcaggacttcgccccgcggcagcgtccggcagacctgcccccgctcccgcagctccctccctcgccgcctgcagccccgcggcgccgccacggaggcgcgggcagccctcgcaagaccccagccgcgggcgagggcagcgccgccgagtcccccaatgcgggcttggcctcctcgacgccggtgaaccccgcgccgggctccatggagtcccccaaccaccctctgctcaacagtcccagtaacctcctgcccggaggtgcgcttggcgcgggcgccttcagcagcctgcagagcccggaccttccacacccgggcggcggcggcggcggcgggggcggggggcccccaggaggcggagggggaggcggctccgcgtcgccgccgccgctgcccggcttcggcaccccctggtcggtgcagaccgcgtcgccgccaccccagccccagcagccgccgccgacccagccgcagcagcagccgccgccaccccagcagccgccccagccgcagccgcagccgcccggctcgtctgccaccaccccgggcggcggcagcggcggctcgctcagcgccatgccgccgcccagccccgactcagagaacggcttctaccccgggctgccgtcgtccatgaacccggccttcttccctagcttctcgcccgtgtcgccgcacggctgcactgggctcagcgttccgacgagcggcggcggcggcggcggcttcggcggccccttctcggctaccgctgtgccccctccgccgccgcccgccatgaatatacctcaacagcagcccccgccgcccgcggcgccgcagcagccgcagagccggaggtcgcccgtcagcccgcagctccagcagcagcaccaggcggcggccgccgccttcctgcagcagaggaactcctataaccaccaccagcctcttctgaaacagtctccctggagcaaccatcagagcagtggctggggcactggaagtatgtcctggggagcaatgcatggcagagatcatcgtagaaccggaaacatgggaatcccaggaactatgaatcagatatctccattgaagaaaccgttttctggtaatgtcatagcaccaccgaaatttactcgctcaactccatcactgactccaaaatcttggattgaagataatgtgttcagaacagacaacaatagtaatacactcttacccttacaggatcgaagtagaatgtatgacagtttgaatatgcactctttggaaaattcccttatcgatattatgagagcagagcatgatcctcttaagggtcgattgagctatccacatccaggaactgacaatctgttgatgttaaatggtcgttcttccctctttccaatagatgatggcttgcttgatgatggtcacagtgatcaagttggagttttaaattcacccacctgttattcagctcaccaaaatggagagcgaatagaacgcttctctcgaaaagtttttgttggtggtcttcctccagatattgatgaagatgaaataactgctagcttcagaagatttgggcctttggtagtagattggcctcataaagcagaaagcaagtcctattttccaccaaaaggctatgcatttcttctctttcaagaagagagctcagttcaggcactcattgatgcttgtattgaagaagatggaaaactctatctgtgtgtttctagccctactatcaaggacaaaccagttcaaatacgtccttggaatttaagtgatagtgattttgtaatggatggttctcagcctttggatccccgaaaaacaatttttgttggaggtgttcctaggccattaagggctgtggaacttgctatgatcatggaccggctgtatggtggagtttgttatgcaggaattgatacagatcctgagctaaaatacccaaaaggtgctgggcgagttgctttctccaatcagcagagctatattgctgccattagtgctcggtttgttcagcttcagcatggtgatattgataaacgtgtggaggtaaagccatatgtgctagatgaccagatgtgtgatgaatgccagggcgcacgctgtggtggaaaatttgctccctttttttgtgccaatgtcacttgcctgcagtattactgtgagttttgttgggcaaatatccactctcgtgctggacgtgagttccataagccattggtaaaggaaggtgctgatcgcccacgtcagatccacttccgctggaactaagaatagcaaactggcctctgtttaacaaggaaagaaagggtgcatgtggcttactgtgtctgaagatactgacatgcagaagaaataagtgcattcttctgcttttcaccccagctatcaatacatgcatctttatcagcagccaaaacactacaagcctcttgtttttcaccaaaaccctacatctcaggcttactaatttttgtgatattttcatgttcaaataaaatgtttttttgtattttctccaagttatttttatatgtaaagttaaaattagatatgagaatgttttgcgtaggggcaacacagtctgctgctatatagtgggggaagcgtgcacttatttctaaacatgggtttttaacttcaagatctgccccagtaatttaccaaaggtagcaaaataatagtgaagatggaatatgtctgctacaaatgcttatttttattgttgctattttcagtgtatacataaactaaaaattagggttgatttttttgctctccattttgacttgcaagaaataatacctcaagataatctgatttattagctatttttaaacatttttaatcacaagctgtattagctttgctgctatataggtgttatgtgtaaatgccacctattaatacgggactgaaaacgttagagacacactgcattgcagataaaatgcaggcagcacaatatggcctaaactgccatagttttagaatgtgaaaaaaatgcatgtttacttacctgtatacaccatatgcatgcactagaattattaactaacgaggtgaggtattgcaaatgttcaaaaaagctctcttgaatctaggtagcatgaacaaattataaaatttgtttaaaaaagcaaacttgcatgcattattgtgacttcaagtttaaaaaatcgtcttacatgtgtacaatatgcaaattagttttagattagagagtgcagccattttgtgatctggtcagtagtggaattcgattttatgcagactggatgtaatatttgtaatccctgtgcaattttgtgacgtgcggttctaattcatgtgcagtgatatagtatagataaaagaatgagtaaaagaaaatacaagaattctaaagaaagttggttttagcccctttgatagtccatggttaagacatcctttataaaccaaagatggccagcacactgctaaccagtcaccaaatgtaagacccataagaaacccatatttaaaaatctgaattttttagaagaatgcaaaactttagtaaaccctaagtaaagtcaaaatggagaaggggaaatatacagatggctagttgcataaaattaaattttacctttataagacaatggtgaaatctggcttgaacttgcttatgtgtttaacctataaatattggggtcttctgtctaaactggggtcactgttgcatggaacattgttcttaatagttgagaattgcttttttgaaaattttcatgaaggaattttggtaatgactttgcttgcaggttttttggggtgttttgagaaagtggcatggaaacatgcagtagttaatgagtttctcttggtactgaacactattagaatatcattagtgatattttttctctttagagcatttttaatgcaactagcccctatattttaatgtaagagttactctgcaatctaagcaaagcacccaacaatggtaaatgttttttaaaaatgcagaactaagatttttgactctaaagagagaaaattacaagggtgttgccttatagcaaacccttgggacaatccttcatgtgagcaaagtgttgatcttaatattggttgtctgtggtgtgcttttttgtactgtaaaaatatgtggttcatgtctaactctgctgttttattgtggttgtggttcaagtttttaatgtttaaagttgatgctgttttcagaagagctttttactaatttatttgtcagtgttccctatttgttacttaaccatgatcctccagattttttggagtattcttttctaaccttaaccctgccaaaccttgatccattttgacatttgttatgcactatttttatatctctgtgagagatttttccaacagtcagctattttatggcacactttttttgactgatgacatctcctttgctatacctcaatttttggaatttagagaagaaatcagtagttttgcaatgttaattatttagatatttaatttcgcagatttttaaactttattttcataatttctgcttaatgtttaaaattgaagagccttttcatgtattaaataatgaacacaaattatataattaaaataattggagatgttgaaaatcattttcccttcttaaacagaaataaatatttggaatgaaggggaatgtactagaacaccctttttgccacgggtaaaaataacagaaatgtatggtttgttttaccttcatttctgtacaagtaaagcttattagtctaatgttttgttcctttcccacctcacccctacctcttttgttttgttttgtttttgccctttatgtactacattcttattttctaacttttaaacactgtattggaggtttttttttaatttacagatcatatttattttactatttttgtagaaaattattaattttgattgtatttttgtattttaaaagcttcttcacttgtgttccctaaatattcatattgctgcccaaaagtatgactgtggaggaaaaaaaaatactttaaaaatccacactttttgttaagaaggaaacatttagcatttatatatttgtgtatggaaaacacttgatattttatccctgttgcatctggctgcacagagcctctcctcaaagatgctacaaaacttgaatataacacattttggaaggctgactaacctcgattctgtgttgtgatgtgcaatactgtttctaatgtttgtataaaaaaaaacagtgtaaacctttttaatgcaaatttatttttttcattgcatattttgcagattttatccacagtgtcattttttactgtcagaaaagataccccttttgtcattgcaactattttttaaatccagaaatctttgtactgatgtaaatgattgtagttattttggatagtgttttgctaacaaaaggagagacttttttcatgcatatttctattttgtttttttgggttttattttattttaatagtagtaaaatacttggaataatttttcatattcttgtcattaatattattttgtatttttatgtggaaatatataattttatgacactaattgctaaagtttattttatgttgaattatttttggagctgaaatctttgtaatattaaagcaactagtttctaattcccagtttctgtatagaatcgcacaagtggtttatggagtgtttggattgtaattataaatggttctttgatatgcaaattaatattttcagttgattttattttatattcctaatggggtgttaaagccgttttttatttttttctaaataaaaagagaacccatgcttttatggacactaggtaaacaccttcagcttaaatttttcgttaaatattttagtttattttattgttatcttccaggtgtctaaatctccagtctgtctgttgtactggtaatttaactctgtaatggaatagtttgctgccaactatttatattaagtaatttttaaatatttgtaatattgttgactgactaataaactattaagttattggcata

SEQ ID NO: 461 - DNA, 2106 bp, Homo sapiens
acgacccggagcgaaggtctcgcgaggcctgggcgctgcggcggcaggaggaggacggggaaggacggagccgagccgcggctgcctccctcgctcactccctcgcgcactcgcccgccccctccctccctcccctcccttccccggccccggctctggccccggcccattcgctgttgggtcttctgctagggaggatgtcgggttcgtcgctgcccagcgccctggccctctcgctgttgctggtctctggctccctcctcccagggccaggcgccgctcagaacgagccaaggattgtcaccagtgaagaggtcattattcgagacagccctgttctccctgtcaccctgcagtgtaacctcacctccagctctcacacccttacatacagctactggacaaagaatggggtggaactgagtgccactcgtaagaatgccagcaacatggagtacaggatcaataagccgagagctgaggattcaggcgaataccactgcgtatatcactttgtcagcgctcctaaagcaaacgccaccattgaagtgaaagccgctcctgacatcactggccataaacggagtgagaacaagaatgaagggcaggatgccactatgtattgcaagtcagttggctacccccacccagactggatatggcgcaagaaggagaacgggatgcccatggacattgtcaatacctctggccgcttcttcatcatcaacaaggaaaattacactgagttgaacattgtgaacctgcagatcacggaagaccctggcgagtatgaatgtaatgccaccaacgccattggctccgcctctgttgtcactgtcctcagggtgcggagccacctggccccactctggcctttcttgggaattctggctgaaattatcatccttgtggtgatcattgttgtgtatgagaagaggaagaggccagatgaggttcctgacgatgatgaaccagctggaccaatgaaaaccaactctaccaacaatcacaaagataaaaacttgcgccagagaaacacaaattaagtactgcttacaatatctttaggttcctgaaactggtggcaacatgacctgctaaaattttctgcttggacctctttggttctctcccctttcaagtgagcaacaccacaatgactgtctaaagcatgccttatttagcctctcctgtaagggtgatctagccaggtacattttaaacaatgcttcagtgtagaaggtgtaaactattttgggcttgatgtgctgtgaatgttgcttttttttttcctttgttaaaatatttaaatagaagtgaaaaggtcctctgaggatcagatcatgcatgcgccattttttacttaatgcagctgttaaattggcaaagctctaaaatgcactgctgccatctagtgatacacttttgtaaagtacagcaaaacctacagatatatacagtatataaatatatatatatatatatttatatttttgggggtgggagaaatccaaaataaagtaaatgcttgtttcatttttaagctgctgatattcattccttattgtatgttgtcagatgaggaaattgtgcagttctggtacataaagatgagtaatataaactgaaatctataattttaagggcttaacctgtgactttaataagctggaacagtccactgaatgggtataatgaattgcagtatatacgtatgattgctttttaagtgattatcttttcttctgttaagtcatgtaaattcataaatccttttgcactgatgtgttgaaccttattcttgtacattcattcaatcaaggcaaacttttataatttttcttttgtttccaatgaccttgaaatgttatagcatggtaatattctatgcaactatagttatactttttggtttgacactgtattttttcacattgatttactggttgatgatagattttataacctaacggttctcatgcggtgcgtaattgtagatgcatgtacttgtgtgttttgtgtaattattgaagtgcaatgatgtataaaaaagtggattcacctgtttttaaaaataaaacattgataaaaggtgtttggataata

SEQ ID NO: 462 - DNA, 1923 bp, Homo sapiens
tcccgcggcggctggcgtcgggaaagtacagtaaaaagtccgagtgcagccgccgggcgcaggatgggatccggctcctccagctaccggcccaaggccatctacctggacatcgatggacgcattcagaaggtaatcttcagcaagtactgcaactccagcgacatcatggacctgttctgcatcgccaccggcctgcctcggaacacgaccatctccctgctgaccaccgacgacgccatggtctccatcgaccccaccatgcccgcgaattcagaacgcactccgtacaaagtgagacctgtggccatcaagcaactctccgagagagaagaattaatccagagcgtgctggcgcaggttgcagagcagttctcaagagcattcaaaatcaatgaactgaaagctgaagttgcaaatcacttggctgtcctagagaaacgcgtggaattggaaggactaaaagtggtggagattgagaaatgcaagagtgacattaagaagatgagggaggagctggcggccagaagcagcaggaccaactgcccctgtaagtacagttttttggataaccacaagaagttgactcctcgacgcgatgttcccacttaccccaagtacctgctctctccagagaccatcgaggccctgcggaagccgacctttgacgtctggctttgggagcccaatgagatgctgagctgcctggagcacatgtaccacgacctcgggctggtcagggacttcagcatcaaccctgtcaccctcaggaggtggctgttctgcgtccacgacaactacagaaacaaccccttccacaacttccggcactgcttctgcgtggcccagatgatgtacagcatggtctggctctgcagtctccaggagaagttctcacaaacggatatcctgatcctaatgacagcggccatctgccacgatctggaccatcccggctacaacaacacgtaccagatcaatgcccgcacagagctggcggtccgctacaatgacatctcaccgctggagaaccaccactgcgccgtggccttccagatcctcgccgagcctgagtgcaacatcttctccaacatcccacctgatgggttcaagcagatccgacagggaatgatcacattaatcttggccactgacatggcaagacatgcagaaattatggattctttcaaagagaaaatggagaattttgactacagcaacgaggagcacatgaccctgctgaagatgattttgataaaatgctgtgatatctctaacgaggtccgtccaatggaagtcgcagagccttgggtggactgtttattagaggaatattttatgcagagcgaccgtgagaagtcagaaggccttcctgtggcaccgttcatggaccgagacaaagtgaccaaggccacagcccagattgggttcatcaagtttgtcctgatcccaatgtttgaaacagtgaccaagctcttccccatggttgaggagatcatgctgcagccactttgggaatcccgagatcgctacgaggagctgaagcggatagatgacgccatgaaagagttacagaagaagactgacagcttgacgtctggggccaccgagaagtccagagagagaagcagagatgtgaaaaacagtgaaggagactgtgcctgaggaaagcggggggcgtggctgcagttctggacgggctggccgagctgcgcgggatccttgtgcagggaagagctgccctgggcacctggcaccacaagaccatgttttctaagaaccattttgttcactgatacaaaaaaaaaaaaaggaattcatgatgctgtacagaattttatttttaaactgtcttttaaataatatattcttatacggaaaaaaaaaaaaaaaaaaaaaaaaaaaaaaaaaaaaaaaaaaaaa

SEQ ID NO: 463 - DNA, 2505 bp, Homo sapiens
attcttcctgggccgcagcaccggccgccggcccgccccgcccgccccgccccgcgcctctctagactctcggcgagcagcgtcgcccgcggagccgcgctggtgctgtggcccgggccctggcagccctcccgggaggcgagccggggaggcggtggcccctgccggttgcggcggggcgcgggaagaggcgggactctttgacgcggcggaggggtcgggcgacggccgacgcgccgccatctttggtccagtgcggtggcggcggcggcggtggcggcggcgactgctgcggtgaaggaggaggaggagccgagcgggcgctggcaccgaggcctgaccatggacgaggaatacgatgtgatcgtgctggggaccggtctcaccgaatgcatcctgtcgggcatcatgtctgtgaacgggaagaaggtgctgcacatggaccggaacccctactacgggggcgagagctcctccatcacacccctggaggagctgtataagcgttttcagttgctggaggggccccctgagtcgatgggccgaggccgagactggaatgttgacctgattcccaaattcctcatggctaacgggcagctggtaaagatgctactgtatacagaggtgactcgctacctggacttcaaggtggtggagggcagctttgtctacaaggggggcaagatctacaaagtgccgtccactgagactgaggccttggcttccaatctgatgggcatgtttgagaaacggcgcttccgcaagttcctggtgtttgtggcaaacttcgatgagaatgaccccaagacctttgagggcgttgacccccagactaccagcatgcgtgacgtctaccggaagtttgatctgggccaggatgtcatcgatttcactggccatgccctggcgctctaccgcactgatgactacctggaccagccctgccttgagaccgtcaaccgcatcaagttgtacagtgagtccctggcccggtatggcaagagcccatatttatacccgctctacggcttgggcgagctgccccagggttttgcaagattgagtgccatctatggggggacatatatgctgaacaaacctgtggatgacatcatcatggagaacggcaaggtggtgggcgtgaagtctgagggagaggtggcccgctgcaagcagctgatctgtgaccccagctacatcccggaccgtgtgcggaaggctggccaggttatccgcatcatctgtatccttagccaccccatcaagaacaccaacgacgccaactcctgccaaataatcatcccccagaaccaggtcaacaggaagtcagacatctacgtgtgcatgatctcctatgcacacaacgtggcggcccagggcaagtacatagctattgccagcactactgtggagaccacggaccctgaaaaggaggtggagccggctctggagctgttggagcccattgaccagaagtttgtggctatcagtgacttgtatgagcccattgatgatggttgtgagagccaggtgttctgttcctgctcctacgatgccaccacacactttgagacaacctgcaacgacatcaaagacatctacaaacgcatggctggcacggcctttgactttgagaacatgaagcgcaaacagaacgacgtctttggagaagctgagcagtgattgtggccgcccccagcccctgctgccccagcctgtgtctgttctcctcgagggctccagcatcctctgcttcccccaccacgttcccatcacccacctcattgatccactgaccaaatccttaaccctagcgatggcttgggagatggggggttggatagcatcctctttcttggcccttccttatcctaggaaaagagggttcctctccttgtgtgtgtctcttccccccacccctaattcttctgctctgtttgggaagacgtggaggaaaaggtgacttctgcccccaccgctcttacccccactgtagtggcctttggagatgcccccacctcccccccaccaactctcgcgtgttggagagaaggggccctcccagcacaaagttgcattcctcccccctaatttattctaatttattaactttgacccaccctttctgagcctgcagccttcccgtgtggcctgagggctgtcgagtgagctgccccagcccctcccagcccttgcccagcctgggggagtggggaaggcttgggcatggccccgttggaggttgatttgctgttttgtttcttgtctttgtgttctgtggtacttgctgagagaaaagaaaagtgagccaagcagaaggaggtgggaaaacggacccaaaccccagtgtgccctgccccatgcctttcctttagtggtgggaaacccttatcttgcaaagtgaatgtgtccccttccccaccctctagtgtatttcacagaaaacaaaacctcccaataaaacggttgaaacctgaaaaaaaaaaaaaaaaaaaaaaaaaa

SEQ ID NO: 464 - DNA, 2338 bp, Homo sapiens
cgagcggcggcggcggagcccagagggcggcgggaatgcggaaccggcgcgcgggctgaggccgcccgggatggcgcaggggcggcggcggcgggcggcctgcgcggggccctagcgagccgggctgacgctcccggccccggccccggcatcggcatcgcgggcgcatcgcggccatggccaaggagcggcgcagggcggtcctggagctgctgcagcggccggggaacgcgcgctgcgcggactgcggcgccccggatcccgactgggcctcctacactctgggcgtcttcatctgcctgagctgctcgggaatccaccggaatatcccccaggtcagcaaggtgaagtccgtccgcctggacgcctgggaggaggcccaagtggagttcatggcctcccacgggaacgacgccgcgagagccaggtttgagtccaaagtaccctccttctactaccggcccacgccctccgactgccagctccttcgagagcagtggatccgggccaagtacgagcgacaggagttcatctacccggagaagcaggagccctactcggcagggtaccgtgagggttttctctggaagcgtggccgggacaacgggcagtttttgagccggaagtttgtgctgacagaacgagagggtgctctgaagtatttcaacagaaatgatgccaaggagcccaaggccgtgatgaagatcgagcacctgaacgccaccttccagccggccaagatcggccacccccacggcctgcaggtcacctacctgaaggacaacagcacccgtaacatcttcatctaccatgaggacgggaaggagattgtggactggttcaatgcactccgagctgctcgcttccactacctgcaggtggcattcccaggggccagcgacgcagatctggtgccaaagctctccaggaactacctgaaggaaggctacatggagaagacggggcccaagcaaacggaaggcttccggaagcgctggttcaccatggatgaccgcaggctcatgtacttcaaagaccccctggacgccttcgcccgaggggaagtcttcattggcagcaaggagagtggctacacggtgctgcatgggttcccgccgtccacccagggccaccactggccacatggcatcaccatcgtcacgcccgaccgcaagtttctgtttgcctgcgagacggagtccgaccagagggagtgggtggcggccttccagaaggcggtggacaggcccatgctgccccaggagtacgcagtggaggcgcacttcaagcataaaccttagcgagtgcggctggaggaccacggacattggactcactgtggctggacggaggggacccgtggatgggggggctctggcgtcctgaggccacctggccccacctgctcctcagggcagcccggcgcggccaggtagggcccgagcttcagcttccaggatgcttctctggaacctcaaggcaggcagcccaggccctgggcctgatctctaaccccgtcatgctgctgctgaccacacccagccaacctgcccctccctgacccggggccccctttcctccagggcccagtctggctcccgagctcagacacagcccccaggagccgcccaccacggctgtgggaacttccaggcctcagcgcagagccctgcttggggccagcacggtgggcagctgccggccgctggggactgggccctgctcgcatgccgccccgccctccccccacctccacgactatttattgagcgcctgttgtgtgtcacggggctatgagggccgtggggtgtttgggtggattatccacacaggtcccggcccctgcccgggctggagttgccacagcctgtgctcctggtcctcacctggaggggccagcaggctgccgtcccaccacacgtggcctctgcgcccagcacggtgctcgccgacagtggtgtctgaacccttggggacgagggcctgggccgcggtgaggccaccagaggcaggagtggccctgggggtcccgggcactgtcgcgcttgctgcaggcggcccagccgtgtatttatttttcacctatctccttcctgtcaaggcaggccgggctccagggctccccttgcgtggggcatgtaggtgggggaggcgtctgcaggtcacctggggggcccagccctctcccagccttgcctggctgagctgtgttccaggggagccctggacaagccctcataggcagggagggggtttccgaggccaggcatccgccgccccgtgtcgcatcctggaataaaatgtggctctggcatggttccaaaaaaaaaaaaaaaaa

SEQ ID NO: 465 - DNA, 4353 bp, Homo sapiens
attggaagaagaagcatagtatagaagaaaggcaaacacaacacattcaacctctgccaccatggggaactgggctgtgaatgaggggctctccatttttgtcattctggtttggctggggttgaacgtcttcctctttgtctggtattaccgggtttatgatattccacctaagttcttttacacaagaaaacttcttgggtcagcactggcactggccagggcccctgcagcctgcctgaatttcaactgcatgctgattctcttgccagtctgtcgaaatctgctgtccttcctcaggggttccagtgcgtgctgctcaacaagagttcgaagacaactggacaggaatctcacctttcataaaatggtggcatggatgattgcacttcactctgcgattcacaccattgcacatctatttaatgtggaatggtgtgtgaatgcccgagtcaataattctgatccttattcagtagcactctctgaacttggagacaggcaaaatgaaagttatctcaattttgctcgaaagagaataaagaaccctgaaggaggcctgtacctggctgtgaccctgttggcaggcatcactggagttgtcatcacgctgtgcctcatattaattatcacttcctccaccaaaaccatccggaggtcttactttgaagtcttttggtacacacatcatctctttgtgatcttcttcattggccttgccatccatggagctgaacgaattgtacgtgggcagaccgcagagagtttggctgtgcataatataacagtttgtgaacaaaaaatctcagaatggggaaaaataaaggaatgcccaatccctcagtttgctggaaaccctcctatgacttggaaatggatagtgggtcccatgtttctgtatctctgtgagaggttggtgcggttttggcgatctcaacagaaggtggtcatcaccaaggtggtcactcaccctttcaaaaccatcgagctacagatgaagaagaaggggttcaaaatggaagtgggacaatacatttttgtcaagtgcccaaaggtgtccaagctggagtggcacccttttacactgacatccgcccctgaggaagacttctttagtatccatatccgcatcgttggggactggacagaggggctgttcaatgcttgtggctgtgataagcaggagtttcaagatgcgtggaaactacctaagatagcggttgatgggccctttggcactgccagtgaagatgtgttcagctatgaggtggtgatgttagtgggagcagggattggggtcacacccttcgcatccattctcaagtcagtctggtacaaatattgcaataacgccaccaatctgaagctcaaaaagatctacttctactggctgtgccgggacacacatgcctttgagtggtttgcagatctgctgcaactgctggagagccagatgcaggaaaggaacaatgccggcttcctcagctacaacatctacctcactggctgggatgagtctcaggccaatcactttgctgtgcaccatgatgaggagaaagatgtgatcacaggcctgaaacaaaagactttgtatggacggcccaactgggataatgaattcaagacaattgcaagtcaacaccctaataccagaataggagttttcctctgtggacctgaagccttggctgaaaccctgagtaaacaaagcatctccaactctgagtctggccctcggggagtgcatttcattttcaacaaggaaaacttctaacttgtctcttccatgaggaaataaatgtgggttgtgctgccaaatgctcaaataatgctaattgataatataaataccccctgcttaaaaatggacaaaaagaaactataatgtaatggttttcccttaaaggaatgtcaaagattgtttgatagtgataagttacatttatgtggagctctatggttttgagagcacttttacaaacattatttcatttttttcctctcagtaatgtcagtggaagttagggaaaagattcttggactcaattttagaatcaaaagggaaaggatcaaaaggttcagtaacttccctaagattatgaaactgtgaccagatctagcccatcttactccaggtttgatactctttccacaatactgagctgcctcagaatcctcaaaatcagtttttatattccccaaaagaagaaggaaaccaaggagtagctatatatttctactttgtgtcatttttgccatcattattatcatactgaaggaaattttccagatcattaggacataatacatgttgagagtgtctcaacacttattagtgacagtattgacatctgagcatactccagtttactaatacagcagggtaactgggccagatgttctttctacagaagaatattggattgattggagttaatgtaatactcatcatttaccactgtgcttggcagagagcggatactcaagtaagttttgttaaatgaatgaatgaatttagaaccacacaatgccaagatagaattaatttaaagccttaaacaaaatttatctaaagaaataacttctattactgtcatagaccaaaggaatctgattctccctagggtcaagaacaggctaaggatactaaccaataggattgcctgaagggttctgcacattcttatttgaagcatgaaaaaagagggttggaggtggagaattaacctcctgccatgactctggctcatctagtcctgctccttgtgctataaaataaatgcagactaatttcctgcccaaagtggtcttctccagctagcccttatgaatattgaacttaggaattgtgacaaatatgtatctgatatggtcatttgttttaaataacacccaccccttattttccgtaaatacacacacaaaatggatcgcatctgtgtgactaatggtttatttgtattatatcatcatcatcatcctaaaattaacaacccagaaacaaaaatctctatacagagatcaaattcacactcaatagtatgttctgaatatatgttcaagagagagtctctaaatcactgttagtgtggccaagagcagggttttctttttgttcttagaactgctcccatttctgggaactaaaaccagttttatttgccccaccccttggagccacaaatgtttagaactcttcaacttcggtaatgaggaagaaggagaaagagctgggggaagggcagaagactggtttaggaggaaaaggaaataaggagaaaagagaatgggagagtgagagaaaataaaaaaggcaaaagggagagagaggggaagggggtctcatattggtcattccctgccccagatttcttaaagtttgatatgtatagaatataattgaaggaggtatacacatattgatgttgttttgattatctatggtattgaatcttttaaaatctggtcacaaattttgatgctgagggggattattcaagggactaggatgaactaaataagaactcagttgttctttgtcatactactattcctttcgtctcccagaatcctcagggcactgagggtaggtctgacaaataaggcctgctgtgcgaatatagcctttctgaaatgtaccaggatggtttctgcttagagacacttaggtccagcctgttcacactgcacctcaggtatcaattcatctattcaacagatatttattgtgttattactatgagtcaggctctgtttattgtttcaattctttacaccaaagtatgaactggagagggtacctcagttataaggagtctgagaatattggccctttctaacctatgtgcataattaaaaccagcttcatttgttgctccgagagtgtttctccaaggttttctatcttcaaaaccaactaagttatgaaagtagagagatctgccctgtgttatccagttatgagataaaaaatgaatataagagtgcttgtcattataaaagtttccttttttattctctcaagccaccagctgccagccaccagcagccagctgccagcctagctttttttttttttttttttttttagcacttagtatttagcatttattaacaggtactctaagaatgatgaagcattgtttttaatcttaagactatgaaggtttttcttagttcttctgcttttgcaattgtgtttgtgaaatttgaatacttgcaggctttgtatgtgaataattctagcgggggacctgggagataattcctacggggaattcttaaaactgtgctcaactattaaaatgaatgagctttcaaaaaaaaaaaaaaaaaaaaaaaaaaaaaaaaaaa

SEQ ID NO: 466 - DNA, 2445 bp, Homo sapiens
acctcgttcatctccttcacctccgaaatgatctcgcttttgggtttacggccggtctcttcacctggagcatcagccgggaaggtcagggtcgccctggctcgggcctgttcacattggggtcaaaggcacacattgggggctcaaccaaggcgagctgcgttcgcggggccgggtctttccgcacaggcggagggcggtggcgggcgcggaggcgtcgcgcgagccagggggcagccacgggccgggggtacctagcgccacccgcttcgcttgcatcagctgcgcgccccatcccgaggaatggtagaggcagccccgcccccggcccgcccccgcctttccattggctgccgcgcggggcggggagcggggtcggctcagtggccctgagaccctagctctgctctcggtccgctcgctgtccgctagcccgctgcgatgttgcgcgctgccgcccgcttcgggccccgcctgggccgccgcctcttgtcagccgccgccacccaggccgtgcctgcccccaaccagcagcccgaggtcttctgcaaccagattttcataaacaatgaatggcacgatgccgtcagcaggaaaacattccccaccgtcaatccgtccactggagaggtcatctgtcaggtagctgaaggggacaaggaagatgtggacaaggcagtgaaggccgcccgggccgccttccagctgggctcaccttggcgccgcatggacgcatcacacaggggccggctgctgaaccgcctggccgatctgatcgagcgggaccggacctacctggcggccttggagaccctggacaatggcaagccctatgtcatctcctacctggtggatttggacatggtcctcaaatgtctccggtattatgccggctgggctgataagtaccacgggaaaaccatccccattgacggagacttcttcagctacacacgccatgaacctgtgggggtgtgcgggcagatcattccgtggaatttcccgctcctgatgcaagcatggaagctgggcccagccttggcaactggaaacgtggttgtgatgaaggtagctgagcagacacccctcaccgccctctatgtggccaacctgatcaaggaggctggctttccccctggtgtggtcaacattgtgcctggatttggccccacggctggggccgccattgcctcccatgaggatgtggacaaagtggcattcacaggctccactgagattggccgcgtaatccaggttgctgctgggagcagcaacctcaagagagtgaccttggagctgggggggaagagccccaacatcatcatgtcagatgccgatatggattgggccgtggaacaggcccacttcgccctgttcttcaaccagggccagtgctgctgtgccggctcccggaccttcgtgcaggaggacatctatgatgagtttgtggagcggagcgttgcccgggccaagtctcgggtggtcgggaacccctttgatagcaagaccgagcaggggccgcaggtggatgaaactcagtttaagaagatcctcggctacatcaacacggggaagcaagagggggcgaagctgctgtgtggtgggggcattgctgctgaccgtggttacttcatccagcccactgtgtttggagatgtgcaggatggcatgaccatcgccaaggaggagatcttcgggccagtgatgcagatcctgaagttcaagaccatagaggaggttgttgggagagccaacaattccacgtacgggctggccgcagctgtcttcacaaaggatttggacaaggccaattacctgtcccaggccctccaggcgggcactgtgtgggtcaactgctatgatgtgtttggagcccagtcaccctttggtggctacaagatgtcggggagtggccgggagttgggcgagtacgggctgcaggcatacactgaagtgaaaactgtcacagtcaaagtgcctcagaagaactcataagaatcatgcaagcttcctccctcagccattgatggaaagttcagcaagatcagcaacaaaaccaagaaaaatgatccttgcgtgctgaatatctgaaaagagaaatttttcctacaaaatctcttgggtcaagaaagttctagaatttgaattgataaacatggtgggttggctgagggtaagagtatatgaggaaccttttaaacgacaacaatactgctagctttcaggatgatttttaaaaaatagattcaaatgtgttatcctctctctgaaacgcttcctataactcgagtttataggggaagaaaaagctattgtttacaattatatcaccattaaggcaactgctacaccctgctttgtattctgggctaagattcattaaaaactagctgctcttaaaaaaaaaaaaaaaaaaaaaaaaaaaaaaaaaaaaaaaaaaaaaaa

SEQ ID NO: 467 - DNA, 2759 bp, Homo sapiens
gtctcctcggccgacaagctctcgcgagacgagccgtgcaggctgaaaaaatggcgccacccagtacccgggagcccagggtcctgtcggcgaccagcgcaaccaaatccgacggagagatggtgctgccaggcttcccggacgccgacagctttgtgaagtttgctcttgggtccgtggtggcagtcaccaaggcatctgggggcctaccacagtttggcgatgagtatgatttttaccgaagttttcctggcttccaagcattttgcgaaacacagggagacaggttgcttcagtgcatgagcagagtaatgcagtaccatgggtgtcgcagcaacattaaggatcgaagtaaagtgactgagctggaagacaagtttgatttactagttgatgccaatgatgtaattctggagagagtgggtattttactggatgaagcctcaggtgtaaacaagaatcaacagcctgtcctccctgccggcttgcaggtccccaaaacggtagtgtccagctggaaccgtaaggcagcagaatatggcaaaaaagcaaaatctgaaactttccggctgcttcatgcaaaaaatatcatccgacctcagctcaagtttcgagagaagattgacaattccaacacaccatttcttcctaaaatcttcatcaaacccaatgctcagaaacctctccctcaagctctctctaaggaaaggcgggaacgcccacaggatcgtcctgaggacttggacgtcccccctgcactggctgatttcatccatcagcagagaacccagcaggttgagcaagacatgtttgcacatccttatcaatatgaactaaatcactttaccccagcagatgcagtgcttcaaaagccacaaccccagttatacagacctatagaagagacaccatgccatttcatatcctccctggatgaactcgtggaactcaacgaaaagctcttgaattgtcaggaatttgcagttgacttggagcaccactcttacaggagcttcctgggactgacctgcctgatgcaaatttctactcggacggaagacttcatcattgacaccctcgagcttcgaagtgacatgtacattctcaatgagagcctcacagacccagccatcgttaaggtctttcatggtgctgattcagacatagaatggctacagaaagactttgggttgtatgtagtaaacatgtttgatactcatcaggcagcacgccttcttaacctgggcaggcactcactcgatcatctcctgaaactctactgcaacgtggactcaaacaagcaatatcagctggctgattggagaatacgccctctgcccgaggagatgctcagctacgcccgggatgacacccattacctgctatatatctatgacaaaatgaggctggagatgtgggagcgcggcaacgggcagccggtgcagctgcaggtggtgtggcaacggagcagggacatctgcctcaagaaattcatcaaacctatcttcacggatgagtcctaccttgaactctataggaagcagaagaagcaccttaacacacagcagttgacagcctttcagctgctgtttgcctggagggataaaacagctcgcagggaagatgaaagttacggatatgtactgccaaaccacatgatgctgaaaatagctgaagaactgcctaaggaacctcagggcatcatagcttgctgcaacccagtaccgccccttgtgcggcagcagatcaacgaaatgcaccttttaatccagcaggcccgagagatgcccctgctcaagtctgaagttgcagccggagtgaagaagagcggaccgctgcccagtgctgagagattggagaatgttctctttggacctcacgactgctcccatgcccctccggatggctatccaatcatcccaaccagtggatctgtgccagttcagaagcaggcgagcctcttccctgatgaaaaagaagataacttgctgggtaccacatgcctgattgccacagctgtcatcacgttatttaatgaacctagtgctgaagacagtaaaaagggtccattgacagttgcacagaaaaaagcccagaacatcatggagtcctttgaaaatccatttaggatgatcagcaaccgctggaagctggcccaggtacaagtacaaaaagactctaaagaagctgtcaagaagaaggcagctgagcaaacagctgcccgggaacaggcaaaggaggcgtgcaaagctgcagcagaacaggccatctccgtccgacagcaggtcgtgctagaaaatgctgcaaagaagagagagcgagcaacaagcgacccaaggaccacagaacagaaacaagagaagaaacgactcaaaatttccaagaagccaaaggacccagagccaccagaaaaagagtttacgccttacgactacagccagtcagacttcaaggcttttgctggaaacagcaaatccaaagtttcttctcagtttgatccaaataaacagaccccgtctggcaagaaatgcattgcagccaaaaaaattaaacagtcggtgggaaacaaaagcatgtcctttccaactggaaagtcagacagaggcttcaggtacaactggccacagagatagtcctggaagacacgtggcgcctgtggaccggaagcaccaaatgctggtgctgcttttgtacatacatatttttaaaccattaaaattcttcctgaagaaaaaaaaaaaaaaaaaaaaaaaaaaaaa

SEQ ID NO: 468 - DNA, 12227 bp, Homo sapiens
tgagctgcgaggcccgagagtcagaacctgggggagagggatggtctctgcacgggggggagccggaggagccgccgccgctgccgacgccaccgccgcagccgccgccgccgccgccccggcacccgcctcccggcgctgacggtctcgtacgaagccggcgagggggagccagcagcggcggtcgccggcacgccgcccagcatggtccgggaaaccaggcatctctgggtgggcaacttacccgagaacgtgcgggaagagaagatcatcgagcatttcaaacgatatggccgcgtggaaagtgtcaaaattcttcccaagaggggatctgaaggaggagtggctgcctttgtggattttgtggacatcaaaagtgcacagaaagctcacaactcggtcaacaaaatgggtgacagagacctacgcacggattataatgaaccaggcaccatcccgagtgctgctcggggattggatgatacagtttccatagcatctcgtagtagagaggtttctgggttcagaggaggtggtggagggcctgcttatggtcccccaccgtcacttcatgcacgagaaggacgttatgagcggagacttgatggggcttcagataacagggagcgtgcttatgaacatagtgcctatggacaccatgaacgggggacgggaggatttgatcggacaagacattacgatcaggattactatagagatcctcgagagcggactttacaacatgggctctattacgcttctcggagtcgaagtccaaatcgctttgatgctcatgacccccgatatgaacctagggctcgcgagcagtttacactgcccagtgtggtacacagggatatctacagggatgatattacccgggaggtacgaggcagaaggccagagcggaattaccagcacagcaggagtcggtcaccacattcatcccagtctagaaatcagtctcctcagagactggctagccaagcatctagacccacaaggtcccctagcggcagcggctctagaagtagatcctccagtagtgattcaatcagcagcagcagtagtaccagcagtgacagcagtgattccagcagtagttcaagtgatgattctccagctcgatcagttcagtctgcagcagtccctgcacccacttcccagttgctttcatctctggaaaaagatgagccccgtaaaagttttggcatcaaggtccagaatcttccagtacgctctacagatacaagccttaaagatggccttttccatgaatttaagaaatttggaaaagtaacttcagtgcagatacatggaacttcagaagagaggtatggtctggtattctttcggcagcaagaggaccaagaaaaagccttgactgcatcaaaaggaaaacttttctttggcatgcagattgaagtaacagcatggataggtccagaaacagaaagtgaaaatgaatttcgccccttggatgaaaggatagatgaatttcaccccaaagcaacaagaactctctttattggcaaccttgaaaaaaccactacttaccatgaccttcgcaacatcttccagcgctttggagaaattgtggatattgacattaagaaagtaaatggagttcctcagtatgcgtttctgcaatactgtgatattgctagcgtttgtaaagctattaagaagatggatggggaatatcttggaaataatcgcctcaagctgggttttggaaagagcatgcctacaaactgcgtgtggctagatgggctttcttcgaatgtgtcagatcagtatttaacacgacatttctgccgatatgggcctgtggtaaaggtggtgtttgaccgcttaaaaggcatggccctggttctctacaatgaaattgaatatgcacaagcagctgtaaaagagaccaaagggaggaaaatcggtgggaataaaattaaggtggattttgcaaatcgggaaagtcagctggctttttatcactgcatggagaaatctggtcaagacatcagagacttttatgaaatgttagccgaaagaagagaggaacgaagggcatcctacgactataaccaagatcgtacatattatgagagtgttcgaactccaggcacttatcctgaggattccaggcgggactatccagctcgagggagagagttttattcagaatgggaaacttaccaaggagactactatgaatcacgatactacgatgatcctcgggaatacagggattacaggaatgatccttatgaacaagatattagggaatatagttacaggcaaagggaacgagaaagagaacgtgaaagatttgagtctgaccgggacagagaccatgagaggaggccgattgaacgaagtcaaagtcctgttcacttgcgacgtccacagagtcctggagcgtctccctctcaggcagagaggttgccgagtgattctgagaggaggctttacagccgatcctcagaccggagtggaagctgtagctcactctcccctccaagatatgagaaactggacaagtctcgtttggagcgctatacaaaaaatgaaaagacagataaagaacgaacttttgatccggagagagtggagagagagagacgcttaatacggaaggaaaaagtggaaaaggacaaaactgacaagcagaaacgcaaaggaaaggttcactcccctagttctcagtcttcagaaacggaccaagaaaatgagcgagagcaaagccctgaaaagcccaggagttgtaataaactgagcagagagaaagctgacaaagagggaatagcgaaaaaccgcctggaactcatgccttgcgtggttttgactcgagtgaaagagaaagagggaaaggtcattgaccacactcctgtggaaaagttgaaagccaagcttgataatgacactgtcaaatcttctgccctggaccagaaacttcaggtctctcagacggagcctgcaaaatctgacttgtctaaactggaatcagttagaatgaaagtaccaaaggaaaaggggctttcaagccatgttgaagtggtggagaaggaaggcaggcttaaagccaggaagcacctcaagcctgagcagcctgcagatggggtaagtgctgtggatctggagaagctggaagccaggaaaaggcgctttgcagattccaatttaaaagcagaaaagcaaaaaccagaggtcaagaaaagcagtccagagatggaggatgctcgcgtgctttcaaaaaagcagcctgacgtgtcctctagagaggtcattctgctgagggaaggagaggctgaaagaaagcctgtgaggaaagaaattcttaaaagagaatctaaaaaaatcaaactggacagacttaatactgttgccagccccaaagactgtcaggagcttgccagtatttctgttgggtctggctcaaggcccagctcagacctacaagcaagactgggagaactagcaggtgaatctgtggaaaatcaagaagtccaatcaaaaaagcccattccctcaaaaccacagctcaaacagctgcaggtattagatgatcaaggaccagagagagaagacgttaggaaaaactattgcagtcttcgtgatgaaacacctgaacgtaaatcaggccaagagaaatcacattcagtaaatactgaagaaaaaattggcattgacatcgatcacacgcagagttaccgaaaacaaatggaacagagtcgtaggaaacagcagatggaaatggaaatagccaagtctgagaagtttggcagtcctaaaaaagatgtagatgaatatgaaagacgtagcctcgttcacgaggtaggcaaaccccctcaagatgtcactgatgactctcctcctagcaaaaagaaaaggatggatcatgtcgattttgatatctgcaccaagcgagaacggaattacagaagttcacgccaaatcagcgaagattctgaaaggactggtggttctcccagtgtccgacatggttccttccatgaagatgaggatcccataggctcccctaggctactgtcagtaaaagggtctcctaaagtagatgaaaaagtcctcccctattctaacataacagtcagggaagagtctttaaaatttaatccttatgattctagcaggagagaacagatggcagatatggccaaaataaaactatctgtcttgaattctgaagatgaactaaatcgttgggactctcagatgaaacaggatgctggcagatttgatgtgagtttcccaaacagcataattaagagagatagccttcgaaaaaggtctgtacgagatctggaacctggtgaggtgccttctgattctgacgaagatggtgaacacaaatcccactcacccagagcctctgcattatatgaaagttctcgattgtcttttttattgagggacagagaagacaagctacgtgagcgagatgaaagactctctagttctttagaaaggaacaaattttactcttttgcattggataagacaatcacaccagacactaaagctttgcttgaaagagctaaatccctctcttcatctcgtgaagaaaattggtcttttcttgattgggactcccgatttgcaaattttcgaaacaacaaagataaagaaaaggttgactctgctccaagacctattccatcctggtacatgaaaaagaagaaaattaggactgattcagaagggaaaatggatgataagaaagaggaccataaagaagaagagcaagagaggcaggaattgtttgcttctcgttttttacacagctcaatctttgaacaagattccaagcgattgcagcatctagagagaaaagaggaagattctgacttcatttctggtaggatctatgggaagcagacatctgagggagcaaacagcacaactgattccattcaagaaccagtagttctgttccatagcagatttatggagctcacacggatgcaacagaaagaaaaagaaaaagaccagaaacccaaagaggttgagaaacaggaagatacagagaatcatcccaagaccccagaatctgctcctgagaataaagattcagaactgaaaactccaccttccgttgggcctccaagtgtcacagtcgtaactctagaatcagccccatcagcactagagaagaccactggtgacaaaacggtagaggcgcctttggtaacagaagagaagactgtggagccagctaccgtctcagaagaagcaaagcctgcatctgaacctgctcctgcccctgtggaacagctggaacaagtagacctgcccccaggagcagaccccgataaagaagctgccatgatgcctgcgggtgttgaggaaggttcatcaggtgaccagccgccttatctggatgccaagcctccaactcccggggcctcgttttcccaggcagagagcaacgtagatccagagcctgacagtacccagccactttcaaaaccagctcagaagtctgaggaagccaatgagccaaaggccgaaaagccagacgccactgcagatgctgagcctgatgcaaaccagaaagccgaagctgctcctgagtctcagcccccagcttctgaagatttagaggttgatcctccagttgctgcaaaggataaaaagccaaacaaaagcaagcgttcaaagacccctgttcaggcagctgcagtgagtatcgtggagaagcccgtcacaaggaagagtgagaggatagaccgggaaaaactcaagcggtccaattctcctcggggagaagcacagaagcttttggaattgaagatggaggcagagaagattacaaggactgcttctaaaaactctgctgcagaccttgaacatcccgaaccaagtttgcctctcagccgaacaaggcgccggaatgtaaggagcgtctatgcaaccatgggtgaccatgaaaaccgctctcctgtcaaagagcccgttgagcaaccaagagtgaccagaaagagattggagcgagagcttcaggaggctgcagcggttcccaccacccctcggaggggaaggcctccaaagacacgccggcgagccgatgaagaggaggagaacgaggccaaggaacctgcagaaacactcaagccacctgagggatggcggtcgccaaggtcccagaaaactgcagctggtggtggaccccaagggaaaaagggaaaaaatgaaccgaaggtggatgctacacgtcctgaggccaccactgaggtgggcccccaaataggcgtgaaagagagctccatggaacccaaggctgctgaggaggaggcagggagtgaacagaaacgtgacagaaaagatgctggcacagacaaaaacccccctgaaaccgcccctgttgaagttgtagagaaaaaaccggcccctgaaaaaaactccaaatcaaagagaggaagatctcgaaactccaggttagcagtggacaaatctgcaagtctgaaaaatgtggatgctgctgtcagtcccaggggggctgcagcacaggcaggggagagggaatctggggtggtggcagtctcccctgagaaaagtgagagtccccaaaaggaggatggtttatcatcccagttgaaaagtgatccagttgatccagacaaggaaccagagaaagaagacgtgtctgcctctgggccgtccccagaagccacccagttagccaagcagatggagctggagcaggccgtggaacacatcgcaaagctcgctgaggcctctgcctctgctgcctataaggcagatgcaccagagggccttgccccagaggacagggacaagcctgcacaccaagcaagtgaaacagagctggctgcggccatcggctccatcatcaatgacatttctggggagccagaaaacttcccagcacctccaccttatcctggagaatcccagacagatctgcaaccccccgcaggtgcacaggcgctgcagccttctgaggaaggaatggagacagatgaggctgtatctggcatcctggaaactgaggctgctacagaatcttctaggcctccagtcaatgctcctgacccctcagccggcccaacagataccaaggaagccagaggaaatagcagtgaaacctcacactcagtgccagaagccaaagggtctaaagaagtggaagtcactcttgttcggaaagacaaagggcgccagaaaacaacccgatcacgccgcaagcgaaacacaaacaagaaagtggtggctcctgtagagagccatgtccctgaatccaaccaagctcaaggtgagagtcctgctgcaaatgaggggacaacagtacagcaccccgaagccccacaggaagaaaagcagagtgagaaaccccattccactcctcctcagtcatgtacttctgacctaagcaagattccctccacagagaattcgtcccaagaaatcagtgttgaggaaaggactccaaccaaagcatctgtgcccccagaccttcccccacctccccagccagcaccggtggatgaggagcctcaagccaggttcagggtgcattccatcattgaaagtgacccggtgaccccacccagcgatccaagcatccccatacccacactgccttctgtaactgcagcaaagctctcacctcctgtcgcctctggggggatcccacaccagagcccccctactaaggtgacagagtggatcacaaggcaggaggagccacgggctcagtctactccatctccagctcttcccccagacacaaaggcctctgatgttgacaccagctccagcaccctgaggaagattctcatggaccccaagtatgtgtctgccacaagtgtcacttccacaagtgtcaccacagccattgcagagcctgtcagtgctgccccttgcctacatgaggccccgcccccgccagttgactctaaaaagcctttagaagaaaaaacagcacctccagtgacaaacaactctgagatacaagcctcggaggtgctggtagctgctgacaaggaaaaggtggctccagtcattgctcccaaaattacctctgttattagccggatgcctgtcagcattgacctggaaaattcacagaagataaccttggcaaaaccagctcctcaaaccctcactggtctggtgagcgcactcactggcctggtgaacgtctccctggtcccggtgaatgccctgaaaggccccgtgaagggctcagtgaccacactgaaaagtttggtgagcacccctgctgggcccgtgaacgtcctgaaagggcctgtgaatgttcttacggggccagtgaatgttctcaccactccagtgaacgccacggtgggcacagtgaatgccgccccaggcacagtcaatgccgctgcgagtgcagtgaatgccacagcaagtgcagtgaccgtcacagcgggtgcggttactgctgcatctggtggtgtaacggccacaacaggcacggtgacaatggcaggggcagtgattgcgccgtcaacaaagtgcaaacagagagcgagtgctaatgaaaacagtcggttccacccagggtccatgcctgtgatcgacgatcgtccggcagacgcgggctcaggggcggggctgcgtgtgaacacttctgaaggggttgtgctcctgagttactcagggcagaagaccgaaggcccacagcggatcagcgccaagatcagccagatccccccggccagtgcaatggacattgaatttcagcagtcagtgtccaagtcccaggtcaaacctgattctgtcacagcatcgcagcctccatccaaaggccctcaagctcctgcaggctatgcgaacgtggccacccattccacgttggtactgaccgcccagacatataatgcctctcctgtgatttcgtctgtgaaggccgataggccatccttggagaagcccgagcccattcacctctcggtgtccacgcctgtcacccagggaggcacagtgaaggttctcacccaggggatcaacacaccccctgtgctggttcacaaccagctggtcctcaccccaagcattgtcaccacaaacaagaagcttgctgaccccgtcacccttaaaatcgagaccaaggtccttcagccggccaacctggggtccacgctcacgccccaccaccctcctgctctgcccagcaaactgcctacagaagtcaaccatgtcccctcggggcccagcatcccagcagatcgaactgtctcccatttggcagctgcaaagctagatgctcattctcctcgaccaagtggacccgggccatcctcattcccaagggcaagccaccccagcagtactgcatctacggcgctctccaccaacgccacagtcatgctggctgcaggcatcccagtgccccagttcatctccagcatccacccagagcagtctgtcatcatgccaccccacagcatcacccagactgtgtccctgagccacctctcccagggcgaggtgagaatgaacactcccacgctgcccagtatcacctacagcatccggccagaagcgcttcactctcctcgggctccgctgcagccccagcaaatagaggtcagggccccacagcgtgccagcaccccgcagccagccccagctggtgtgcctgcactggcctcccagcaccctcccgaggaggaagtgcattatcaccttcctgtcgctcgagccacagcccctgtgcagtcagaggtactagtcatgcagtctgagtaccgactgcacccctatactgtgccacgggatgtgaggatcatggtgcatccacatgtgacggcagtcagcgagcagcccagggccgcggatggggtggtgaaggtgccaccagccagcaaggcccctcagcagccagggaaggaagctgccaagacaccagatgccaaagctgcccccacccccacccctgcccccgtccctgtccctgtcccccttcctgcccctgctcctgcccctcatggtgaggcccgtatcctcacagttacccccagtaaccaactccaggggctgcctctgacccctcctgtggtggtgacccatggggtgcagattgtgcactccagcggggagctgtttcaagagtaccggtacggcgacatccgcacctaccaccccccggcccagctcacacacactcagtttcccgccgcttcctctgttggcctgccttcccggaccaagacagctgctcagggccctcctcctgaaggtgagcccctgcagcctcctcagcctgtgcagtccacacagcctgcccagcctgcaccaccctgcccgccctcccagctcggtcagcccggccagccaccaagcagcaagatgcctcaagtgtcccaggaggcaaaggggacccagacgggagtagagcagcctcgcctcccagctggacctgcaaacaggccacctgagcctcacacccaggttcagagggcacaagcagaaacaggcccgacttccttcccctcccctgtgtctgtctccatgaagcctgaccttccagtctctcttcccactcagactgccccaaaacagccgttgtttgtcccaacaacctctggccccagcaccccaccaggactggttctgccacacactgaattccagccagcccccaaacaagattcctctccacacctgacttcccagagacccgtggatatggttcaacttctgaagaagtaccccatcgtgtggcagggcctgctggccctcaagaatgacacagctgctgtgcagctccacttcgtctctggcaacaacgtcctggcccatcggtccctgcccctttctgaaggagggcccccactaaggatcgcccagaggatgcggctggaggcaacgcagctggaaggggttgcccgaaggatgacggtggagacagattactgtctgctgctggctctgccctgtggccgtgaccaagaggatgttgtgagccagaccgagtccctcaaggctgccttcatcacttacctgcaggccaagcaggcggcagggatcatcaacgttcccaaccctggctccaatcagcctgcctacgtgctgcagatcttcccgccctgtgagttctctgagagtcacctgtcccgcctggcccctgacctccttgccagcatctccaacatctctccccacctcatgattgtcattgcctccgtgtgagccactgagtggttatcacctcagtgaatcttcccagggctctgcagtaaaaacaaaggacaacccagccaagcagaggaagaagctgccgaaggggacagactccactgccagacggccagccgtttgctgtcctgccgcccggctcagtcggccagacttcctctaggagtggtgctgctaccttgtatgtttacataatgctttagcccaaggacacatcaccaacccatggactcgcagacaccggggctgggtttctctttcctctttttggagaaaaggaacagggcagtggaatgaaaattttttgtttgtttgtttttaagaaacaagaaaacagaactgcctttgcactaaattagtgacttggacttttgcccagtgaagacaggctgtgacactctggatgtcttggtgtgtgtagacacacattgcagactcttaacgcaggaaggacttcaaacttctgctgagaccttggggtcaaggaacatttcattggttttttttgtccacccccatctcccttgctcatttggatgcgtcaccttaattctcctgctgccaccgtctttgattcaccgggatgtacagtttacagttgaagagcaaacagaaaggttttctcttggtgggatatgcagaacttgggatgtgtgtatatataaatatataatatatataaatatatataatactgacttaaaaaatcaaatcccccgacatacgttttttttaatctgtgccaaaaatgtgttttcagaggaaatcttattttcatattcagactttgtattgcccactcatttgtataagtgcgcttcggtacagcacgggtcctgctcccgcgatgtggaagtgtcacacggcacctgtacaaaaagactggctaacccctcttcctattaccttgatctcttcccccaacttcctaacacttattaatttatgaaactgtttttctcagcgcagttttgttttgtgtgtccattggattacaaactttattaaaaaatataaaacac

SEQ ID NO: 469 - DNA, 992 bp, Homo sapiens
cctttttgggcgtggaaagatggcggtaaaagccacaatgcgcaggcgtcatcgctcacttctcccctcccggcttctgctccacctgacgcctgcgcagtaagtaagcctgccagacacgctgtggcggctgcctgaagctagtgagtcgcggcgccgcgcacttgtggttgggtcagtgccgcgcgccgctcggtcgttaccgcgaggcgctggtggccttcaggctggacggcgcgggtcagccctggtttgccggcttctgggtctttgaacagccgcgatgtcgatcttcacccccaccaaccagatccgcctaaccaatgtggccgtggtacggatgaagcgcgccaggaagcgcttcgaaatcgcctgctacagaaacaaggtcgtcggctggcggagcggcttggaaaaagaccttgatgaagttctgcagacccactcagtgtttgtaaatgtttcctaaggtcaggttgccaagaaggaagatctcatcagtgcgtttggaacagatgaccaaactgaaatctattttgactaaaggagaagttcaagtatcagataaagacacacacaactggagcagatgtttagggacattgcaattattgtggcagacaaatgtgtgactcctgaaacaaagagaccatacaccgtgatccttattgagagagccatgaaggacatccactatttggtgaaaaccaacaggagtacaaaacagcaggctttggaagtgataaagcagttaaaagagaaaatgaagatagaacgtgctcacatgaggcttcagttcatccttccagtgaatgaaggcaagaagctgaaagaaaagctcaagccactgatcaaggtcatagaaagtaaagattatggccaacagttagaaatcgtaagagtcaaatattttctttgcttcatgttacctaaatattgtattctctagtaataaatttgtagcaaacattcaaaaaaaaaaaaaaaaaaaa

SEQ ID NO: 470 - DNA, 1678 bp, Homo sapiens
agagcactgctgcggccgccgccattttagcgttttgtcagaagcgtccgcgccgcgaggaggaggccctgctggtttctgtgcgggctcttgtcaggatggtgaagctgttcatcggaaacctgccccgggaggctacagagcaggagattcgctcactcttcgagcagtatgggaaggtgctggaatgtgacatcattaagaattacggctttgtgcacatagaagacaagacggcagctgaggatgccatacgcaacctgcaccattacaagcttcatggggtgaacatcaacgtggaagccagcaagaataagagcaaaacctcaacaaagttgcatgtgggcaacatcagtcccacctgcaccaataaggagcttcgagccaagtttgaggagtatggtccggtcatcgaatgtgacatcgtgaaagattatgccttcgtacacatggagcgggcagaggatgcagtggaggccatcaggggccttgataacacagagtttcaaggcaaacgaatgcacgtgcagttgtccaccagccggcttaggactgcgcccgggatgggagaccagagcggctgctatcggtgcgggaaagaggggcactggtccaaagagtgtccgatagatcgttcaggccgcgtggcagacttgaccgagcaatataatgagcaatacggagcagtgcgtacgccttacaccatgagctatggggattcattgtattacaacaacgcgtacggagcgctcgatgcctactacaagcgctgccgtgctgcccggtcctatgaggcagtggcagctgcagctgcctccgtgtataattacgcagagcagaccctgtcccagctgccacaagtccagaatacagccatggccagtcacctcacctccacctctctcgatccctacgatagacacctgttgccgacctcaggagctgctgccacagctgctgctgcagcagcagccgctgctgctgttactgcagcttccacttcatattacgggcgggatcggagccccctgcgtcgcgctacagccccagtccccactgttggagagggctacggttacgggcatgagagtgagttgtcccaagcttcagcagccgcgcggaattctctgtacgacatggcccggtatgagcgggagcagtatgccgatcgggcgcggtactcagccttttaaagcttgaggtgggatgtgtgtgggctgaaattccgagctgcggttgtgcatgagaatacacccttcgtggtaccccatctccgggacgttctcggctctgtgcgttcagtccctcaggaaccgtggaccttaatttaccttgctaagttcagaccttctcttcctttcctttcctttcctctcctgcccattttcctgttcttctgtccttcaatacttctgtagcttcccattcatgttctcttctcccagcaggcctcattgtgtgcagaaactgtggtgggggctgtgctgtctcctccctgcctcctgcctcctgcggctgttggatttgggaatgaccttggtgagagtctcactgctccagggtctctttttggtccaaaggctagacctatagagttggatcactttttttctttccggtgaaataaatggtttttcaacttagaaaaaaaaaaaaaaaaaaaaaaaaaaaaaaaaaa

SEQ ID NO: 471 - DNA, 4678 bp, Homo sapiens
agtctcgtccggagactggcagcggcggcggcggcggcggccggagctcgagccccagcggctgagggcgggcgggcgggcgcgggggagggaggggggccggtccgcgacgactccccggacggcgtttctcctccgagcggcgccggtttcggcttggggggggcggggtacagcccatccatgaccatgggcgacaagaagagcccgaccaggccaaaaagacaagcgaaacctgccgcagacgaagggttttgggattgtagcgtctgcaccttcagaaacagtgctgaagcctttaaatgcagcatctgcgatgtgaggaaaggcacctccaccagaaaacctcggatcaattctcagctggtggcacaacaagtggcacaacagtatgccaccccaccaccccctaaaaaggagaagaaggagaaagttgaaaagcaggacaaagagaaacctgagaaagacaaggaaattagtcctagtgttaccaagaaaaataccaacaagaaaaccaaaccaaagtctgacattctgaaagatcctcctagtgaagcaaacagcatacagtctgcaaatgctacaacaaagaccagcgaaacaaatcacacctcaaggccccggctgaaaaacgtggacaggagcactgcacagcagttggcagtaactgtgggcaacgtcaccgtcattatcacagactttaaggaaaagactcgctcctcatcgacatcctcatccacagtgacctccagtgcagggtcagaacagcagaaccagagcagctcggggtcagagagcacagacaagggctcctcccgttcctccacgccaaagggcgacatgtcagcagtcaatgatgaatctttctgaaattgcacatggaattgtgaaaactatgaatcagggtatgaaattcaaaacctccacctgcccatgctgcttgcatccctggagaatcttctgtggacatcgacctcttagtgatgctgccaggataatttctgcttgccatgggcatctggccaccaaggaatttcgcaccctgacgattactcttgacacttttatgtattccattgttttatatgattttcctaacaatcatttataattggatgtgctcctgaatctactttttataaaaaaaaaaaaatctgctgtgcacaattttccatgtacattacaactggttttttgtttttgttttgttgccggtggggagggctgggagggggagggaacttttatttattgtgttcacaaactccatcctttcagcatatccttttaagtttagttctttcttccagttatactatgtactatcagttttgatataactatatatatataaatataaaattatatataaagggttatttgaaaccaatccatggcaacgctggtgcttgatacactgtgaagtgaatacaacattgaacagttacagatctgggacagtcccttctatgaaagtgctgaaatttaattaaaatcagtcttatatgaagtatgttccaatccatgtgggaacttgactctctcatctgtctaaagagtactggacgatataaaaatatatattttttaaacaatgtgatctcaaatttaaagactgctccagatagcctgcatttgcaatggaataactgacaaatcacaagtggtttagttgggcagggctttgatcattcaaaagtaactaaagtagctccagaatgccaagtattcgtgtaaattacggttacatgttatcatttgctgttcttacataagcactcatgaaaatatggtattctgtaacttgaattccatccattttccagacctctactcatgtctgaggtaaatctagaaattgtcttagttttaggattgaaacagtctataaactgtatttttggtccatccaggaagctagtcccttgtttctcctttctacatgacattgcagtggtggtttctgtaattaaaatttgtttgcctcatgtccctttgtctgataaaccttcactctaccgattcagttgtgagcattctttttttccttctcaaaacctactatgatttgttttactgaacaaaggttatcaaccacacatccagtcctgacatggagcttttcagtgtttggagacatttctcaatcccctgctgtggtaggaactccagtggtgaacggcttgcgcgcctgcagccagagttgcagggaaagctcgtacttactgcgagcagcatgtaatcttttttcttcctggacataaagatagcttgagtaaactgttctatttcattctcttcactctttttactgtcttgcaaaaaaaaaaaaaaaaaaaataatcaaagaccactaataagattccacctctccttattaaaataattttttaaaattttgttttgcttttgtttggatgtggggtctctcttctatttgacttttacatttagatacagagtttgtagtacttcagagacatttcaagcatgagaatttgaggttacctctctttatttgacctttagggactcacgggagggcagcctgatttgtaatgaagcaccacattttggtgttaaaaacctggtttgcttaataatagcagtaatttctgtctgtggaggcaacaaataaaaaaattaacagcttgaattgagtagccaacaggaaaggttcctttcacatttacattaaaactattctgtagtcactaatgtaccataatttaaattcttttctcaaaggtatagattataaagcagtgccatttgttgctgtggtcctattctcaaatgcatggacaatgttcccccctttttaaaataatgcttgtgtctgggatgcaagctttgcttatctttttaaatacatttttaaagtatttattaatgaaccaaaggaaatcagatgctttctataagcatcagaatatataatacatagtgatttgactatgaattttaaatccacattttaatattggtgggatattgcaaagacattccttctaaagttttaatattccttttattaagggtctcagggagggtaaattagtcagccatatttattttccagaggtttaagaaattgctgtttttaactttttgaaaaaacttaaatgccaccaaactcatgtaggttgcactgcttattgaaccaataactgttggtatgcactttgttcagacacactgtgtactttttcaaaaactagtttcatgtaaagtgattggaccccatagattagtggaaaaagctgattaaccagctactcataggctgctaattcattcatgccaatgttttggtttttcagttttgcctccgtgataaattaaagaatggggaggggtgaaggaaggggaagaagattgctttagaacaagtggcatgaaattaccatctttgtagaaaccgcagctaacagtgggagttatctaagcaatcagatgttacagggccagccctttagctgctgtggtgtattctgttgggtagtgaggtagtaggtactttatagacttttaattttggaaattgatgacatccctcaggcatgtattctggaaatggaattcctgtaacttcctgtgtctgcagtatgccctacaattagtaggcagcgtgtaaaaacactagtgtagattataaagatatacattaaaagaggaccagaaatacttggtattcagtggcacagaaagcaggttaaacaaacaaaaagcacagtgttacgcttgcaagtttccatttgttttaataccacgcaatctttcacactcgtgcgtgtgcgcgcacacagagcttacctgacttgctctgcttgagtcatgcagttacaaaaaaaaagacatcttgacacccacacaatattctaatcaaaacctttcagtttcaatctggatatttaaaaacattggcagaagcttctgtgagtttagttccactaagatgtttcacctgccttatcaagaccattctcagtctacttttttaagctaccgtatcttaaattattgaaaatttattaattgctgaatatataataacctttgcttgtatgtaaccgaaaatggtttaagagccaacatttagagtatgacaatggagctgaacagtttttaatgcgcaagcagttctgttcttgtgtatgacttgtaaccttaatttactgtgtaaagatggttacattatttccttagctttgtttgttggagacaaatagagaatgcttgttaagtatgtcaaaacaatcttatcttgtgaatttttgttaatgtattatacgagctatatttttcatttgcccagaaagacagcttgtataacgcttttggaagtttctgctctgtaatgtctttagagctgacagtctgttaggtttgtttttttcttcatgctaaagtgtcagttggtggttttgtgaactggtcaaaaattcacaggtcttaaatgttttgggggaaatttatattggacactgctctttgtctagcaaataaaagatgttaatatattcctgttactggcatgtgcacgactatgttattagaagccactttatcattttcctgctttaaatagaaatgtctatttatgaattctgcttgtagttttttcacaaataaaatagtaaaatttacattggaaatcttaaaaaaaaaaaaaaaa

SEQ ID NO: 472 - DNA, 453 bp, Homo sapiens
gagtagatatcccggagttccgcgcggcgccagcccttccgccacggccgtctctggagagcagcagccatggccctacgctaccctatggccgtgggcctcaacaagggccacaaagtgaccaagaacgtgagcaagcccaggcacagccgacgccgcgggcgtctgaccaaacacaccaagttcgtgcgggacatgattcgggaggtgtgtggctttgccccgtacgagcggcgcgccatggagttactgaaggtctccaaggacaaacgggccctcaaatttatcaagaaaagggtggggacgcacatccgcgccaagaggaagcgggaggagctgagcaacgtactggccgccatgaggaaagctgctgccaagaaagactgagcccctcccctgccctctccctgaaataaagaacagcttgacagaaaaaaaaaaaaaaaaaaaaaa

SEQ ID NO: 473 - DNA, 3236 bp, Homo sapiens
agagccaggaagcgggagccgggacccagggcccgggatcgccgagcccgacctcgggcgccccgccggtcacctccgcgcggacaccagccctgcagagcccagggagatggaagacttcgcccgaggggcggcctccccaggcccctcccggcctggcctggttcccgtcagcatcatcggggctgaggatgaggattttgagaacgagctggagacaaactcagaagagcaaaacagccagttccagagcctggagcaggtgaagcggcgcccagcccacctcatggccctcctgcagcacgtggccctgcagtttgagccaggacccctgctttgctgtctgcatgccgacatgctgggctcactgggccccaaggaggccaagaaggccttcctggacttctaccacagcttcctggagaagacagcggttctccgggtgccggtccctcccaacgtcgcctttgaacttgaccgcactagggctgacctcatctccgaggatgtccagcggcggttcgtgcaggaggtggtgcaaagccagcaggtagccgtgggccggcagctggaggacttccgttccaagcggctcatgggcatgacgccctgggagcaggagctggcccagctggaggcttgggttgggcgggaccgagccagctacgaggcccgggagcggcacgtggcggagcggctgctcatgcacctggaggagatgcaacataccatctctaccgacgaagaaaagagtgctgccgtggtcaacgccattggcctgtacatgcgccaccttggggtgcggaccaagagtggagacaagaagtcggggaggaacttcttccggaaaaaggtgatggggaaccggcggtcggacgagcctgccaagaccaagaaggggctgagcagcatcctggatgccgcccgctggaaccggggagagccccaggttccagattttcgacacctcaaagcagaggttgatgccgagaagccaggtgctacagaccggaagggaggcgtggggatgccctctcgggaccggaatatcggggctcctgggcaggacacccctggagtctctctgcaccctctgtccctggacagcccagaccgggaaccaggtgctgacgcccccctggagctgggggactcatccccgcagggcccaatgagcctggagtccttggcgcccccagagagtaccgacgagggggccgaaaccgagagccccgagcctggagatgagggggagccggggcggtcgggactggagcttgaaccagaagagcctcccggctggcgggaactcgtccccccagacaccctgcacagcctgcccaagagccaggtgaagcggcaggaggtcatcagcgagctgctggtgacagaggcggcccacgtgcgcatgctgcgggtgctgcacgacctcttcttccagcccatggcagaatgcctgttcttccccttggaggagctgcagaacatcttccccagcctggacgagctcatcgaggtgcattccctgttcctcgatcgcctgatgaagcggaggcaggagagtggctacctcatcgaggagatcggagacgtgctgctggcccggtttgatggtgctgagggctcctggttccagaaaatctcctcccgcttctgcagccgccagtcatttgccttagagcagctcaaagccaagcaacgcaaggaccctcggttctgtgccttcgtgcaggaagctgagagccgcccgcggtgccgccgcctgcagctgaaggacatgatccccacggagatgcagcggctgaccaagtaccccctgctcctgcagagcatcgggcagaacacagaagagcccacagaacgggagaaagtggagctggcagccgagtgctgccgggaaattctacaccacgtcaaccaagccgtgcgtgacatggaggacctgctgaggctcaaggactatcagcggcgcctggacttgtcccaccttcggcagagcagcgaccctatgctgagcgagttcaagaacctggacatcaccaagaagaaattggtccacgagggcccactgacgtggcgggtgactaaggacaaggcagtggaggtgcatgtgctgctgctggacgacctgctgctgctgctccagcgccaggacgagcggctgctgctcaagtcccatagccggacactgacgcccacgcccgatggcaagaccatgctgcggcccgtgctgcggctcacctccgccatgacccgcgaggtggccaccgatcacaaagccttctacgtcctttttacctgggaccaggaggcccagatatacgagctggtggcacagactgtgtcggagcggaaaaactggtgtgctctcatcactgagactgccggatccctgaaagtccctgcccctgcctctcgccctaagccccggcccagcccgagcagcacccgagaacccctcctcagcagctctgagaacggcaatggtggccgagagacgtctccagctgatgcccggaccgagagaatcctcagtgacctcctgcccttctgcagaccaggccccgagggccagctcgctgccacggcccttcggaaagtgctgtccctgaagcagcttctgtttccggcggaggaagacaatggggcggggcctcctcgagatggggatggggtcccagggggcggccccctgagcccagcacggacccaggaaatccaggagaacctgctcagcttggaggagaccatgaagcagctggaggagttggaggaggaattttgccgcctgagacccctcctgtctcagcttggggggaactctgtcccccagcctggctgcacttgaggttcccgcccaggaaggccttttgcaagaaggagaggaatgggggagaggacgtgagggaccacccccacccacacagctgccgcagcatctcacaccccgagggcctgaggagagggagctgtgggccacgcctgggaggggcccagctggggttactggccccgcatgagcctcggccatctctccctcctgccctctgcttgggggactcagggctccattctggagggcaccacggtgacccgggccatctcagtattgcctgtgggggccacccctccacccccacccccaagtgccttcgctctgtttttataccctgaattggaggtttattttttaatatatattatctaagaagaaaaaaaaaaaaaaaaaaaaaaaa

SEQ ID NO: 474 - DNA, 3136 bp, Homo sapiens
gcgcagaacttggggagccgccgccgccatccgccgccgcagccagcttccgccgccgcaggaccggcccctgccccagcctccgcagccgcggcgcgtccacgcccgcccgcgcccagggcgagtcggggtcgccgcctgcacgcttctcagtgttccccgcgccccgcatgtaacccggccaggcccccgcaactgtgtcccctgcagctccagccccgggctgcacccccccgccccgacaccagctctccagcctgctcgtccaggatggccgcggccaaggccgagatgcagctgatgtccccgctgcagatctctgacccgttcggatcctttcctcactcgcccaccatggacaactaccctaagctggaggagatgatgctgctgagcaacggggctccccagttcctcggcgccgccggggccccagagggcagcggcagcaacagcagcagcagcagcagcgggggcggtggaggcggcgggggcggcagcaacagcagcagcagcagcagcaccttcaaccctcaggcggacacgggcgagcagccctacgagcacctgaccgcagagtcttttcctgacatctctctgaacaacgagaaggtgctggtggagaccagttaccccagccaaaccactcgactgccccccatcacctatactggccgcttttccctggagcctgcacccaacagtggcaacaccttgtggcccgagcccctcttcagcttggtcagtggcctagtgagcatgaccaacccaccggcctcctcgtcctcagcaccatctccagcggcctcctccgcctccgcctcccagagcccacccctgagctgcgcagtgccatccaacgacagcagtcccatttactcagcggcacccaccttccccacgccgaacactgacattttccctgagccacaaagccaggccttcccgggctcggcagggacagcgctccagtacccgcctcctgcctaccctgccgccaagggtggcttccaggttcccatgatccccgactacctgtttccacagcagcagggggatctgggcctgggcaccccagaccagaagcccttccagggcctggagagccgcacccagcagccttcgctaacccctctgtctactattaaggcctttgccactcagtcgggctcccaggacctgaaggccctcaataccagctaccagtcccagctcatcaaacccagccgcatgcgcaagtaccccaaccggcccagcaagacgcccccccacgaacgcccttacgcttgcccagtggagtcctgtgatcgccgcttctcccgctccgacgagctcacccgccacatccgcatccacacaggccagaagcccttccagtgccgcatctgcatgcgcaacttcagccgcagcgaccacctcaccacccacatccgcacccacacaggcgaaaagcccttcgcctgcgacatctgtggaagaaagtttgccaggagcgatgaacgcaagaggcataccaagatccacttgcggcagaaggacaagaaagcagacaaaagtgttgtggcctcttcggccacctcctctctctcttcctacccgtccccggttgctacctcttacccgtccccggttactacctcttatccatccccggccaccacctcatacccatcccctgtgcccacctccttctcctctcccggctcctcgacctacccatcccctgtgcacagtggcttcccctccccgtcggtggccaccacgtactcctctgttccccctgctttcccggcccaggtcagcagcttcccttcctcagctgtcaccaactccttcagcgcctccacagggctttcggacatgacagcaaccttttctcccaggacaattgaaatttgctaaagggaaaggggaaagaaagggaaaagggagaaaaagaaacacaagagacttaaaggacaggaggaggagatggccataggagaggagggttcctcttaggtcagatggaggttctcagagccaagtcctccctctctactggagtggaaggtctattggccaacaatcctttctgcccacttccccttccccaattactattccctttgacttcagctgcctgaaacagccatgtccaagttcttcacctctatccaaagaacttgatttgcatggattttggataaatcatttcagtatcatctccatcatatgcctgaccccttgctcccttcaatgctagaaaatcgagttggcaaaatggggtttgggcccctcagagccctgccctgcacccttgtacagtgtctgtgccatggatttcgtttttcttggggtactcttgatgtgaagataatttgcatattctattgtattatttggagttaggtcctcacttgggggaaaaaaaaaaaagaaaagccaagcaaaccaatggtgatcctctattttgtgatgatgctgtgacaataagtttgaacctttttttttgaaacagcagtcccagtattctcagagcatgtgtcagagtgttgttccgttaacctttttgtaaatactgcttgaccgtactctcacatgtggcaaaatatggtttggtttttctttttttttttttttgaaagtgttttttcttcgtccttttggtttaaaaagtttcacgtcttggtgccttttgtgtgatgcgccttgctgatggcttgacatgtgcaattgtgagggacatgctcacctctagccttaaggggggcagggagtgatgatttgggggaggctttgggagcaaaataaggaagagggctgagctgagcttcggttctccagaatgtaagaaaacaaaatctaaaacaaaatctgaactctcaaaagtctatttttttaactgaaaatgtaaatttataaatatattcaggagttggaatgttgtagttacctactgagtaggcggcgatttttgtatgttatgaacatgcagttcattattttgtggttctattttactttgtacttgtgtttgcttaaacaaagtgactgtttggcttataaacacattgaatgcgctttattgcccatgggatatgtggtgtatatccttccaaaaaattaaaacgaaaataaagtagctgcgattggg

SEQ ID NO: 475 - DNA, 1486 bp, Homo sapiens
gactccgggtggcaggcgcccgggggaatcccagctgactcgctcactgccttcgaagtccggcgccccccgggagggaactgggtggccgcaccctcccggctgcggtggctgtcgccccccaccctgcagccaggactcgatggagaatccattccaatatatggccatgtggctctttggagcaatgttccatcatgttccatgctgctgacgtcacatggagcacagaaatcaatgttagcagatagccagcccatacaagatcgtattgtattgtaggaggcattgtggatggatggctgctggaaaccccttgccatagccagctcttcttcaatacttaaggatttaccgtggctttgagtaatgagaatttcgaaaccacatttgagaagtatttccatccagtgctacttgtgtttacttctaaacagtcattttctaactgaagctggcattcatgtcttcattttgggctgtttcagtgcagggcttcctaaaacagaagccaactgggtgaatgtaataagtgatttgaaaaaaattgaagatcttattcaatctatgcatattgatgctactttatatacggaaagtgatgttcaccccagttgcaaagtaacagcaatgaagtgctttctcttggagttacaagttatttcacttgagtccggagatgcaagtattcatgatacagtagaaaatctgatcatcctagcaaacaacagtttgtcttctaatgggaatgtaacagaatctggatgcaaagaatgtgaggaactggaggaaaaaaatattaaagaatttttgcagagttttgtacatattgtccaaatgttcatcaacacttcttgattgcaattgattctttttaaagtgtttctgttattaacaaacatcactctgctgcttagacataacaaaacactcggcatttcaaatgtgctgtcaaaacaagtttttctgtcaagaagatgatcagaccttggatcagatgaactcttagaaatgaaggcagaaaaatgtcattgagtaatatagtgactatgaacttctctcagacttactttactcatttttttaatttattattgaaattgtacatatttgtggaataatgtaaaatgttgaataaaaatatgtacaagtgttgttttttaagttgcactgatattttacctcttattgcaaaatagcatttgtttaagggtgatagtcaaattatgtattggtggggctgggtaccaatgctgcaggtcaacagctatgctggtaggctcctgccagtgtggaaccactgactactggctctcattgacttccttactaagcatagcaaacagaggaagaatttgttatcagtaagaaaaagaagaactatatgtgaatcctcttctttatactgtaatttagttattgatgtataaagcaactgttatgaaataaagaaattgcaataactggcaaaaaaaaaaaaaaaaaa

SEQ ID NO: 476 - DNA, 3454 bp, Homo sapiens
agtgctctcttccgccttcagtgccctgctcatcaagggtctgggtttcccggtcctctggcgaggatcctccaaggcgtctcacatgaaccggctcagaaacgccaaaatctacgtggagagagctgtcaagaagaagatctttacaatccaaggctgctacccggtgatccggtgtctcttgcgccggaggggctgggtggagaagaagatggtccatcgctcaggccccaccctgctgccaccccagaaggatctggatagctcagcgatgggtgacagtgacaccactgaggatgaggatgaagatgaggacgaggagttccagccatcacagctgttcgacttcgatgatttactgaaatttgatgacctagatggaacacatgctctgatgtcccgcatggtccagaatgagatcccctacttcatctggaccactcggcgggatgtgctcgactgtcgcttcctctccaaggatcagatgataaaccactacgcccgggctggctcctttaccacaaaggtgggtctatgtctcaatctccggaatttgccgtggtttgatgaggttgatgccaactccttcttcccacgctgctactgcctgggggctgaggatgacaaaaaagccttcatagaggacttctggctgactgctgcccgcaacgttctcaagctggtggtgaagtctgagtggaagtcataccctattcaggcagtagaggaagaggcctcaggagacaagcagcccaagaaacaggagaaaaacccagtgttggtgtccccagagtttgtggatgaagctctgtgtgcgtgcgaggagtaccttagcaacttggcccacatggacatcgacaaggacctggaggccccgctgtacctcacccccgagggctggtccctcttcctccagcgctactaccaagtggtccacgaaggggcagaactcaggcacctcgacactcaggtccagcgctgtgaggacatcctgcagcagctgcaggccgtggtaccccagatagacatggaaggggatcgcaacatctggatcgtgaagccaggagccaagtcccgcggacgaggcatcatgtgcatggaccacctggaggagatgctgaagctggtgaacggcaaccccgtggtgatgaaggacggcaagtgggtggtgcagaagtatattgagcggcccctcctcatctttggcaccaagtttgacctcagacagtggttcctggtaactgactggaacccacttaccgtgtggttctaccgcgacagctatatccgcttttccacgcagcccttctccctgaagaacctggacaactcagtgcacctgtgcaacaactccatccagaagcacctggagaactcatgccatcggcatccactgcttccgccagacaacatgtggtctagccagaggttccaggcccacctgcaggagatgggtgccccaaatgcttggtccaccatcatcgtgcctggcatgaaggatgctgtgatccacgcacttcagacctcccaggacaccgtgcagtgtcggaaggccagctttgagctctatggcgctgacttcgtgttcggggaggacttccagccctggctgattgagatcaacgccagccccacgatggcaccctccacagcagtcactgcccggctctgtgctggcgtgcaagctgacaccctgcgcgtggtcattgaccggatgctggaccgcaactgtgacacaggagcctttgagctcatctataagcagcccgtcaccacttccccagcctccacaccaaggcccagctgccttctccccatgtactccgacaccagggccaggtcctcagacgacagcacagcaagctggtgggcactaaggccctgtcgaccacaggcaaggccttgaggactctacccacggctaaggtcttcatttccctcccaccgaaccttgatttcaaggtggcacccagcatcctgaagccaagaaaggtgggcctcgacctgtgactcacacccagtggacagtgctgagcacggggtcagggctggagggcacaggcagagggcagctcccaggctggctggcaccccaagggaagagctggtctccctcagaagccccttcctccacagacttctgatcatctccctcttctcccctcctttcacaccgaggctcctgctctcctgtgcctccgaggcccccagctggaagtgccttgttgcctctgccctttgaagtcggaacaattcctagcacctgtcggaaggtcaaggccaaaggcaaattcaaggccagactgtgacaaacccagggctgaggcctgccccatgaagaggctgagccccctgaaacccctgccccttgttggtacattccagaggcgcaggggcctgggggatatgaagctagggaagcccctgcttcgattccccactgcccttgtcctggatccaacaccaaataaaaagaaacaagtgaagtatttggggcttgactccattgctgttggagggtcaagagtggatggggcgaggccgtgtaccccagggtccacagcaagagcctgaggccatcagcagctcctccgtgcagcgaggcccagaattcccacctaaggacagacatggggcttcctatttagggactcccccagcatctccgatccaggggtggggagcgtgagccttcactttacagatgaagaaactgagtctgaaagaggaggcatggcttacccaagatcacgtggcagtgagtcgacgcagggacatattgccagaactgccgagcactgggagccccccaaccccagagaacaagccaagctagcagaatgacacctaccgggcataggaacgttaatgccatgagacaggggaaggaattggccttgcctaaacctcagcccttctgcagagggcatgggtctatcccttcttcagcaaggggccaaggtcacctaaaaatgaaacatccaataagccacacccacctgaagaaaagtgtggcactgcttagttgtagtgggttgaactgtggtcccctgaaaagagatgtctacttggaccctgtgaatgtgaccttatgtgggaaaagagtctttgtagctgggtatggtggctcacacctgttatcccagcactttgagaggccaaggcaggagatcgcttgagcccgcaagttcaagaccagtctgggcaacatggtgaaaccgtttctacagaaaattagctgggtgtggtggcacacacctgtagtcctagctactcgggaggcctaggtgggaggattacctgagcctgggaagatcaaaactgtggtgagctgtgatcacgccactgcgctctgagcctgggagacagagtgaaaccctaaatcaaaaaaaaaaaaaaaggtctttgcagatgtaaataaatttaagatcttaaatgagaaaaaaaaaaaaaa

SEQ ID NO: 477 - DNA, 5378 bp, Homo sapiens
ggggtaggggcggcgccgagtcgggggagggggctgtgcgccgggctggcgcccgaccccagccaccgccctgcggccagcgcgtcccccgactcgccgcccggagaccccgaggctccaacgagttcagaaatgtccagaaatgacaaagaaccgttttttgtgaagtttttaaagtcttcagacaattccaaatgtttttttaaagctctcgagtccataaaagaattccaatcagaagaatatcttcagattattacagaagaagaggcattgaagataaaggagaatgatagatcactttatatctgtgacccttttagtggcgttgtctttgatcacctcaaaaagcttggctgcagaattgttggtcctcaagtagtcatattttgtatgcaccaccagcgatgtgtcccaagagccgaacatccagtttataatatggttatgtctgatgtaaccatatcttgtacaagtctggaaaaagaaaaaagggaagaagttcataaatatgtacaaatgatgggcggacgagtatacagagaccttaatgtatcagtaactcaccttattgcaggagaagttggtagcaaaaaatatttagttgctgcaaacctgaagaaacctattttgcttccctcttggataaaaacactttgggagaagtcacaagagaaaaaaataactagatatactgatataaacatggaagatttcaagtgtcctatttttcttggttgcataatctgtgtgactggcttatgtggcttagacaggaaagaagttcagcaactcacagttaagcatggaggtcaatacatgggacaattgaaaatgaatgaatgtacacacctcattgtgcaagaaccaaaaggtcagaagtatgagtgtgccaagagatggaatgtacactgtgtgaccacacagtggttttttgacagtattgagaaaggtttttgtcaggatgaatccatatacaagacagaacctagaccagaagcaaagactatgcccaattcttcaactcctaccagccagatcaacacaattgatagtcgtactctttcagatgtcagcaatatttccaacataaatgcaagttgcgtaagtgaatcaatatgtaattcacttaacagcaaactggagcctacacttgaaaatctagaaaatctggatgtcagtgcatttcaagcacctgaagatttattagatggttgtcggatatatctttgcggttttagtggcagaaagctagataaactgagaagacttattaacagtggaggtggagttcgttttaaccagctaaatgaagatgtaactcatgttattgtgggagattatgatgatgaattgaagcagttttggaataaatcagcccacaggcctcatgtagtgggagcaaagtggttgctagagtgtttcagtaaaggttatatgctttctgaagaaccatatatccatgctaattaccagccagtggaaattccagtttcacataagcctgaaagtaaagcagctcttttaaaaaagaagaacagcagcttctctaagaaagactttgctcctagtgaaaagcatgagcaagctgatgaagatctgctctctcaatatgaaaatggtagctccacagtagttgaggctaagacgtctgaagccaggccctttaatgattctactcatgctgagcccttgaatgattctactcacatttctttgcaagaagaaaaccagtcttctgtcagtcattgtgtccctgatgtttctacaattactgaagaaggcttatttagccaaaagagtttccttgttttgggttttagtaatgaaaatgaatctaacatcgcaaacatcataaaagaaaatgctgggaaaatcatgtcccttctgagcagaactgttgcggattatgctgtggttcctctgctggggtgtgaagtggaagccactgtgggagaagttgttacaaatacatggctggttacttgcatagactatcagactttgtttgatccaaagtcgaatcctctcttcacaccagttccagtaatgacaggaatgactcctttagaggattgtgttatttcatttagccagtgtgctggagcagaaaaagagtctttaacattcctagcaaacctccttggagcaagtgttcaagaatactttgttcgcaaatccaatgcaaagaaaggcatgtttgccagtactcatcttatactgaaagaacgtggtggctctaaatatgaagctgcaaagaagtggaatttacctgccgttactatagcttggctgttggagactgctagaacgggaaagagagcagacgaaagccattttctgattgaaaattcaactaaagaagaacgaagtttggaaacagaaataacaaatggaatcaatctaaattcagatactgcagagcatcctggcacacgcctgcaaactcacagaaaaaccgtcgttacacctttagatatgaaccgctttcagagtaaagctttccgtgctgtggtctcacaacatgccagacaggtcgcagcctccccagcagtaggacaaccacttcagaaggagccctcgttacacctggatacaccatcaaaattcctgtccaaggacaaactcttcaagccttcctttgatgtgaaggatgcacttgcagccttggaaactccaggacgtcccagccaacagaaaaggaaaccgagtacgccactctcagaagttattgtcaaaaacttgcaacttgctttggcaaatagctctcgaaatgctgtcgctctttctgccagccctcaactgaaagaggcccagtcagagaaggaagaagccccaaagccacttcacaaagtagtggtatgtgttagtaaaaaactcagtaagaagcagagtgaactaaatgggatcgcagcctctctaggagcagattacaggtggagttttgatgaaacagtgactcatttcatctatcaagggcggccaaatgacactaatcgggagtataaatctgtaaaagaaagaggagtacacattgtttccgagcactggcttttagattgtgcccaagagtgtaaacatcttcctgaatctctttatccacatacttataatcccaaaatgagcttggatatcagcgcagtgcaagatggccggctctgtaatagtcgactactctcagctgtgtcttcaacaaaggatgatgagccagatcctttgattttagaagaaaatgatgtagacaatatggccaccaataataaagagtcagcaccatcaaatggaagtggaaagaatgactctaaaggagttctgacacagaccttagagatgagagagaactttcagaagcagttacaggagataatgtctgcaacatcaatagtgaaaccccaagggcagaggacttccctttcaagaagtggttgtaacagcgcatcttcaacccctgacagcactcgctctgctcgcagtggacgaagtagagtcctagaggcactgaggcagtctcgtcagacagtacctgatgtcaacacagagccttcccaaaatgaacagatcatttgggatgaccctacagcaagggaggagagagcaaggcttgccagcaatttgcagtggcctagttgtcccacacaatactctgagcttcaggttgacattcaaaacttggaggattctccttttcaaaagcctttacatgattcagaaattgctaaacaggctgtctgtgatcctggaaacatacgtgtgactgaagctcccaaacacccaatctctgaagaactggaaactcccataaaagacagccacctgatccctacgcctcaagcccccagtattgcctttccactcgccaacccccctgtggctccgcaccctagagaaaagattataacgatagaggagactcatgaagaattaaaaaaacagtacatatttcagttatcatctctgaatcctcaagaacgtattgactattgtcatctgattgagaaactaggtggattggtgatagaaaagcagtgctttgatcccacctgtacacacattgttgtgggacatccacttcgaaacgagaagtatttagcctcagtggcagctgggaagtgggtgcttcatcgctcctaccttgaagcctgcaggactgctggacacttcgtgcaggaagaagactatgaatggggaagtagttccatacttgatgttctgactggaatcaatgtacagcaacgaagactagcacttgcagcaatgagatggagaaaaaaaatccagcaaagacaagaatctggcattgttgagggagcatttagtgggtggaaggttattttacatgtggatcagtctcgagaagcaggcttcaaacgccttcttcagtcaggaggagcaaaggtgctacctggtcattctgtacctttatttaaagaggccacacatcttttttctgacttgaataaactgaaaccagatgactcaggagttaatatagcagaagctgctgcccagaacgtgtactgcttgagaacagaatacattgctgattatctcatgcaggaatcacctcctcatgtagaaaattactgtctaccagaagctatttcatttattcagaataataaggaacttgggactggattatcacaaaagaggaaagctcctacagaaaaaaataaaatcaaacgacctagagtacactaatcgcatctaccctttagttaccaaacattaaatgtttttaaaaattgaaagcctgaatgtgactgtgatagatttgggtagtaatttaaagatgagtacctgaagaattctgcttcagagtataatgatgacccttcttgagttttgaacacctgaaattgtaatcactgaaatattaactgtttcttaataaaaagttacctgaaataacaacaaaatacaactcctcagctagcttgctgttaaaccacattgaagtctgttaaaagatatttatttttcttgtaaatatctgaagctgtagcttagtggaaattttagcaaggtaatggattttgctttaaaatgtctgccttacaaattcataacaacaagatttgtcagtcagcatttattcatgttttccctgatttttatcttctcaccattttacctcttttaacaggagcctgagcacaaggtttaatgaggaagctggggctataaatatgtgtgtatatatgtatatgtatgtttgtacaaatctccatgatgtttgccaagtttgaatgcgcaaaacttggaaaatgtgacaataaagaataaaagtagtaactcaaattagtattaagatgtgtttacatagataaattttttaaaagagcaaaaaaaaaaaaaaaaaaaaaaaaaaaaaaaaa

SEQ ID NO: 478 - DNA, 4868 bp, Homo sapiens
agttagcgcctgctgggtgtctgctcgggtggtctgggaactacaattcccggcgggctgtgagatgccttggctgtagttagtaaggagccggatgattgcctcagcaggtgtgaagcgtgtgctttagtttcgtgggaggcctggcatccccgagagggaggggaaaggtaaccactcctttgtggaggtcgccagggtcattgtcgtggatttgcacagtcggctgggcggtgcaatggcggaaagaaaaggaacagccaaagtggactttttgaagaagattgagaaagaaatccaacagaaatgggatactgagagagtgtttgaggtcaatgcatctaatttagagaaacagaccagcaagggcaagtattttgtaaccttcccatatccatatatgaatggacgccttcatttgggacacacgttttctttatccaaatgtgagtttgctgtagggtaccagcgattgaaaggaaaatgttgtctgtttccctttggcctgcactgtactggaatgcctattaaggcatgtgctgataagttgaaaagagaaatagagctgtatggttgcccccctgattttccagatgaagaagaggaagaggaagaaaccagtgttaaaacagaagatataataattaaggataaagctaaaggaaaaaagagtaaagctgctgctaaagctggatcttctaaataccagtggggcattatgaaatcccttggcctgtctgatgaagagatagtaaaattttctgaagcagaacattggcttgattatttcccgccactggctattcaggatttaaaaagaatgggtttgaaggtagactggcgtcgttccttcatcaccactgatgttaatccttactatgattcatttgtcagatggcaatttttaacattaagagaaagaaacaaaattaaatttgggaagcggtatacaatttactctccgaaagatggacagccttgcatggatcatgatagacaaactggagagggtgttggacctcaggaatatactttactcaaattgaaggtgcttgagccatacccatctaaattaagtggcctgaaaggtaaaaatattttcttggtggctgctactctcagacctgagaccatgtttgggcagacaaattgttgggttcgtcctgatatgaagtacattggatttgagacggtgaatggtgatatattcatctgtacccaaaaagcagccaggaatatgtcataccagggctttaccaaagacaatggcgtggtgcctgttgttaaggaattaatgggggaggaaattcttggtgcatcactttctgcacctttaacatcatacaaggtgatctatgttctcccaatgctaactattaaggaggataaaggcactggtgtggttacaagtgttccttccgactcccctgatgatattgctgccctcagagacttgaagaaaaagcaagccttacgagcaaaatatggaattagagatgacatggtcttgccatttgagccggtgccagtcattgaaatcccaggttttggaaatctttctgctgtaaccatttgtgatgagttgaaaattcagagccagaatgaccgggaaaaacttgcagaagcaaaggagaagatatatctaaaaggattttatgagggtatcatgttggtggatggatttaaaggacagaaggttcaagatgtaaagaagactattcagaaaaagatgattgacgctggagatgcacttatttacatggaaccagagaaacaagtgatgtccaggtcgtcagatgaatgtgttgtggctctgtgtgaccagtggtacttggattatggagaagagaattggaagaaacagacatctcagtgcttgaagaacctggaaacattctgtgaggagaccaggaggaattttgaagccaccttaggttggctacaagaacatgcttgctcaagaacttatggtctaggcactcacctgccttgggatgagcagtggctgattgaatcactttctgactccactatttacatggcattttacacagttgcacacctattgcaggggggtaacttgcatggacaggcagagtctccgctgggcattagaccgcaacagatgaccaaggaagtttgggattatgttttcttcaaggaggctccatttcctaagactcagattgcaaaggaaaaattagatcagttaaagcaggagtttgaattctggtatcctgttgatcttcgcgtctctggcaaggatcttgttccaaatcatctttcatattacctttataatcatgtggctatgtggccggaacaaagtgacaaatggcctacagctgtgagagcaaatggacatctcctcctgaactctgagaagatgtcaaaatccacaggcaacttcctcactttgacccaagctattgacaaattttcagcagatggaatgcgtttggctctggctgatgctggtgacactgtagaagatgccaactttgtggaagccatggcagatgcaggtattctccgtctgtacacctgggtagagtgggtgaaagaaatggttgccaactgggacagcctaagaagtggtcctgccagcactttcaatgatagagtttttgccagtgaattgaatgcaggaattataaaaacagatcaaaactatgaaaagatgatgtttaaagaagctttgaaaacagggttttttgagtttcaggccgcaaaagataagtaccgtgaattggctgtggaagggatgcacagagaacttgtgttccggtttattgaagttcagacacttctcctcgctccattctgtccacatttgtgtgagcacatctggacactcctgggaaagcctgactcaattatgaatgcttcatggcctgtggcaggtcctgttaatgaagttttaatacactcctcacagtatcttatggaagtaacacatgaccttagactacgactcaagaactatatgatgccagctaaagggaagaagactgacaaacaacccctgcagaagccctcacattgcaccatctatgtggcaaagaactatccaccttggcaacataccaccctgtctgttctacgtaaacactttgaggccaataacggaaaactgcctgacaacaaagtcattgctagtgaactaggcagtatgccagaactgaagaaatacatgaagaaagtcatgccatttgttgccatgattaaggaaaatctggagaagatggggcctcgtattctggatttgcaattagaatttgatgaaaaggctgtgcttatggagaatatagtctatctgactaattcgcttgagctagaacacatagaagtcaagtttgcctccgaagcagaagataaaatcagggaagactgctgtcctgggaaaccacttaatgtttttagaatagaacctggtgtgtccgtttctctggtgaatccccagccatccaatggccacttctcaaccaaaattgaaatcaggcaaggagataactgtgattccataatcaggcgtttaatgaaaatgaatcgaggaattaaagacctttccaaagtgaaactgatgagatttgatgatccactgttggggcctcgacgagttcctgtcctgggaaaggagtacaccgagaagacccccatttctgagcatgctgttttcaatgtggacctcatgagcaagaaaattcatctgactgagaatgggataagggtggatattggcgatacaataatctatctggttcattaaactcatgcacattggagatttatcctggtttcttaggaatactactactctgattgtgtctactgattggctatcagaaccttaggctggacctaaatagattgatttcatttctaaccatccaattctgcatgtattcataattctatcaagtcatctttgattcctggacctaataaattttttttccctttctttgggtgtccaagagaaatggtttttgccaaactctttttaaaaaacaaattgttgctatttcctagaagtttctggtttttaagatgaacataaaagtgtcagtatgcttcttttatgaggtgtactttatactttgatgaaggctaaggtgtacctaacagctttttatagtatattcatttatggagttagctgtatttttttttaaaaaagaaaagtagtaaattagcagcttttttttttaaatgaagagaacttcatgatgatttaaaagaactaatgagaatattttgacttgacttcaattactaagtattttgtataaagaacaaataggtcctgcattttataagactttttaaagctttaattattcaactaagaaccaataatggcttcttcaaggctaatatcaatagtttataagcagtatatttcacctacactaaatatgggcattttaaaagaagattccccccttcccccccagaaatctgcatttactaaatttgtcttaagtccaattgtgtttaaaggtcatgctggtcgggtgtggtggctcacacctataatcccagcactttgggaggccaaggtgggcagtcacctgaggtcaggagtttgagaccagcctgaccaacatggtgaaaccccgtctctactaaaaatacaaaaattagcttggcatggtggcgggtacctgtaatcccagctgcttgggagtgtgaggcaggagaatcgcttgaacctgggagaccgaggttgcagtgagctgaaaccgtgccattgcactccagcttaggcaacaagagtgaaactctgtctcaatcaatccatcaatcaatcaataaaatagaggtcatgctgactattacagatttaaaaaaaaaaaaaaaaaaaa

SEQ ID NO: 479 - DNA, 3140 bp, Homo sapiens
ggcgggcgctcggcgactcgtccccggggccccgcgcgggcccgggcagcaggggcgtgatgtcacggcagggagggggcgcgggagccgccgggccggcggggaggcgggggaggtgttttccagctttaaaaaggcaggaggcagagcgcggccctgcgtcagagcgagactcagaggctccgaactcgccggcggagtcgccgcgccagatcccagcagcagggcgcgggcaccggggcgcgggcagggctcggagccaccgcgcaggtcctagggccgcggccgggccccgccacgcgcgcacacgcccctcgatgactttcctccggggcgcgcggcgctgagcccggggcgagggctgtcttcccggagacccgaccccggcagcgcggggcggccgcttctcctgtgcctccgcccgccgctccactccccgccgccgccgcgcggatgccaagcaccagctttccagtcccttccaagtttccacttggccctgcggctgcggtcttcgggagaggagaaactttggggcccgcgccgcgcgccggcggcaccatgaagtcagcggaggaagaacactatggctatgcatcctccaacgtcagccccgccctgccgctccccacggcgcactccaccctgccggccccgtgccacaaccttcagacctccacaccgggcatcatcccgccggcggatcacccctcggggtacggagcagctttggacggtgggcccgcgggctacttcctctcctccggccacaccaggcctgatggggcccctgccctggagagtcctcgcatcgagataacctcgtgcttgggcctgtaccacaacaataaccagtttttccacgatgtggaggtggaagacgtcctccctagctccaaacggtccccctccacggccacgctgagtctgcccagcctggaggcctacagagacccctcgtgcctgagcccggccagcagcctgtcctcccggagctgcaactcagaggcctcctcctacgagtccaactactcgtacccgtacgcgtccccccagacgtcgccatggcagtctccctgcgtgtctcccaagaccacggaccccgaggagggctttccccgcgggctgggggcctgcacactgctgggttccccgcggcactccccctccacctcgccccgcgccagcgtcactgaggagagctggctgggtgcccgctcctccagacccgcgtccccttgcaacaagaggaagtacagcctcaacggccggcagccgccctactcaccccaccactcgcccacgccgtccccgcacggctccccgcgggtcagcgtgaccgacgactcgtggttgggcaacaccacccagtacaccagctcggccatcgtggccgccatcaacgcgctgaccaccgacagcagcctggacctgggagatggcgtccctgtcaagtcccgcaagaccaccctggagcagccgccctcagtggcgctcaaggtggagcccgtcggggaggacctgggcagccccccgcccccggccgacttcgcgcccgaagactactcctctttccagcacatcaggaagggcggcttctgcgaccagtacctggcggtgccgcagcacccctaccagtgggcgaagcccaagcccctgtcccctacgtcctacatgagcccgaccctgcccgccctggactggcagctgccgtcccactcaggcccgtatgagcttcggattgaggtgcagcccaagtcccaccaccgagcccactacgagacggagggcagccggggggccgtgaaggcgtcggccggaggacaccccatcgtgcagctgcatggctacttggagaatgagccgctgatgctgcagcttttcattgggacggcggacgaccgcctgctgcgcccgcacgccttctaccaggtgcaccgcatcacagggaagaccgtgtccaccaccagccacgaggccatcctctccaacaccaaagtcctggagatcccactcctgccggagaacagcatgcgagccgtcattgactgtgccggaatcctgaaactcagaaactccgacattgaacttcggaaaggagagacggacatcgggaggaagaacacacgggtacggctggtgttccgcgttcacgtcccgcaacccagcggccgcacgctgtccctgcaggtggcctccaaccccatcgaatgctcccagcgctcagctcaggagctgcctctggtggagaagcagagcacggacagctatccggtcgtgggcgggaagaagatggtcctgtctggccacaacttcctgcaggactccaaggtcattttcgtggagaaagccccagatggccaccatgtctgggagatggaagcgaaaactgaccgggacctgtgcaagccgaattctctggtggttgagatcccgccatttcggaatcagaggataaccagccccgttcacgtcagtttctacgtctgcaacgggaagagaaagcgaagccagtaccagcgtttcacctaccttcccgccaacggtaacgccatctttctaaccgtaagccgtgaacatgagcgcgtggggtgctttttctaaagacgcagaaacgacgtcgccgtaaagcagcgtggcgtgttgcacatttaactgtgtgatgtcccgttagtgagaccgagccatcgatgccctgaaaaggaaaggaaaagggaagcttcggatgcattttccttgatccctgttgggggtggggggcgggggttgcatactcagatagtcacggttattttgcttcttgcgaatgtataacagccaaggggaaaacatggctcttctgctccaaaaaactgagggggtcctggtgtgcatttgcaccctaaagctgcttacggtgaaaaggcaaataggtatagctattttgcaggcacctttaggaataaactttgcttttaagcctgtagtcctgatgtggtctttaaggatggtgaatgagctttgtgctgggcggacgtccccgagacacttctccaggggtaacttcatctcctgggaccacgggcatccaggctggggcaccttctcctcaacctgcctgcccctcacccgccgtgggaatggctccttttcactcatac

SEQ ID NO: 480 - DNA, 1918 bp, Homo sapiens
ctccgggcagagcgcgtgtggcggccgagcacatgggcccgcgggccgggcgggctcggggcggccgggacgaggaggggcgacgacgagctgcgagcaaagatgtgccccgggacccccggcaccttccagtggatttccttgcggaaaggatgttggcggtccctgtgacctgtggagacacggccagatctgccctccagaccatagctgtctgcagtgcaggaagccaactattaaggggaaacaaaagtgttcttaggagtcctgctgtcactgtggattgagccggtgaagccctgagggatttcatcgctgaggtggatggagaagcagctgggggccttggctgtaaggacccctaagggcctgatcttttggccagaaggagattaaaaagatgcccctcaagatggctgtgcctgtcagctgcatggagcttcgttcaagtattttctgagcctgatggatttacagtgatcttcagtggtctggggaataacgctggtggaaccatgcactggaatgacacacgcccggcacatttcaggatactaaaagtggttttaagggaggctgtggctgaatgcctcatggattcttacagcttggatgtccatgggggacgaaggactgcagctggctgagagggttgagatctctgtttacttagatctctgccaacttcctttgggtctccctatggaatgtaagaccccgactcttcctggtgaagcatctgatgcacgttccatccggcgctcagctgggcttgagctgaccatactccctggagccttctcccgaggtgcgcgggtgaccttggcacatacagccatcatgatggtactttaagtggaggctgaatcatctcccctttgagctgcttggcacgtggctcccttggtgttccccttttactgccaggacactgagatttggagagagtctcactctgtggtccaggctgaagtacagtggcatgatcccaggtcactgcaacccccacctcccgggttcaagtgatcctcctgcctcagcctcccgagtagctggtattacaggcgtgtgccacaaagcctggctaagttttgtatttttagtagagacggggtttcaccatgttggccaggttggtctcgaactcctgacctcaagtgatccactcactttggcctttcaacgtgctgggattacaggcgagagtcaccgcacccggacgactctgacatttttgaagagtccagaatcctgttacacctgggatttaggcactttcaatctgaaaaaatacatatcctttcagcactctggacggacttgagaactgtccttacgtgacctaaagctggagtattttgagattggagaattaagagccagtcttggtgctctgtgttcacctggttcatctgaggagctgcatctaccctgcccatgccatagatcctgccctgtttgcttctcctgttgctgctagtggacatgagaaggacagaataacgggctcccagattcacaagccccaccaagaggatcaccccaggaacgcttggaggctgaggagttcactgaggctactgcatcttgagactcaggatgaagacccagcttggggctgtcaaaggttttttgcatgtctgacacccatgactccacctggaccttatggctccacccagaagcaattcagcccaacaggaggacagcttcaacccattacgatttcatctctgccccaaccactcagcagcaagcacctgttacctgtccacccccaccccttcccccaaactgcctttgaaaaatccctaacctatgagctttgaataagatgagtacgaacttcatcgcccacgtggcgtggccggcctcgtgtctattaaattctttttctactaaaaaaaaaaaaaaaaaa

SEQ ID NO: 481 - DNA, 2718 bp, Homo sapiens
cagggtaacgctgtcttgtggacccgcacttcccacccgagacctctcactgagcccgagccgcgcgcgacatgagccacgggaagggaaccgacatgctcccggagatcgccgccgccgtgggcttcctctccagcctcctgaggacccggggctgcgtgagcgagcagaggcttaaggtcttcagcggggcgctccaggaggcactcacagagcactacaaacaccactggtttcccgaaaagccgtccaagggctccggctaccgctgcattcgcatcaaccacaagatggaccccatcatcagcagggtggccagccagatcggactcagccagccccagctgcaccagctgctgcccagcgagctgaccctgtgggtggacccctatgaggtgtcctaccgcattggggaggacggctccatctgcgtcttgtacgaggaggccccactggccgcctcctgtgggctcctcacctgcaagaaccaagtgctgctgggccggagcagcccctccaagaactacgtgatggcagtctccagctaggcccttccgcccccgccctgggcgccgccgtgctcatgctgccgtgacaacaggccaccacatacctcaacctggggaactgtatttttaaatgaagagctatttatatatattatttttttttaagaaaggaggaaaagaaaccaaaagttttttttaagaaaaaaaatccttcaagggagctgcttggaagtggcctccccaggtgcctttggagagaactgttgcgtgcttgagtctgtgagccagtgtctgcctataggagggggagctgttagggggtagacctagccaaggagaagtgggagacgtttggctagcaccccaggaagatgtgagagggagcaagcaaggttagcaactgtgaacagagaggtcgggatttgccctgggggaggaagagaggccaagttcagagctctctgtctcccccagccagacacctgcatccctggctcctctattactcaggggcattcatgcctggacttaaacaatactatgttatcttttcttttatttttctaatgaggtcctgggcagagagtgaaaaggcctctcctgattcctactgtcctaagctgcttttcttgaaatcatgacttgtttctaattctaccctcaggggcctgtagatgttgctttccagccaggaatctaaagctttgggttttctgaggggggggaggagggaactggaggttattggggttaggatggaagggaactctgcacaaaacctttgctttgctagtgctgctttgtgtgtatgtgtggcaaataatttgggggtgatttgcaatgaaattttgggacccaaagagtatccactggggatgttttttggccaaaactcttccttttggaaccacatgaaagtcttgatgctgctgccatgatccctttgagaggtggctcaaaagctacagggaactccaggtcctttattactgccttcttttcaaaagcacaactctcctctaaccctcccctcccccttcccttctggtcgggtcatagagctaccgtattttctaggacaagagttctcagtcactgtgcaatatgccccctgggtcccaggagggtctggaggaaaactggctatcagaacctcctgatgccctggtgggcttagggaaccatctctcctgctctccttgggatgatggctggctagtcagccttgcatgtattccttggctgaatgggagagtgccccatgttctgcaagactacttggtattcttgtagggccgacactaaataaaagccaaaccttgggcactgttttttctccctggtgctcagagcacctgtgggaaaggttgctgtctgtctcagtacaatccaaatttgtcgtagacttgtgcaatatatactgttgtgggttggagaaaagtggaaagctacactgggaagaaactcccttccttcaatttctcagtgacattgatgaggggtcctcaaaagacctcgagtttcccaaaccgaatcaccttaagaaggacagggctagggcatttggccaggatggccaccctcctgctgttgccccttagtgaggaatcttcaccccacttcctctacccccaggttctcctccccacagccagtcccctttcctggatttctaaactgctcaattttgactcaaaggtgctatttaccaaacactctccctacccattcctgccagctctgcctccttttcaactctccacattttgtattgccttcccagacctgcttccagtctttattgctttaaagttcactttgggcccacagacccaagagctaattttctggtttgtgggttgaaacaaagctgtgaatcactgcaggctgtgttcttgcatcttgtctgcaaacaggtccctgcctttttagaagcagcctcatggtctcatgcttaatcttgtctctcttctcttctttatgatgttcactttaaaaacaacaaaacccctgagctggactgttgagcaggcctgtctctcctattaagtaaaaataaatagtagtagtatgtttgtaagctattctgacagaaaagacaaaggttactaattgtatgatagtgtttttatatggaagaatgtacagcttatggacaaatgtacacctttttgttactttaataaaaatgtagtaggataaaaaaaaa

SEQ ID NO: 482 - DNA, 4727 bp, Homo sapiens
ctttcaattcctctggcaacaaaccacacactgggatctgacactgtagagtgctttctcttctctttttttgggggggggagggggtgtggttgcatatttaaactctcacgcatttatgtactgaggactgcagtgtaggactttcctgcagaataccatttgatcctattaagaattgtccaaatgttggagcatttgattgaaaaatccttcttagccattttaaagatagctttccaatgattagacgaattgattctttctgtgactcatcagttcatttcctgtaaaattcatgtcttgctgttgatttgtgaataagaaccagagcttgtagaaaccactttaatcatatccaggagtttgcaagaaacaggtgcttaacactaattcacctcctgaacaagaaaaatgggctgtgaccggaactgtgggctcatcgctggggctgtcattggtgctgtcctggctgtgtttggaggtattctaatgccagttggagacctgcttatccagaagacaattaaaaagcaagttgtcctcgaagaaggtacaattgcttttaaaaattgggttaaaacaggcacagaagtttacagacagttttggatctttgatgtgcaaaatccacaggaagtgatgatgaacagcagcaacattcaagttaagcaaagaggtccttatacgtacagagttcgttttctagccaaggaaaatgtaacccaggacgctgaggacaacacagtctctttcctgcagcccaatggtgccatcttcgaaccttcactatcagttggaacagaggctgacaacttcacagttctcaatctggctgtggcagctgcatcccatatctatcaaaatcaatttgttcaaatgatcctcaattcacttattaacaagtcaaaatcttctatgttccaagtcagaactttgagagaactgttatggggctatagggatccatttttgagtttggttccgtaccctgttactaccacagttggtctgttttatccttacaacaatactgcagatggagtttataaagttttcaatggaaaagataacataagtaaagttgccataatcgacacatataaaggtaaaaggaatctgtcctattgggaaagtcactgcgacatgattaatggtacagatgcagcctcatttccaccttttgttgagaaaagccaggtattgcagttcttttcttctgatatttgcaggtcaatctatgctgtatttgaatccgacgttaatctgaaaggaatccctgtgtatagatttgttcttccatccaaggcctttgcctctccagttgaaaacccagacaactattgtttctgcacagaaaaaattatctcaaaaaattgtacatcatatggtgtgctagacatcagcaaatgcaaagaagggagacctgtgtacatttcacttcctcattttctgtatgcaagtcctgatgtttcagaacctattgatggattaaacccaaatgaagaagaacataggacatacttggatattgaacctataactggattcactttacaatttgcaaaacggctgcaggtcaacctattggtcaagccatcagaaaaaattcaagtattaaagaatctgaagaggaactatattgtgcctattctttggcttaatgagactgggaccattggtgatgagaaggcaaacatgttcagaagtcaagtaactggaaaaataaacctccttggcctgatagaaatgatcttactcagtgttggtgtggtgatgtttgttgcttttatgatttcatattgtgcatgcagatcgaaaacaataaaataaacctggctcaagcacaaaccaatttgtgttgttctgattcaataattggtttctgggtggccaattcagaagaagagtgtacatgctcaacaaatcctaggccctgcattcctgtcatcctcatccgggggaaacaccatcatcccagtagctgccctattcaactgcaacagtctccaggaccatcagtatactgcatttcatgtgcaccaaatattttgaaagacatttataaataattggcttatgactcatatttctctatgaataccttcatacagcaggtataactcttttctttatgggcttaaatattttgtcactgatcctgcaaatggacatcattttagcacactagcggtttatattttaaggaccttcattctctgttctgcacctcttctggaaattgagtaaattttgcttttttttttttactcagttgcaacttacgcttggcatcttcagaatgcttttctagcattaagagatgtaaatgataaaggaattattgtatgaaatattacaaagcgtagactatgcattgttattcattataatattttttgctgtcataatcgcctcataaagacaggtttcaaccattaaaatatgttcttccttaaattcctgtgctttttctagttcctcttgtgtcataaaatgtttatcctaattttctctctgaagtatattttatctgaatccacatttctttataaatccatagtccttgctgaaatatgctttctaaatttctaccactttgttctaggctaattttttaagctaattggatgaagaacaaaaagacatttggtttcatcctttacagcagtaggacaattgcaaaggtttttcctttttcataaggagacacattaataggtaactctgtttcttgagcaggggttcacttattctgagagcattagttctcctaaaaagctccagcatagaaagggaagataaaccaaattctagcttgtgttttacccacagaaggatacaggacaaaggaatagtaactggcctgtttggatactaaaatcgaaaataacttttagcctcctccttatgatagccgccagagtaaatgttgagcattactacagaaaagccacaaaccaagaatctacctgtttggaaagatcttttgcatctctgaaggtgcttaaagcatacttagtgcctttccttttaactgggaagataaaagaagtatctgtccaagatattaatatgtaagataacattgtagacatgttcttctgataatacaaggtttattctatttgcattaggatatttgtggacatgtccatctaatataaaggaaagttttttaatcattgaggcatgtagggctgagttatataatgtagaaacttctaaagataattggatgagaatatacatattgacctgtatattatgactaatcatgactcagatcttaatacagggatgatctcatagcatttagatatcagaaaaggttttgacctatatgtctttaatattgtttgaatacatgtataatctttatcattcctcagtgtttcatttctcaaattctgtaaaaggaatataagaggaaagacaattcatatacaaagacaacgagattaaaaatatgcagtaggaaaaataattacttaaggggagattttttttacatgaaatctgggctttggatgtgtgtgtgtgtgtgtgtgtgtgtgtgtgtgcacatatgcactgtggtgggagtggggcaacttggggaatatgttacatgtgtgactttgttttgccctggcgaagttaatgttgttcagaaagggtaaatgtttggacacttgcaattgctcatggatgaatttatatgttttagtcatagaaaaattgtaccctttgatagaagcacattttctttccaaagctggttattaaccacagaattatagcaggtattcataacttaagtttgaaaatcaatagcgtctgcaaatggattaacagattagagaatcaacagcatcggaaaataggttaatgcatattgcttctaacaagtgcatgaagaaatagaagaagctatgtagctttcagttctgacagaaaagggtgaaggagggtatcatttcaagaaaaaaaatagctatcacgcaatggttatctctgaaaatatttgtattaagatgtgtatacatggccaggcatggtggctcatgcctgtaatcccagcactttgggaggcaggtggatcacgaggtcaggagatcaagaccatcctggccaacatggtgaaacctcatctctactaaaaatacaaaaatgagcggggtgtggtggcccatgcctgtagtcccagctgctcgggagactgaatctcttgagcctgggaagcagaggttgcagtgaactgagatcgcgtcactgcactccagcctggtgacagagcgagattccatctcaaaaaaaaaaaacagtatgcacgtacaaatttcttaacctgttatcaatgtctgagctacataattatctttctagttggagtttgttttaggtgtgtaccaactgacatttcagtttttctgtttgaagtccaatgtattagtgactctgtggctgctctcttcacctgccccttgtggcctgtctacaattctaaatggattttgaactcaatgtcgtcgcttctggtttcctgcatataccaatagcattacctatgactttttttttcctgagctattttcactgagctgagctaatgaactaaaactgagttatgtttaatatttgtatcaaatacataaaaggaatactgctttttccttttgtggctcaaaggtagctgcattttaaaatatttgtgaaaataaaaacttttgttattagaaaaatga

SEQ ID NO: 483 - DNA, 2265 bp, Homo sapiens
agtcctgcgatttcgggtgtagagggagcaggggcctgcggggacctggtgtgggtggagtggggacaagcggtggagaagggtacgccagggtcgctgagagactctgttctccctggagggactggttgccatgagagcagccgtctgaggggacgcagcctgcactacgcgccccaagaggctgtgcgtggcgagcaggtcacgtgacgggagcgcgggctttggaaggcggctgaacgtcaggccacccgccgctaagctgagaagggagagcgagcttaggaccgcctgcccggggcaaccccgaaccaagctttagccgccgaggccgcgtgtcccaaaggccagtcatccctcctctgtgttgccatgggaattcaaggcctggccaaactaattgctgatgtggcccccagtgccatccgggagaatgacatcaagagctactttggccgtaaggtggccattgatgcctctatgagcatttatcagttcctgattgctgttcgccagggtggggatgtgctgcagaatgaggagggtgagaccaccagccacctgatgggcatgttctaccgcaccattcgcatgatggagaacggcatcaagcccgtgtatgtctttgatggcaagccgccacagctcaagtcaggcgagctggccaaacgcagtgagcggcgggctgaggcagagaagcagctgcagcaggctcaggctgctggggccgagcaggaggtggaaaaattcactaagcggctggtgaaggtcactaagcagcacaatgatgagtgcaaacatctgctgagcctcatgggcatcccttatcttgatgcacccagtgaggcagaggccagctgtgctgccctggtgaaggctggcaaagtctatgctgcggctaccgaggacatggactgcctcaccttcggcagccctgtgctaatgcgacacctgactgccagtgaagccaaaaagctgccaatccaggaattccacctgagccggattctgcaggagctgggcctgaaccaggaacagtttgtggatctgtgcatcctgctaggcagtgactactgtgagagtatccggggtattgggcccaagcgggctgtggacctcatccagaagcacaagagcatcgaggagatcgtgcggcgacttgaccccaacaagtaccctgtgccagaaaattggctccacaaggaggctcaccagctcttcttggaacctgaggtgctggacccagagtctgtggagctgaagtggagcgagccaaatgaagaagagctgatcaagttcatgtgtggtgaaaagcagttctctgaggagcgaatccgcagtggggtcaagaggctgagtaagagccgccaaggcagcacccagggccgcctggatgatttcttcaaggtgaccggctcactctcttcagctaagcgcaaggagccagaacccaagggatccactaagaagaaggcaaagactggggcagcagggaagtttaaaaggggaaaataaatgtgtttccccattatacctccttcaccccagaatatttgccgtcttgtacccttaagagctacagctagagaaaccttcacggggtggagagaggattctaaggcttttctagcgtgacccttttcagtagtgctagtcccttttttacttgatcttaatggcaagaaggccacagaggtacttttccttttttagctcaggaaaatatgtcaggctcaaaccacttctcaggcagtttaatggacactaagtccattgttacatgaaagtgatagatagcaacaagttttggagaagagagagggagataaaagggggagacaaaagatgtacagaaatgatttcctggctggccaactggtggccagtgggaggtgatggtggacctagactgtgcttttctgtcttgttcagccttgacccaccttgagagagagccaccaggaaggcgcatcttagcagatgggaggaactgctgagagaagatgggcagaaagctggagcccctggagttggctgtgtctgtgtttgtgactgattactggctgtgtcttgggtgggcagaaactcgaacttgctatgtaatttgtgtctagttattcagaggagtaagatggtgatgttcacctggcaatcagctgagttgagactttggaataagacactggttttcatgcgctgtttttgttttaaagttatgaagaaaaaagtcaataaaattctaaaagtaaaaaaaaaaaaaaaaaa

SEQ ID NO: 484 - DNA, 2938 bp, Homo sapiens
gcgcacgtacacacgaagggcctgctgactacatctgccggaaagcatcgggccaagcctttctccattttgcggtctaggaagtagcagaggccccttcctgtagggagttgccatggagacgcggtggggcaccgacggagttctaatgacggccgtgattggtgcaggatcctgctaatctcaggaaggcccgtagagaagtgaggaaaacgtggtggggggcatgcgcgatctggtaggcggtgctgccgtctgttgtacctgagaggcttgcgcatgccgacgcacggattcgaggcggggagcatgggaagaagcggccaggagtatgacctgatcattgcgaccaccgctaggggaagggaggagagggtgtagaaacggggacgagggtgggggaagggcaaggaggcgctcgagctggtgcgcggagcatcctgggagacgtagtccagcgggagggggaagtcgaagactgcgcgtgctcaggagcgcggagcggcccgctgagcgcagaggggcagacactggcctcagatacctgacctggtaccctctatgaggcctgcggtgctgggctccccagaccgagcacccccagaagatgaggggcctgtcatggtgaagctagaggactctgaggaggagggtgaggctgccttatgggacccaggccctgaagctgcacgcctgcgtttccggtgcttccgctatgaggaggccacagggccccaagaggccctggcccagctccgagagctgtgtcgccagtggctgcgtccagaggtacgctccaaggagcagatgctggagctgttggtgctggagcagttcctgggcgcactgccccctgagatccaggcccgtgtgcaggggcagcggccaggcagccccgaggaggctgctgccctagtagatgggctgcgccgggagccgggcggaccccggagatgggtcacagtccaggtgcagggccaggaggtcctatcagagaagatggagccctccagtttccagcccctacctgaaactgagcctccaactccagagcctgggcccaagacacctcctaggactatgcaggaatcaccactgggcctgcaggtgaaagaggagtcagaggttacagaggactcagatttcctggagtctgggcctctagctgccacccaggagtctgtacccaccctcctgcctgaggaggcccagagatgtgggaccgtgctggaccagatctttccccacagcaagactgggcctgagggtccctcatggagggagcaccccagggccctgtggcatgaggaagctgggggcatcttctccccagggttcgcgctgcagctaggcagcatctccgcaggtccaggtagtgtaagccctcacctccacgtcccctgggacctcggcatggctggcctttctggccagatccaatcaccctcccgcgaaggtggctttgcgcatgcgcttctgctccccagcgatctgaggagtgaacaggaccccacggacgaggatccctgccggggtgtgggccctgctctgatcaccacccgctggcgctcccccaggggccggagccggggccgccccagcactgggggcggggtggttaggggcggccgttgcgatgtatgtggcaaggtgttcagccaacgcagcaacctgctgaggcaccagaagatccacacgggtgagcgaccattcgtgtgcagcgagtgcggccgcagcttcagccgcagctcgcacctgctgcgccaccagcttacgcacaccgaggagcggccgttcgtgtgcggcgactgtggccagggcttcgtgcgcagcgcgcgcctggaagagcatcggagagtgcacacgggcgaacagcctttccgttgcgctgagtgcggccagagcttccggcagcgctccaatctgctgcagcaccagcgcatccacggcgatcccccgggccctggcgctaagcccccggcccctcctggtgcgcccgagcctcccggcccctttccgtgcagcgagtgccgcgagagcttcgcgcggcgcgccgtgctgctggagcaccaggcggtacacacgggcgacaagtcctttggctgcgtcgagtgcggcgagcgcttcggccgccgctcagtgctgctgcagcaccggcgcgtgcacagtggcgagcggcccttcgcctgtgccgagtgcggccagagcttccggcagcgctccaacctgacgcagcaccggcgcatccacaccggggagcggcccttcgcctgcgccgagtgtggcaaggccttccgccagcggcctacgctcacgcagcatctccgcgtacacacgggcgagaaaccctttgcctgccccgagtgtggccagcgcttcagccagcgcctcaagctcacgcgtcatcagaggacacacaccggcgaaaagccctaccactgcggtgagtgcggcctgggcttcacgcaggtctcgcggctcaccgagcaccagcgcatccacacgggcgaacggcccttcgcctgccccgagtgcggccagagctttcggcagcacgccaacctcacccagcaccggcgcatccacacgggtgaacggccctacgcatgccctgagtgtggcaaggccttccgccagcggcccacgctcacgcagcatctgcgcacccaccgacgagagaagcccttcgcctgccaggactgtggccgccgcttccaccagagcaccaagctcattcagcaccagcgcgtccacagcgccgagtagctccagccgggacgcactgtgtccgccatggtcagaacacctacctcccctggttattgtgaggctggcgattacataagtataagcaggtccgcccagggcttggctactgtaggtgtccaataaacagtagatggaaactgggtctccacccaaaaaaaaaaaaaaaaaa

SEQ ID NO: 485 - DNA, 2096 bp, Homo sapiens; identical to SEQ ID NO: 373

SEQ ID NO: 486 - DNA, 5278 bp, Homo sapiens
agcgccgggagtctgggtagggggaagcgcccggcggccgcctccgccactgcagctgcagcccccgaggtcgccgcagtaatccggacccggcagcacccgcaccctcggcggccgcagcctcagcaccgcagagcggagagcggagcccggagcccgccgccccaggatggctgcagctcctccaagttactgttttgttgccttccctccacgtgctaaggatggtctggtggtatttgggaaaaattcagcccggcccagagatgaagtgcaagaggttgtgtatttctcggctgctgatcacgaaccggagagcaaggttgagtgcacttacatttcaatcgaccaagttccaaggacctatgccataatgataagcagacccgcctggctctggggagcagaaatgggagccaatgaacatggagtgtgcatagccaatgaagccatcaacaccagagagccagctgccgagatagaagccttgctggggatggatctggtcaggcttggtttagaaagaggggaaacagctaaagaagccttagatgtcattgtctccttgttggaagaacatggacaaggtgggaattactttgaagatgcaaactcctgccacagcttccaaagtgcatatctgattgtggatcgtgatgaagcctgggtgctcgagaccatagggaagtactgggctgccgagaaagtcacagagggagtgaggtgcatttgcagtcagctttcgctcaccactaagatggatgcagagcatccggaactcaggagttacgctcagagccaaggttggtggacgggagagggcgagttcaatttttccgaagtcttttctccagttgaggatcatctagactgcggtgctggcaaagacagcttagaaaaacaagaagaaagcatcacagtgcagactatgatgaacaccttacgggacaaagccagcggagtgtgcatagactctgagtttttcctcaccacagccagtggagtgtctgtcctgccgcagaatagaagctctccgtgcattcactacttcactggaacccctgatccttccaggtccatattcaagcctttcatctttgttgatgacgtaaaacttgtccccaaaacacagtctccctgttttggggatgacgaccctgccaaaaaggagcctcggttccaggagaaaccagaccgccggcatgagctgtacaaagcccacgagtgggcacgtgccatcatcgaaagtgaccaggagcaaggtcgcaagctgaggagcaccatgctggagctggagaagcaaggcctggaagccatggaagaaatcctgaccagctccgagccactggaccctgcggaagtgggggaccttttctatgactgtgttgacacggagattaagttctttaagtgaagtaagcgttccctttccccttcttatttaagacttcccaccttactaaattaccagcaaaacaaaccactctcctgtttgagtaaaatgagaaagttaatatgtggcctccttttctgaagccagatcaaactgttaccttgtgttccaccttgaatctcacagcgtccccttctgcaatgtaggtctccttcctgtgcagtgtaacatgtatcccgttgcctgttgttcggttgtgtgactaattgtggattttaagctgctattattgtatttcagtggcaatggacacattagccttttacaagaggactagagttcatcaagccttgaaaggcaggcttcacagtgccgagttggcgggaaaagcaaattcttttgaagtcttagtctttccctcagtagcggtttctttcaggttaacaagaggcatttgtgcacacacacagggctcttgtgtgtgttgtcaaggggaccctccgtggcctcccgtgagtgcatgcctgtagtgcacagtgtctctacaggtgtcttctggggggcagaaccaattggaaggaagaaagggacccctctccagtcctggctccttcctacatcctgggctcctgaagaagctgtcttcccattttccatgcgctgtgcttatgtgtggtggactgcagagctgcttccacttacaggagagctgataatttgttagctggaacctattcacttccgagattcagacatagccatgctggtggccttctgaatcactgcatggatgtcccaggaggcagctctccccacacagcagcacagccatcacaggattccttgtgtagaaatgattcccagtctagttaccaacagctagtctaggagtaattgaatggccctatggcacagttccacccacagagtagtgaatctctcagccaaggagggaaagaaaaggaagaactcttgactatttagattctagttaaatatctggaatcctagcagtcactacattatctcagcagagagactttaattaaactgatttgtttccaatgtcgggttcacttaaaggatttgacttaccaccagagcatagaaaagcatgcaaggaagaccagatgggcttagcattgggaagacagagggcaaggaggtgatagatggatatagaagcatttctctgcaggataccagttcaggccccaccattcctgccaaggccattacatcccacaaacccaaatacaaagcagctgacttccctggatcttccccccactcctcacacctcacatgtcccaggagctgccttcattcaggcgggtagctgcactgggcatggggtggtggtgggagcttaccgccacctattcaagctctcagctactcctgaaacgggcagagatgatgaacagaagtgtatgtaaatacagcagctagtgggagagcaccagttgggcctaatcctgcctcatcattcttggcaggaatctgcaaatggaaacattgtgagtatcagcaatctgggaagtgacagggttaataactccttcccagaagctgtatcatgagattttgaggggaccgagccctgttacatggatgtgaacagtgaggatcagaggttttatcagaacacattctttttttctaccaactctccagagcgtgagtataggagtgccatgagctttttagtcagcagttttgtaaactctgtatataaaatcattaaccacacattgtgggtgatgggaagacgatttcagctgacagagttaatggcaaccaataatggtggcctgtagctgctaagagcttcacgcaggtttggcctgggctttcactgttggtgaatttagagtgtccttttaggtggggcggctattctaaaagtgtctttctatcactgttaagggggggggaaagtgaggttcgaggatgacgtaggtaactctcccctcccaagtccatgttccaagtggctatgtaaagcaagatgatacagaaagctgctctaaaatctcactgagtgatttcaccttcgcctactatgaaatgtctcatcagacctgacatgtctgagataaccaaggtgattcaggatttgatcaaaagaagtctagtaagaattaattacacagaagcctcctttcatttctatgggccaaacaaaggccatggataaccctacccgctttatgtcattacccattgggaaacacaatggctacttctgttagggtacattgaccttggtcaagcatcttaaagaaggcaaccctaattgagagctgtcttggctaatactctgcaccacaattgtgatgtcctagtcctaccactagagggcatggtacagcctggcaaaagttaaaaggggtgtggcagctcccatcaggtctggaggtggtctataagcacagttgacagttgtgcattgggatgggtggagaaagacgacaagagagcagagaatctgctgatgtggctgcgcttacttttagtgactttatgtacttatattaacagctggaaataggttgttgggttttgagcaggctgttatagtgaggaatgttcatttttaaatgttcctaacagattttgcttttgaaaaatgcttgttacatgaataatttgtggaccagggattgcttttctgaaggcagtatagggaacatgaatattcaagatgaaatacaaaaattatgtttaagggtcatagtgtataagtagcttcctaggaaaccctttgtgtatcttttcagactggggtgggggctgagcatgcttgtgcagaaagaagccatagccagaaaggacagaatctctcccccactcccttgccccataaccaaacataagctagctagtcttgtctaatagatgggatttactataggtgaagatagccctcatattcaaggacagaagctctggcaggagtaaattagcaaagcagaaatagtaccctttcattcttggaggtgctttgaaattttaggtagaatataatcgaaattatggaggttccttagtgctcaataatataagacctggtgttattagaacgagtctttcttataaactaacagagcaggtatatgcctgttagaccttagctgtggggttcctttactattgggtgaatcattaggtataaaaaataatcatcaaccaggcaaattactttgcttcctagctgatgtcatcccacattggtacaggtgttattcagtactgggtggttcagcagggaagccgggtgggaccagtgtgtctgtcatgaaaccactaactgcattcctgactgaagagccatctgtcatttattggggaaggtcttcagttgagctctcagccttaggaaggaagcacgtggaggagggacggaggaggttcccttgctgggcatgcttcgtagagggccaggagcagcaggtcatgtgcacatgccgttgcagcacaagcttatgcttcccgtagccgtggcttttcattctgcacagtcccaggtcccagctcccctcttatggtttctgtcataatgtgctttatctgattgactccaaacatcccgaaatgtcacctgcagatttctcgtgggaaccaatatgtacatgtttgcaattatgctgtgagaatttaaatgtgttagatggaaaatgctattggcagggaataataataaaaaaaaaagaaaatcattctgtttcctgcagtgggaactggccatgtagtcttaacagtcttttgtacaaatatctacaaagcagataatatccctatccagtgcttgcccttggaattgtctctaaatgcatcaagcatacaataaaaaaaactgaaattaacatccaaaaaaaaaaa

SEQ ID NO: 487 - DNA, 1041 bp, Homo sapiens
acggaaacgggcgtgccatttccgcgcacgtctgcagatgcggtagtcgattggtcaagtctcccatggctcctccttcatcaggaggtgggcaaaccgcgccatgatagggtcgggattggctggctctggaggcgcaggtggtccttcttctactgtcacatggtgcgcgctgttttctaatcacgtggctgccacccaggtaagaagaggccgctcttcctggggttgtttctccgtgtgacgtgtggcctttgagatcaactctcctgtaccagcgtaggccgcatgagtggggggcgggctcccgcggtcctgctcggcggagtggtgagtgaccggccccgccccgccccttccggtcctcgaagcctcgaccgctacccgcaccctaaatcccagaggttggccccctgaggtgcctctctgctcctgtcttttgtttggatgccggcgctgctgcctgtggcctcccgccttttgttgctaccccgagtcttgctgaccatggcctctggaagccctccgacccagccctcgccggcctcggattccggctctggctacgttccgggctcggtctctgcagcctttgttacttgccccaacgagaaggtcgccaaggagatcgccagggccgtggtggagaagcgcctagcagcctgcgtcaacctcatccctcagattacatccatctatgagtggaaagggaagatcgaggaagacagtgaggtgctgatgatgattaaaacccaaagttccttggtcccagctttgacagattttgttcgttctgtgcacccttacgaagtggccgaggtaattgcattgcctgtggaacaggggaactttccgtacctgcagtgggtgcgccaggtcacagagtcagtttctgactctatcacagtcctgccatgatgagccctgttcctgctcatcatgaagatccccgcgatacttcaacgccttctgacttccaggtgatgactgggcccccaataaatcccgtctttgggtctctctgccaaaaaaaaaaaaaaa

SEQ ID NO: 488 - DNA, 3656 bp, Homo sapiens
agcgatccgaggcccggccccggccccgccccgcgccgcgccgcgccgcttgccgccgggctagcactgacgtgtctctcggcggagctgctgtgcagtggaacgcgctgggccgcgggcagcgtcgcctcacgcggagcagagctgagctgaagcgggacccggagcccgagcagccgccgccatggcaatcaaatttctggaagtcatcaagcccttctgtgtcatcctgccggaaattcagaagccagagaggaagattcagtttaaggagaaagtgctgtggaccgctatcaccctctttatcttcttagtgtgctgccagattcccctgtttgggatcatgtcttcagattcagctgaccctttctattggatgagagtgattctagcctctaacagaggcacattgatggagctagggatctctcctattgtcacgtctggccttataatgcaactcttggctggcgccaagataattgaagttggtgacaccccaaaagaccgagctctcttcaacggagcccaaaagttatttggcatgatcattactatcggccagtctatcgtgtatgtgatgaccgggatgtatggggacccttctgaaatgggtgctggaatttgcctgctaatcaccattcagctctttgttgctggcttaattgtcctacttttggatgaactcctgcaaaaaggatatggccttggctctggtatttctctcttcattgcaactaacatctgtgaaaccatcgtatggaaggcattcagccccactactgtcaacactggccgaggaatggaatttgaaggtgctatcatcgcacttttccatctgctggccacacgcacagacaaggtccgagcccttcgggaggcgttctaccgccagaatcttcccaacctcatgaatctcatcgccaccatctttgtctttgcagtggtcatctatttccagggcttccgagtggacctgccaatcaagtcggcccgctaccgtggccagtacaacacctatcccatcaagctcttctatacgtccaacatccccatcatcctgcagtctgccctggtgtccaacctttatgtcatctcccaaatgctctcagctcgcttcagtggcaacttgctggtcagcctgctgggcacctggtcggacacgtcttctgggggcccagcacgtgcttatccagttggtggcctttgctattacctgtcccctccagaatcttttggctccgtgttagaagacccggtccatgcagttgtatacatagtgttcatgctgggctcctgtgcattcttctccaaaacgtggattgaggtctcaggttcctctgccaaagatgttgcaaagcagctgaaggagcagcagatggtgatgagaggccaccgagagacctccatggtccatgaactcaaccggtacatccccacagccgcggcctttggtgggctgtgcatcggggccctctcggtcctggctgacttcctaggcgccattgggtctggaaccgggatcctgctcgcagtcacaatcatctaccagtactttgagatcttcgttaaggagcaaagcgaggttggcagcatgggggccctgctcttctgagcccgtctcccggacaggttgaggaagctgctccagaagcgcctcggaaggggagctctcatcatggcgcgtgctgctgcggcatatggacttttaataatgtttttgaatttcgtattctttcattccactgtgtaaagtgctagacattttccaatttaaaattttgctttttatcctggcactggcaaaaagaactgtgaaagtgaaattttattcagccgactgccagagaagtgggaatggtataggattgtccccaagtgtccatgtaacttttgttttaacctttgcaccttctcagtgctgtatgcggctgcagccgtctcacctgtttccccacaaagggaatttctcactctggttggaagcacaaacactgaaatgtctacgtttcattttggcagtagggtgtgaagctgggagcagatcatgtatttcccggagacgtgggaccttgctggcatgtctccttcacaatcaggcgtgggaatatctggcttaggactgtttctctctaagacaccattgttttcccttattttaaaagtgatttttttaaggacagaacttcttccaaaagagagggatggctttcccagaagacactcctggccatctgtggatttgtctgtgcacctattggctcttctagctgactcttctggttgggcttagagtctgcctgtttctgctagctccgtgtttagtccacttgggtcatcagctctgccaagctgagcctggccaagctaggtggacagacccttgcagtgatgtccgtttgtccagattctgccagtcatcactggacacgtctcctcgcagctgccctagcaaggggagacattgtggtagctatcagacatggacagaaactgacttagtgctcacaagcccctacaccttctgggctgaagatcacccagctgtgttcagaattttcttactgtgcttaggactgcacgcaagtgagcagacaccaccgacttcctttctgcgtcaccagtgtcgtcagcagagagaggacagcacaggctcaaggttggtagtgaagtcaggttcggggtgcatgggctgtggtggtgttgatcagttgctccagtgtttgaaataagaagactcatgtttatgtctggaataagttctgtttgtgctgacaggtggcctaggtcctggagatgagcaccctctctctggcctttagggagtcccctcttaggacaggcactgcccagcagcaagggcagcagagttgggtgctaagatcctgaggagctcgaggtttcgagctggctttagacattggtgggaccaaggatgttttgcaggatgccctgatcctaagaagggggcctgggggtgcgtgcagcctgtcggggagaccccactctgacagtgggcacacggcagcctgcaaagcacagggccaccgccacagcccggcagaggggcacactctggagaccttgctggcagtgctagccaggaaacagagtgaccaagggacaagaagggacttgcctaaagccacccagcaactcagcagcagaaccaagatgggccccaggctcctccatatggcccagggcttaccaccctatcacacgtggccttgtctagacccagtcctgagcaggggagaggctcttgagacctgatgccctcctacccacatggttctcccactgccctgtctgctctgctgctacagaggggcagggcctcccccagcccacgcttaggaatgcttggcctctggcaggcaggcagctgtacccaagctggtgggcagggggctggaaggcaccaggcctcaggaggagccccatagtcccgcctgcagcctgtaaccatcggctgggccctgcaaggcccacactcacgccctgtgggtgatggtcacggtgggtgggtgggggctgaccccagcttccaggggactgtcactgtggacgccaaaatggcataactgagataaggtgaataagtgacaaataaagccagttttttacaaggtaaaaaaaaaaaaaaaaaaaaa

SEQ ID NO: 489 - DNA, 1386 bp, Homo sapiens
gccccatctccttgggctgcccgtgcttcgtgctttggactaccgcccagcagtgtcctgccctctgcctgggcctcggtccctcctgcacctgctgcctggatccccggcctgcctgggcctgggccttggttctccccatgacaccacctgaacgtctcttcctcccaagggtgtgtggcaccaccctacacctcctccttctggggctgctgctggttctgctgcctggggcccaggggctccctggtgttggcctcacaccttcagctgcccagactgcccgtcagcaccccaagatgcatcttgcccacagcaccctcaaacctgctgctcacctcattggagaccccagcaagcagaactcactgctctggagagcaaacacggaccgtgccttcctccaggatggtttctccttgagcaacaattctctcctggtccccaccagtggcatctacttcgtctactcccaggtggtcttctctgggaaagcctactctcccaaggccacctcctccccactctacctggcccatgaggtccagctcttctcctcccagtaccccttccatgtgcctctcctcagctcccagaagatggtgtatccagggctgcaggaaccctggctgcactcgatgtaccacggggctgcgttccagctcacccagggagaccagctatccacccacacagatggcatcccccacctagtcctcagccctagtactgtcttctttggagccttcgctctgtagaacttggaaaaatccagaaagaaaaaataattgatttcaagaccttctccccattctgcctccattctgaccatttcaggggtcgtcaccacctctcctttggccattccaacagctcaagtcttccctgatcaagtcaccggagctttcaaagaaggaattctaggcatcccaggggaccacacctccctgaaccatccctgatgtctgtctggctgaggatttcaagcctgcctaggaattcccagcccaaagctgttggtctgtcccaccagctaggtggggcctagatccacacacagaggaagagcaggcacatggaggagcttgggggatgactagaggcagggaggggactatttatgaaggcaaaaaaattaaattatttatttatggaggatggagagaggggaataatagaagaacatccaaggagaaacagagacaggcccaagagatgaagagtgagagggcatgcgcacaaggctgaccaagagagaaagaagtaggcatgagggatcacagggccccagaaggcagggaaaggctctgaaagccagctgccgaccagagccccacacggaggcatctgcaccctcgatgaagcccaataaacctcttttctctg

SEQ ID NO: 490 - DNA, 2308 bp, Homo sapiens
aaaactttgggagtttttagagacgagtttttttttttttctattacttttccccccccctaactaacggactattattgttgttgttttaaatttagctcttagggcttagctatttgggttttcttgcggtgtccggctcccgtctccctggctcccccgcccgccctgcggccccagcgcccctcgctctcatccagcccgcgaggagtgcgggcgccgcgccgcctttaaagcgaggccagggagcgaggcggtgaccggccgagatccggccctcgcctcctccctcggtggcgctagggctcccggcctctcttcctcagtgcgggcggagaagcgaaagcggatcgtcctcggctgccgccgccttctccgggactcgcgcgcccctccccgcgcgcccacccacccagtccggctggactgcggcagccgcgcggctcaccccggcaggatgttcgcagccgggctggctcccttctacgcctccaacttcagcctctggtcggccgcttactgctcctcggccggcccaggcggctgctccttccccttggaccccgccgccgtcaaaaagccctccttctgcatcgcagacattctgcacgccggcgtgggggatctgggggcggccccggagggcctggcaggggcctcggccgccgccctcaccgcgcacttgggctcggttcacccgcacgcctctttccaagcggcggccagatccccgcttcgacccaccccagtggtggcgccctccgaagtcccggctggcttcccgcagcggctgtctccgctctcagccgcctaccaccaccatcacccgcaacaacaacagcagcagcaacagccgcagcagcaacagcctccgcctccgccccgggctggcgccctgcagcccccggcctcggggacgcgagtggttccgaacccccaccacagtggctctgccccggccccctccagcaaagacctcaaatttggaattgaccgcattttatctgcagaatttgacccaaaagtcaaagaaggcaacacgctgagagatctcacttccctgctaaccggtgggcggcccgccggggtgcacctctcaggcctgcagccctcggccggccagttcttcgcatctctagatcccattaacgaggcttctgcaatcctgagtcccttaaactcgaacccaagaaattcagttcagcatcagttccaagacacgtttccaggtccctatgctgtgctcacgaaggacaccatgccgcagacgtacaaaaggaagcgttcatggtcgcgcgctgtgttctccaacctgcagaggaaaggcctggagaaaaggtttgagattcagaagtacgtgaccaagccggaccgaaagcagctggcggcgatgctgggcctcacggacgcacaggtgaaggtgtggttccagaaccggcggatgaagtggcggcactccaaggaggcccaggcccaaaaggacaaggacaaggaggctggcgagaagccatcaggtggagccccggctgcggatggcgagcaggacgagaggagccccagccgttctgaaggcgaggctgagagcgagagcagcgactccgagtccctggacatggcccccagcgacacggagcggactgaggggagtgagcgttctctgcaccaaacaacagttattaaggccccggtcactggcgccctcattaccgccagcagtgctgggagtggtgggagcagcggcggcggcggcaatagtttcagcttcagcagcgccagcagtcttagtagcagcagcaccagtgcgggttgcgccagcagccttggcggcggcggcgcctcggagcttctccctgcaacacagcccacagccagcagcgctcccaaaagccccgagccagcccaaggcgcgcttggctgcttatagactgtactagggcggaggggatccgggccttgcgtgcagcctcccaaccatgggctgggttttgtgcttactgtatgttggcgacttggtagggcaggagacgcagcgtggagcctacctcccgacattcacgcttcgccccacgctgctccgactggctgcagcggacactgcccaaagcagaggggagtctcagtgtcctgctagccagccgaacacttctctccggaagcaggctggttcgactgtgaggtgtttgactaaactgtttctctgactcgccccagaggtcgtggctcaaaggcacttaggacgccttaaatttgtaaataaaatgtttactacggtttgtaaaaaaaaaaaaaaaaaaaaaaaaaaaaaaaa

SEQ ID NO: 491 - DNA, 1501 bp, Homo sapiens
agcgagtccttcttttcctgactgcagctcttttcattttgccatccttttccagctccatgatggttctgcaggtttctgcggccccccggacagtggctctgacggcgttactgatggtgctgctcacatctgtggtccagggcagggccactccagagaattaccttttccagggacggcaggaatgctacgcgtttaatgggacacagcgcttcctggagagatacatctacaaccgggaggagttcgcgcgcttcgacagcgacgtgggggagttccgggcggtgacggagctggggcggcctgctgcggagtactggaacagccagaaggacatcctggaggagaagcgggcagtgccggacaggatgtgcagacacaactacgagctgggcgggcccatgaccctgcagcgccgagtccagcctagggtgaatgtttccccctccaagaaggggcccttgcagcaccacaacctgcttgtctgccacgtgacggatttctacccaggcagcattcaagtccgatggttcctgaatggacaggaggaaacagctggggtcgtgtccaccaacctgatccgtaatggagactggaccttccagatcctggtgatgctggaaatgaccccccagcagggagatgtctacacctgccaagtggagcacaccagcctggatagtcctgtcaccgtggagtggaaggcacagtctgattctgcccggagtaagacattgacgggagctgggggcttcgtgctggggctcatcatctgtggagtgggcatcttcatgcacaggaggagcaagaaagttcaacgaggatctgcataaacagggttcctgagctcactgaaaagactattgtgccttaggaaaagcatttgctgtgtttcgttagcatctggctccaggacagaccttcaacttccaaattggatactgctgccaagaagttgctctgaagtcagtttctatcattctgctctttgattcaaagcactgtttctctcactgggcctccaaccatgttcccttcttcttagcaccacaaataatcaaaacccaacatgactgtttgttttcctttaaaaatatgcaccaaatcatctctcatcacttttctctgagggttttagtagacagtaggagttaataaagaagttcattttggtttaaacataggaaagaagagaaccatgaaaatggggatatgttaactattgtataatggggcctgttacacatgacactcttctgaattgactgtatttcagtgagctgcccccaaatcaagtttagtgccctcatccatttatgtctcagaccactattcttaactattcaatggtgagcagactgcaaatctgcctgataggacccatattcccacagcactaattcaacatataccttactgagagcatgttttatcattaccattaagaagttaaatgaacatcagaatttaaaatcataaatataatctaatacacttt

SEQ ID NO: 492 - DNA, 1399 bp, Homo sapiens
tttccacatgtgaggggctgaggggctcaaggaggggagcatctccactgggtggaggctgggggtcccagcaggaagtggtgagacaaagggcgctggctggcagggagacagcacaggaaggtcctagagcttcctcagtgcagctggactctcctggagaccttcacacaccctgacatctgggccttgcccgacgagggtgctttcactggtctgcaccatggcccaggccctgggattttgaacagctccgcaggtgaatgaaaggaacatggagctgatccaggacacctcccgcccgccactggagtacgtgaagggggtcccgctcatcaagtactttgcagaggcactggggcccctgcagagcttccaggcccggcctgatgacctgctcatcagcacctaccccaagtccggcactacctgggtaagccagattctggacatgatctaccagggtggtgacctggagaagtgtcaccgagctcccatcttcatgcgggtgcccttccttgagttcaaagccccagggattccctcagggatggagactctgaaagacacaccggccccacgactcctgaagacacacctgcccctggctctgctcccccagactctgttggatcagaaggtcaaggtggtctatgttgcccgcaacgcaaaggatgtggcagtttcctactaccacttctaccacatggccaaggtgcaccctgagcctgggacctgggacagcttcctggagaagttcatggtcggagaagtgtcctacggatcctggtaccagcacgtgcaggagtggtgggagctgagccgcacccaccctgttctctacctcttctatgaagacatgaaggagaacccgaaaagggagattcaaaagatcctggagtttgtggggcgctccctgccagaggagaccgtggacttcgtggttcagcacacgtcgttcaaggagatgaagaagaaccctatgaccaactacaccaccgtcccccaggagttcatggaccacagcatctcccccttcatgaggaaaggcatggctggggactggaagaccaccttcaccgtggcgcagaatgagcgcttcgatgcggactatgcggagaagatggcaggctgcagcctcagcttccgctctgagctgtgagaggggctcctggagtcactgcagagggagtgtgcgaatcaaacctgaccaagcggctcaagaataaaatatgaattgagggcccgggacggtaggtcatgtctgtaatcccagcaatttggaggctgaggtgggaggatcatttgagcccaggagttcgagaccaacctgggcaacatagtgagattctgttaaaaaaataaaataaaataaaaccaatttttaaaaaaaaaaaaa

SEQ ID NO: 493 - DNA, 5559 bp, Homo sapiens
cttcgatcgtccgattctcccagccgcaccacgggtgctcccacctgcggagaaccggagtctggcgatgccaaggcgcttctgggaattgtagttccgggcgggatgagggcagcacgcctggctccgctccttcttacgcatgcgcgactccgagctggccaaagaagttcgtcccctttgtgaggcccgggatgggaggtgcccggttcccccagggacagcttcaagcggtagggacagacatctgaggacccagcctcagggatgctgtccccgggcttccaggctccagcgccgtaggactgaggcagactccacggtgagaaagagacccgatctaacccaggcctttcatcagagcccaggagggaaggcaggaagtgggaccacgaggcccggggggcttctaactcgtctggccagggagatctgaattggggtgaagagcagaatctccagaacaaggaggaggtggtgatcatggagacagatttggctgaaatgcctgagaaaggagctctgtcttcccaggattctccccatttccaagagaagagcacagaagagggagaagtggctgctctgcgcctcacggccagatcccaggaaacagtgacattcaaggatgtggccatggactttacaccagaggagtgggggaagctggatcctgcacaaagggatgtgatgctggagaactataggaacctagtctcactttggcttccagtttccaaacctgagagctacaacttggagaatggaaaagaaccattgaagcttgagagaaaagcccccaaaagcagctattcagacatggagactagaccacagagcaaggattcaacttcagtgcaagatttttccaaagcagaatcatgcaaagttgcaataatagacagactgacacggaatagtgtctatgactctaacttggaagcagcccttgaatgtgaaaattggttagagaatcagcaaggaaatcaggagagacatttgagagaaatgttcactcacatgaattcactctctgaggaaacagaccataagcatgatgtatactggaaaagcttcaatcagaaatctgtccttatcactgaagacagagttcccaaaggatcttatgccttccatacacttgaaaaaagcttgaaacaaaaatcaaacttaatgaaaaagcagagaacttataaagagaaaaaacctcataaatgtaatgattgtggtgaactcttcacctaccattcagtgcttattcgacaccagagagtccatactggagagaaaccctatacctgcaatgaatgtgggaaatcttttagccacagagctaatttaactaaacaccagagaactcatactagaattctctttgaatgcagtgaatgcaagaaaaccttcacagaaagctcatcccttgcaacacatcagagaattcacgttggagagagaccttatgaatgcaatgaatgtgggaaaggttttaatcgaagtacacatcttgtgcagcatcagttgattcatactggagtgaagccttatgaatgtaatgaatgtgataaagcttttattcattcatcagcactcattaaacatcaaagaactcatactggagagaaaccttataaatgtcaagaatgtgggaaagcctttagccattgctcatccctaactaagcatcagagagttcatactggagaaaagccatatgaatgcagtgaatgtggaaaaacttttagtcagagcacacatcttgttcaacatcagagaattcacactggagagaaaccctatgagtgtaatgaatgtgggaaaaccttcagccggagctccaattttgctaaacatcaaagaattcatattggaaagaaaccgtacaaatgtagcgagtgtggaaaagccttcattcattcatcagctctcattcaacatcagagaactcataccggagagaaaccctttagatgtaatgagtgtgggaaaagctttaagtgcagttcatctctcatcagacatcaaagagttcacactgaagagcaaccctgaaaaattactgaatgtgaagaaatgtaagttggttttatcactgtattaaatacttgagtgtttaggtggaaggcgcatccataatatgcatgtgaggaccaattctgtatgcatctaatttcatttgcgtaatacatagttttgagccataagcaggttctttatgtccgttaatttgataattatgaaatctagccagcgatttcaaaattttaatctccaacgtcccaaatagctatctgtggaaattcaagaagtccctgagagtaggtagcagtacgaacattgtgaaatccagttttcccctctcttgtttatgtcagagctttgttgtaagcctctcactttgtaaggaaattcttattgggtaggttaggctgagggcttacatccttatcatcaggaagacacaatgttgttatttattactccttgagatctagatacacatatggtataattcatctagagtgtaatttcttttatattagccttaaaaaccaaaaatgctgggttcaaagtccttagaattcccttcctccctcaacaagctgctgtctatgttgatgaccataactgggatgtataatatttacagacaactctaagttacgttcacatggattatgtacatcattgatttttttttttttttttttttgagacagagtcttgctctgttgcccgggctggagtgcagtggcgcgatctcggctcactgcaacctccacctcccaggttcatgccattctcttgtctcagcctcccaagtagctgggactacaggcacctgccagtacgcctggctaattttttttgtatttttagtagagatggggtttcaccatgttagccaggatggtcttgatctcctgacctcgtgatctgcctgcctcggcctcccaaagtgctgggattacaggcatgagccaccatgcctggcatcatcattgatttatgtcattgttatccctctaccgcggagaccttctttcattttccatttccctgggagttcacgtgaagtagtgaatgggtcaaaatcttaacagtggttgttgatcaagtccttcctttcttatccttggcactgaataaatctttggttttccataatcaaagggtgagggagacttcttttgtctacattattcagctttctgaaagctatgctgtgtccatttgagaaaaagccccagggatattgaaggtctgagaagttgagtggttcagtgtgttattatatttagggtcccagtaaagaagaactgaagcaactgtgagacaccagggcatacttccctgtatgagtggaaaacaaggcacggaaaatagctcacaggatagtcctcaactgacttgcttgaggataagcagcttcccttcgtgaagaagttgccatttctctggccttcatatttatctactttttgttattgttgtctgtatcggttcaatctcacactgctataaagaaatgcctgagactgggtaacttataaagaaaaaaggtttaattggctcatggttccatgggctgtacaggaagtatgactggggaggtctcagggagcttttactcatggcaaaaggcaaagccagagcaggtatcttcacagggctagagcaagaggaaaagagagaggggaggtgctacacactttttatgcaaccaaatctcatgagaactctatcacgagacagcagtagggggacagtgctaaatcattcatgagaaactacctgcgtggtccagtcaccttgcaccaggccccacctcccacattggggattacaattaaacatgagatttgggtggggatacagatctaaactgtatcattactcaaaaaaaaaaaaaaaaagaaagaaaagaaaacacaggaaaaggaactcacctcttttatcatcttagtatttagtactaatggtttagagcaggaattgacaaactgtggcctggactcatggaccaactctggcccaccacctgtttctcagaagaaaattttattggaactcagccacacttactcatttacatgttgtccttgactgcctttgtgtccagtgtcagaactgagtagctgcagcggaggttgtgcctctgggctttaatatcacaaacagagcagcttataagcaacagaaacttacttctcacagttttggaggctgggaagtccaagatcaaggtgtcaacatatttagggtctagggaaggtctgcttcttggttaatagaaagcacctttcactgtgtcttcacatggtagaaggggagagctctggtatcttcagccccttataagggcactaatcccattcatgagagctccaccctcacgacctaatcacctccaaaaggccccatttcgtaataccgtcagttaagtttcattatatgactttgatggggatatagcccatagtaggttgtatgtccctgaaagcctaaaatatttactgtttggctctttacagaaaatattttcttggcccctgttccagagcattcatcaagtcagataaagggtttaaaccagtcagagaaactaggtggaatggaaaagtactgagagataattggggacagaaaaataaaagagatgggaaatgctgcatcaaaatactcctacctctaggatgttactatatattgttaggagaattcaagttattgaaacttgccaaattcttgagtgaagaggaattcatttgagagccaaaatttgactaaggaaagaagaccaacatgggctttccaaagttgagtttgaattctgccatccccactaagcagtcatgtgaccttggaaaaactccctactctgagtctcagtttctttatctgtattaggtttcaacaaagggaataaatcattggcttctcatgaggttgtcataaggattaaataagacaatgcatataaaagaactggcagacaataaatatagagtcccccactcctgcttggtgctctctttctctctccttctctacatagagaagtgccagagcatccgtcagtagaagttacttaaggttggctgtgtcttccacatcttttgtttacccatgaagaactgtgaccatcttgttctgtgtcttgtcataaagatgggacgtgacttctttctgctcttgcttccatctggtgctgttttctgcacagcctccttgagaccttccagaaccttcttttttcctacttcatatcacttaaccagtagctatctgggatggttccagaggctgaagtttgcagttgaataacattttaaatagtgttaagcgacttgggatctctggccctttgcgtttcagtatttgtcctttttatgcctgatgtttaacctgccacatgtttgtactgcaacatgaatcttggaaattttaatgttatgcatttcaaatgtttttggttatctgtaaactaaatgtgcccttattggctcacttgtcaataaagatgtttgtatatgtattgtcagaaaaaaaaaaaaaaaa

SEQ ID NO: 494 - DNA, 4982 bp, Homo sapiens
aggtgacagctggagggaggagcgggggtggagccgggggaagggtggggaggggatgggctggagctccgggcagtgtgcgaggcgcacgcacaggagcctgcactctgcgtcccgcaccccagcagccgcgccatgagccggagtctcttgctctggttcttgctgttcctgctcctgctcccgccgctccccgtcctgctcgcggacccaggggcgcccacgccagtgaatccctgttgttactatccatgccagcaccagggcatctgtgtccgcttcggccttgaccgctaccagtgtgactgcacccgcacgggctattccggccccaactgcaccatccctggcctgtggacctggctccggaattcactgcggcccagcccctctttcacccacttcctgctcactcacgggcgctggttctgggagtttgtcaatgccaccttcatccgagagatgctcatgcgcctggtactcacagtgcgctccaaccttatccccagtccccccacctacaactcagcacatgactacatcagctgggagtctttctccaacgtgagctattacactcgtattctgccctctgtgcctaaagattgccccacacccatgggaaccaaagggaagaagcagttgccagatgcccagctcctggcccgccgcttcctgctcaggaggaagttcatacctgacccccaaggcaccaacctcatgtttgccttctttgcacaacacttcacccaccagttcttcaaaacttctggcaagatgggtcctggcttcaccaaggccttgggccatggggtagacctcggccacatttatggagacaatctggagcgtcagtatcaactgcggctctttaaggatgggaaactcaagtaccaggtgctggatggagaaatgtacccgccctcggtagaagaggcgcctgtgttgatgcactacccccgaggcatcccgccccagagccagatggctgtgggccaggaggtgtttgggctgcttcctgggctcatgctgtatgccacgctctggctacgtgagcacaaccgtgtgtgtgacctgctgaaggctgagcaccccacctggggcgatgagcagcttttccagacgacccgcctcatcctcataggggagaccatcaagattgtcatcgaggagtacgtgcagcagctgagtggctatttcctgcagctgaaatttgacccagagctgctgttcggtgtccagttccaataccgcaaccgcattgccatggagttcaaccatctctaccactggcaccccctcatgcctgactccttcaagatcggtgggggcaggaacatggaccaccacatcctgcatgtggctgtggatgtcatcagggagtctcgggagatgcggctgcagcccttcaatgagtaccgcaagaggtttggcatgaaaccctacacctccttccaggagctcgtaggagagaaggagatggcagcagagttggaggaattgtatggagacattgatgcgttggagttctaccctggactgcttcttgaaaagtgccatccaaactctatctttggggagagtatgatagagattggggctcccttttccctcaagggtctcctagggaatcccatctgttctccggagtactggaagccgagcacatttggcggcgaggtgggctttaacattgtcaagacggccacactgaagaagctggtctgcctcaacaccaagacctgtccctacgtttccttccgtgtgccggatgccagtcaggatgatgggcctgctgtggagcgaccatccacagagctctgaggggcaggaaagcagcattctggaggggagagctttgtgcttgtcattccagagtgctgaggccagggctgatggtcttaaatgctcattttctggtttggcatggtgagtgttggggttgacatttagaactttaagtctcacccattatctggaatattgtgattctgtttattcttccagaatgctgaactccttgttagcccttcagattgttaggagtggttctcatttggtctgccagaatactgggttcttagttgacaacctagaatgtcagatttctggttgatttgtaacacagtcattctaggatgtggagctactgatgaaatctgctagaaagttagggggttcttattttgcattccagaatcttgactttctgattggtgattcaaagtgttgtgttcctggctgatgatccagaacagtggctcgtatcccaaatctgtcagcatctggctgtctagaatgtggatttgattcattttcctgttcagtgagatatcatagagacggagatcctaaggtccaacaagaatgcattccctgaatctgtgcctgcactgagagggcaaggaagtggggtgttcttcttgggacccccactaagaccctggtctgaggatgtagagagaacaggtgggctgtattcacgccattggttggaagctaccagagctctatccccatccaggtcttgactcatggcagctgtttctcatgaagctaataaaattcgctttctaaagttacctgttatatatctcttttggtcccatcctctaaagcagaggcaacactggaacatggctagcctttcttgtagccatggctgggcgtgctagaggttgcagcatgagactttctgctgggatccttgggcccatcactgtatagacatgctaccactggtacttcctttctccctgcgggccaggcactgcccttttcaggaagctctcttaaaatacccattgccccagacctggaagatataacattcagttcccaccatctgattaaaacaacttcctcccttacagagcatacaacagagggggcacccggggaggagagcacatactgtgttccaatttcacgcttttaattctcatttgttctcacaccaacagtgtgaagtgcgtggtataatctccatttcaaaaccaaggaagcagcctcagagtggtcgagtgacacacctcacgcaggctgagtccagagcttgtgctcctcttgattcctggtttgactcagttccaggcctgatcttgcctgtctggctcagggtcaaagacagaatggtggagtgtagcctccacctgatattcaggctactcattcagtcccaaatatgtattttcctaagtgtttactatgtgccagttcctgtaacaggtgtggggacacagcagtgagtaatcaatacagacaaggttctgcccttatggagctcacactccagtggcagacaaacagaccataaataaggaaacgatgaaataagatatatacaaggtgagtgtgacttcccttctaaccccctctgctctgtcctcccctattgcgctctcaagaccagagacccaacagcagtgatctcagggcagacagccctccactccagctctgagacccttttctcaggacctctgtaggcagcagagagagaggacagaggggtaagatgaggggttgagggaaggttcttcatgatccacactttgggcttagtatttctcaggaagagctatggcccagaaacaacaggggaaactagagttcggtctgacagtccttggggttaagtctcctgtcttatggtccagaaactcctgtttctccttagttggctggaaactgctcccatcattccttctggcctctgctgaatgcagggaatgcaatccttccctgctcttgcagttgctctgacgtagaaagatccttcgggtgctggaagtctccatgaagagcttgtgtcctgtcctttcttgcagattctatttcccctcttctgctaatacctcttactttgcttgagaatcctctcctttcttattaatttcagtcttggtggttctatcaggggtgcattctggccaaggggtgggcctgtgaatcaatcctgggcaatcagacaccctctccttaaaaactggcccgtggagactgagatcactgactctgactcatccccacagctggctctgacaagatggtccatttgttcctgcttccgagatccccagggcagcctggatccctgcccttctcaagactttagcttttccttccatccggtggcctattccaggaattcctcttttgcttaaatcagttggagtttgtgtctgttgcttgtaatcaagcctttatggctgctgggctgagtgacacaagcactttaatggcctggagggacttttaatcagtgaagatgcaatcagacaagtgttttggaaagagcaccctcgagaagggtggatgacagggcagagcaggaaggacaggaagctggcagaacggaggaggctgcagccgtggtccaaccaggagctgatggcagctggggctaggggaagggctttgagggtggaaggatgggatgggttccagaggtattcctctcttaaatgcaagtgcctagattaggtagactttgcttagtattgacaactgcacatgaaagttttgcaaagggaaacaggctaaatgcaccaagaaagcttcttcagagtgaagaatcttaatgcttgtaatttaaacatttgttcctggagttttgatttggtggatgtgatggttggttttatttgtcagtttggttgggctatagcacacagttatttaatcaaacagtaatctaggtgtggctgtgaaggtattttgtagatgtgattaacatctacaatcagttgactttaagtgaaagagattacttaaataatttgggtgagctgcacctgattagttgaaaggcctcaagaacaaacactgcagtttcctggaaaagaagaaactttgcctcaagactatagccatcgactcctgcctgagtttccagcctgctagtctgccctatggatttgaagtttgccaaccccaacaattgtgtgaattaatttctaaaaataaagctatatacagcc

SEQ ID NO: 495 - DNA, 609 bp, Homo sapiens; identical to SEQ ID NO: 24

SEQ ID NO: 496 - DNA, 1378 bp, Homo sapiens
cggggtgactgcctcttccagggcgggcggtgtggtgcacgcattgctgtgctccaactccctcagggcctgtgttgccgcactctgctgctatgagcttcctcaaaagtttcccgccgcctgggccagcggaggggctcctgcggcagcagccagacactgaggctgtgctgaacgggaagggcctcggcactggtaccctttacatcgctgagagccgcctgtcttggttagatggctctggattaggattctcactggaataccccaccattagtttacatgcattatccagggaccgaagtgactgtctaggagagcatttgtatgttatggtgaatgccaaatttgaagaagaatcaaaagaacctgttgctgatgaagaagaggaagacagtgatgatgatgttgaacctattactgaatttagatttgtgcctagtgataaatcagcgttggaggcaatgttcactgcaatgtgcgaatgccaggccttgcatccagatcctgaggatgaggattcagatgactacgatggagaagaatatgatgtggaagcacatgaacaaggacagggggacatccctacattttacacctatgaagaaggattatcccatctaacagcagaaggccaagccacactggagagattagaaggaatgctttctcagtctgtgagcagccagtataatatggctggggtcaggacagaagattcaataagagattatgaagatgggatggaggtggataccacaccaacagttgctggacagtttgaggatgcagatgttgatcactgaaaatgatttatgcaagtttaagattctgctcctaagtgtaggagagaacttggtgcctcttccactctggagtgaagttaatgaaagtctttttccttttccaaaacccaacctgaaccagttctttcttgagacagactatactgagacaacaagttgtcaccagcagaagatagataatatgacctttattaacttgatgaattaacttaaccaagagggtatttgtagtttactatttaccctaaaactttctgtgtctgggtaccctctgagtaggcctataattcctaccttgactgtgtgcatcatttgtaagctagcagatctatgtggtgaaaatgcacaggagcttggtagactgcgggggaaagagagagctcctttcgccatgttttaccagtctgctgttataacctcttaggttgtatcctttaatttccagccttttaggttagtttctgtaacagaacaagtgagtctgggatgaagtcctcaaagtacttcaaatggtaattgttttgtttttgtaatagcttaacaaataaacctaggttttctatattaaaaaa

SEQ ID NO: 497 - DNA, 2200 bp, Homo sapiens
actgccgacccgagtgcttcccgcagagggctggtggtgggagcggagtgggtcgggcggggccgagccgggccgtgggccgtgtgggggccgggcggcggccgggccggcggacggcgggatgggctgcaccgtgagcgccgaggacaaggcggcggccgagcgctctaagatgatcgacaagaacctgcgggaggacggagagaaggcggcgcgggaggtgaagttgctgctgttgggtgctggggagtcagggaagagcaccatcgtcaagcagatgaagatcatccacgaggatggctactccgaggaggaatgccggcagtaccgggcggttgtctacagcaacaccatccagtccatcatggccattgtcaaagccatgggcaacctgcagatcgactttgccgacccctccagagcggacgacgccaggcagctatttgcactgtcctgcaccgccgaggagcaaggcgtgctccctgatgacctgtccggcgtcatccggaggctctgggctgaccatggtgtgcaggcctgctttggccgctcaagggaataccagctcaacgactcagctgcctactacctgaacgacctggagcgtattgcacagagtgactacatccccacacagcaagatgtgctacggacccgcgtaaagaccacggggatcgtggagacacacttcaccttcaaggacctacacttcaagatgtttgatgtgggtggtcagcggtctgagcggaagaagtggatccactgctttgagggcgtcacagccatcatcttctgcgtagccttgagcgcctatgacttggtgctagctgaggacgaggagatgaaccgcatgcatgagagcatgaagctattcgatagcatctgcaacaacaagtggttcacagacacgtccatcatcctcttcctcaacaagaaggacctgtttgaggagaagatcacacacagtcccctgaccatctgcttccctgagtacacaggggccaacaaatatgatgaggcagccagctacatccagagtaagtttgaggacctgaataagcgcaaagacaccaaggagatctacacgcacttcacgtgcgccaccgacaccaagaacgtgcagttcgtgtttgacgccgtcaccgatgtcatcatcaagaacaacctgaaggactgcggcctcttctgaggggcagcggggcctggcgggatgggccaccgccgactttgtaccccccaacccctgaggaagatgggggcaagaagatcacgctccccgcctgttcccccgccgcttttctcctctttcctctctttgttctcagctccccctgtcccctcagctccagacgtaggggaggggttgccacaggcctccctgtttgaagcctgcccttgtctgagatgctggtaatggccatggtacccccttctgggcatctgttctggtttttaaccattgtcttgttctgtgatgaggggaggggggcacatgctgagtctcccaaggctgcgtctggaggggcccctgcttctccagcctggacccccagctttgcccaacaccagcccctgccccagcccaagtccaaatgtttacagggagcctcctgcccagtcccccaaccccagccgctcggaggccccaaaggaaaaagcacaagaagcgtgagacgccaccattcctggaaaccacagtccacctgctcattctcgtagctttttaaaaaaatgaaagtaaaggaaaaaaaaaaaactgcaaatctagaaaactttttagagaaaaactatttaaaactgtcagatcctgaccagcaagcccccccccagccccccttccaagtgactccgtgccttgagtgtgtctgcgtgtttacacccgtccctctgctggccgcccccgtgcgagcggcacccctgccctgccctccacagaattgggttccaagggctgttccagacaactgccaacgtcactgagggccctgccccagcggccctggccccaggctctattaacctaaaatgtagctccctagcgctaacctaggaaccgccgctgcctgctggggggccacgcccctcatgcccttgtcccaggcccggggccttcagcgttgaacacttccttgcttttttcacatgttttatggaattgttcacctggtttgaaataataaaatgtagaaagaaaaaaaat

SEQ ID NO: 498 - DNA, 9736 bp, Homo sapiens
gcctttttccgccgcgcgccaccagaatgtccctgtcttgaggtctaatggcggacgccagtatgttggagttggtggtggcttaagttttgaagggaggtagcatccgttggatatccacaccatccttctcgctgcaggctttcttggactccgtactgttggtgtaaccaaggcctggaggtctgggtggctcaggtttcctgcagccatgtttctgtacaacttaaccttgcagagagccactggcatcagctttgccattcatggaaacttttctggaaccaaacaacaagaaattgttgtttcccgtgggaagatcttggagctgcttcgcccagaccccaacactggcaaagtacataccctactcactgtggaagtattcggtgttatccggtcactcatggcctttaggctgacaggtggcaccaaagactacattgtagttggcagtgactctggtcgaattgttattttggaataccagccatctaagaatatgtttgagaagattcaccaagaaacctttggcaagagtggatgccgtcgcatcgttcctggccagttcttagctgtggatcccaaagggcgagccgttatgattagtgccattgagaaacagaaattggtgtatattttgaacagagatgctgcagcccgacttaccatttcatctcccctggaagcccacaaagcaaacactttagtgtatcatgtagttggagtagatgtcggatttgaaaatccaatgtttgcttgtctggaaatggattatgaggaagcagacaatgatccaacaggggaagcagcagctaatacccagcagacacttactttctatgagctagaccttggtttaaatcatgtggtccgaaaatacagtgaacctttggaggaacacggcaacttccttattacagttccaggagggtcagatggtccaagtggagtactgatctgctctgaaaactatattacttacaagaactttggtgaccagccagatatccgctgtccaattcccaggaggcggaatgacctggatgaccctgaaagaggaatgatttttgtctgctctgcaacccataaaaccaaatcgatgttcttctttttggctcaaactgagcagggagatatctttaagatcactttggagacagatgaagatatggttactgagatccggctcaaatattttgatactgtacccgttgctgctgccatgtgtgtgcttaaaacagggttcctttttgtagcatcagaatttggaaaccattacttatatcaaattgcacatcttggagatgatgatgaagaacctgagttttcatcagccatgcctctggaagaaggagacacattcttttttcagccaagaccacttaaaaaccttgtgctggttgatgagttggacagcctctctcccattctgttttgccagatagctgatctggccaatgaagatactccacagttgtatgtggcctgtggtaggggaccccgatcatctctgagagtcctaagacatggacttgaggtgtcagaaatggctgtttctgagctacctggtaaccccaacgctgtctggacagtgcgtcgacacattgaagatgagtttgatgcctacatcattgtgtctttcgtgaatgccaccctagtgttgtccattggagaaactgtagaagaagtgactgactctgggttcctggggaccaccccgaccttgtcctgctccttattaggagatgatgccttggtgcaggtctatccagatggcattcggcacatacgagcagacaagagagtcaatgagtggaagacccctggaaagaaaacaattgtgaagtgtgcagtgaaccagcgacaagtggtgattgccctgacaggaggagagctggtctatttcgagatggatccttcaggacagctgaatgagtacacagaacggaaggagatgtcagcagatgtggtgtgcatgagtctggccaatgtaccccctggagagcagcggtctcgcttcctggctgtggggcttgtggacaacactgtcagaatcatctccctggatccctcagactgtttgcaacctctaagcatgcaggctctcccagcccagcctgagtccttgtgtatcgtggaaatgggtgggactgagaagcaggatgagctgggtgagaggggctcgattggcttcctatacctgaatattgggctacagaacggtgtgctgctgaggactgtcttggaccctgtcactggggatttgtctgatactcgcactcggtacctggggtcccgtcctgtgaagctcttccgagtccgaatgcaaggccaggaggcagtattggccatgtcaagccgctcatggttgagctattcttaccaatctcgcttccatctcaccccactgtcttacgagacactggaatttgcatcgggttttgcctcggaacagtgtcccgagggcattgtggccatctccaccaacaccctacggattttggcattagagaagctcggtgctgtcttcaatcaagtagccttcccactgcagtacacacccaggaaatttgtcatccaccctgagagtaacaaccttattatcattgaaacggaccacaatgcctacactgaggccacgaaagctcagagaaagcagcagatggcagaggaaatggtggaagcagcaggggaggatgagcgggagctggccgcagagatggcagcagcattcctcaatgaaaacctccctgaatccatctttggagctcccaaggctggcaatgggcagtgggcctctgtgatccgagtgatgaatcccattcaagggaacacactggaccttgtccagctggaacagaatgaggcagcttttagtgtggctgtgtgcaggttttccaacactggtgaagactggtatgtgctggtgggtgtggccaaggacctgatactaaacccccgatctgtggcagggggcttcgtctatacttacaagcttgtgaacaatggggaaaaactggagtttttgcacaagactcctgtggaagaggtccctgctgctattgccccattccaggggagggtgttgattggtgtggggaagctgttgcgtgtctatgacctgggaaagaagaagttactccgaaaatgtgagaataagcatattgccaattatatctctgggatccagactatcggacatagggtaattgtatctgatgtccaagaaagtttcatctgggttcgctacaagcgtaatgaaaaccagcttatcatctttgctgatgatacctacccccgatgggtcactacagccagcctcctggactatgacactgtggctggggcagacaagtttggcaacatatgtgtggtgaggctcccacctaacaccaatgatgaagtagatgaggatcctacaggaaacaaagccctgtgggaccgtggcttgctcaatggggcctcccagaaggcagaggtgatcatgaactaccatgtcggggagacggtgctgtccttgcagaagaccacgctgatccctggaggctcagaatcacttgtctataccaccttgtctggaggaattggcatccttgtgccattcacgtcccatgaggaccatgacttcttccagcatgtggaaatgcacctgcggtctgaacatccccctctctgtgggcgggaccacctcagctttcgctcctactacttccctgtgaagaatgtgattgatggagacctctgtgagcagttcaattccatggaacccaacaaacaaaagaacgtctctgaagaactggaccgaaccccacccgaagtgtccaagaaactcgaggatatccggacccgctacgccttctgagccctcctttcccggtggggcttgccagagactgtgtgttttgtttcccccaccaccatcactgccacctggcttctgccatgtggcaggagggtgactggataattaagactgcattatgaaagtcaacagctctttcccctcagctcttctcctggaatgactggcttcccctcaaattggcactgagatttgctacacttctccccacctggtacatgatacatgaccccaggttccagtgtagaacctgagtcccccattccccaaagccatccctgcattgatatgtcttgactctcctgtctacttttgcacacacccttaatttttaattggttttcttgtaaatacagttttgtacaatgttatctctgtgggaggaaggaggcaggctgtggtgggactgggtagggtatagtatcactcctgagttccactgctctagaatctaaccagaaatagaaacctagtttttaaggtgactggcatccatgtgtcttgttctggagatgaggatgtaggtgggaggtttgaacccaagttagagcaggaagaactgagtagactccttccttccagataccgacttggacttgcggcactctgtggctccccacccccaggtctgtggtggtttctttgttttttcctggttctttttgctgtgctgatgaaacatgacctcaataaccatgtgtatacccacccctcttcccactgggtattgaggaagggtggctgattcttcctcctcttctactctgaggatgttagtatggggattttagcatgaattctagctggggagtcttaacagatgccccttttactgatacagcacctaaagcgatctttggctccataggaccataggaagggtcagtacagaagaacctagatactgccctgcccctgagaactgtgtatatgtggggcctgtctgcagcacccatctcaggtgggttccagagggcctttagggtataatgagagcctgttaggtggaagaggcccagttccagaaatgttccagcccacccctgagaattcctcctgtttagttgtgtgggaagccctcgtcttccaggctgtccttgcgccttgaacctggagaagtgagctcactgttctcaatacttcacaaatgtaaaactttctttcgtctgcatgtgctcagccatctaaattgagcaaatgatctggtgagcactgggttagaatcaggaatggtggaatacaatctgaacctctcagagcccagaacagagggttcctgacactgtgacactgtctcctggaactaagtatctcttgaatcatgacttggttttagatcagtcaagagagacccaggttttgccaggaatcgaatccctaaataacatgtttttttctcacttagctcatgaatttgcatagtagacagtagttctgaattagattttgaaaacctaatttcagggctcattttttcctgtggccctaaatccattctatcaaattgtgtgatactgacatgcagtcatctgaggaactcagcgtagatacttgagcagctcctcgcctcttttctaactcaagtttgactaaaatacatacactccgtacagaaggtagggggttatgtaagaaaggaaaacctaatctatggaatcaggagttgtcaccaccgagcttcctctggaagtctgcccatcagcttgcttgttctctgttaagaggaagggctaggacaaggatttgggcttgaatatgtggaaaggaattttcatagttgttgctgcaggacctacaaaagtttaaaattagattggatgtgactcaatgacaagtcccatctgtgtaattgttaaggggacctgattgactcctgtggtttgattgagcaaccaggtaaatagagacctctctccagctttggcaaaacccatcagaggctgctgcagaactcagacagagggatctgcccttgggtttgcttccatcctgttccattgctaagcccttgtgacttggatcctaggactgaaaagtttttagctgcctcagctttcccctgaccttactggcagaggttctgcagatgtttcctttggaagatctcttgccaagaatagcattcctttggaggaggggggttctagttggaatgttgcttttcttggttagtgtaaatgtattgctagtgagacagctgccggcgctggaaaaggctcgtctcacagggagagtgctggtccccagaatgtgtgctgttcccacgctgctgcctttcttgagcttgttagaggaaagccagaaaggcattcagatgggatcagtctggctttcaaattttttttaattcctaagttctgttttattttttaattttttaaaaaaaattttattagagacagtctctctctcttgcctagctgggagtgcagtggagtgatcatagctcactgaggcttgaactcctgggctcgagcaatccacctcagcctccagagtaggggagactacagatgtgtgccaccatactcagctaatttttaaacttttgtagagacagggtctccctgtgttgcccaggctggcctcgaactcctgacctcaaaaaatcttcctgccttggcctcccaaagcactgggattataggtgtgagccattgcgcctggtcataaattcttgtttttttgtttgtttgtttattagagatggaatctctctctcttgaccaggctagagggctgtggtgcgatctcagcccactgcaacctctatctcctgagctcaagcgatcctccttagcttcccaaatagctggaactacaggcatgtgccatcacgtccagctaatttttgtatttttagtagagaaggttttaccatgttggacagggtggtctcgaactcctggcctaaagtggtccacctagctcagcctaccaaagtgctgtgattacaggcgtgagccaccatgcccagcctctaaattctgttttctattcaaagtaaaaatgacatgtgtttgagtcatccacttgctcatttgcatatggaatattgtatgtgaatattttattacacccttaaaattaattttcaagggctatatgtagagctcagaagaaacatctctgctgctgaaatcaaacctggtccaaaaaacgtcacaacggaggaaaggaatagatggctctcgaggacaagatagggactcttaaaacacctgcttggccatggttgattgacatttgagtgatctggtagcccaacacaccctgtgaagttcaggtgaactgaaatgggcaggtgtaggctacacaccagtctgaaccagcacaaccaagagttgtttctcttttttttctttttctttttcttttttttcttttttttttttttttttttgagatgaagtcttactctgttgcccaggctagagtacagaggcacaatctcggctcaccacagcctccgcctcctgggttcaagcaattctcctgcctcagcctcccaagtagctgggactacaggcatgcaccaccatgcctggctaatttttgtatttttagtagagatggggtttcaccatgttggccaggctggtttcgaactcgtgacctcaggtgatccacccaccttggtctcccaaagcgctgggattacaggcgtgagccactgcacttggccaggagctgtttaagccatcaggagacatgctgacccactagaagaggctgctacgctcatttcttccacaaacgtttactgggcacctaccatgaaccaccacctcccagctctgttctgcacccagaggttggaggagagtttataaccaggcagtctctgtcgctgtgaggttggtggtgaggtgagtctgccagagggcctgccaccagtttcagaagagcctgcagcctgcatctgatttcctcagccacaaccttgggacttcaggaaaaatcagaaggtcccaagtctgaaaaatgaagaggtggggagtgggcagcaggggttttaggtcaggaaatggtaggaaacctgtagttgtggctcataatcctagtgggatattagaaccctcttcatttgtcagaacagattcctggggtctgctcccaattattcacacggtggttcatgcctggtaatcccagcactttgggcggccagaggcaggcagattgcttgagcccagaagtttaagaccagcctaggaaacagaccccatctctacaaaaaattcaaaaagccgggcgtgaagccctgtttttttttttttaaaaaaagagtctgctggtgatgtctgggcatgtgtctgcttcacagtccagtgttatgatcagtagctgtgatggacaatgaacattgctgcttgttcaaaatgaagaaaaaaaatatcaaagaaaaccaggtttggaagtttcagatttggaaaaggagctgggccagcccatctggaatagctgaggggccctgttagccccaccctaccccaccccacccccgtatgcagcatctctggcggtgcccagaggcaagcccccttcagtttcccacctctcactctgccttccagagcctagtcaagttttaaattcccaggtccactcagcagaacttgctcccttctctgactgcagtctcataatgaaaggagaggtgctttcagttgggtcatttggtagcgtttaggcttagaagttactaatttggagccgtgagtatatgtgtataagctagtaacacgtgatggtcaagggaagtactaccatttcctgtgggttattagggcctccagctgttatgaggacacactggggaatctcagctttagggagtcgatgatgtaactggagaaaggcaatgctgccctcataaagcaatcagaaacgagattccacctgccaaatgccaagaggcagcaaagtccatgaagagagcactgtatacagtcagatgacctgggctcactagcctctaagcatagtcttggtttcctgcctgtaaattggtagaataagactgatttactgggcctggcatggtggctcacacctgtaatcccagcactttgagaggctgaggcaggaggatcccttgagcccaggagtttgagaccagcctgggcaacatgacaaaaccccatctctccaaaaatacaaaaattagccaggcatggtggtgcacacttgtagtcccagtaattagggggctgagacaggaggatcacttcagcctatgagtttgaggctgcagtgagctgtgattgcgccactacactccagcctggatgacaggacgaaacctgtctcaaaaacaccaaaaaacaaaaaccggtctcctggggtcatggtagcacaaacgcacatgactgagtgctcaggggttctgaggcttgtccgctgacctggggctctggccctgggagatctgggggacctgctgtcctatatgtgatgctttgaaagaaaggggcatcattccaagccaagaggccccagagagggcaccgtgcggtgttcaggcttctgtgaggccccagtgagatcctgtggctgtgcccccatcacctccacccactctgccctcccactagctgcccaacggatgaatcaacgccttggcagagttttccagcagggccttgcagagagtgtgtgtgacctgtgtggccactgccttggggacgggtgaggagttagcctggaacattccagcgtgggcattattgtcctgttgcaagttcagggcaaaaccaggaatccagttttgtcgatccaattgagaaaacatttcatgaacaactacttgtggcatgcattggcactcggaataaagcgcactattgtcactaaaaaaaaaaaaaaaaa

SEQ ID NO: 499 - DNA, 4633 bp, Homo sapiens
cacactctttctccctccttctcctcgccccgccttccctccctcctcaatccctctagttccttccccgcctcgccactgtgcacgatctcgcgagacttggcccagaacattgcggatcgggtcggcgccattttgggactgagactggttgtgggggagggaaaagcggcaaaaggggattattcaaagtaccgaaaaccttctcccgggatcaggcgcggcggcacccccaggccaggggcacctctggtggggcagaaggtgattgaattactcagatatgaagatcatcatctaggttttgtgtaaaaggccctggatattttaagtggccattttggatttacagtgtttttggataattttgccccagaagtttattaaaattggcaagaatcgtctgtgaagtgaattgatagtagtgaacaattcagcaagctacttaaaaagagacccaggcagcatttcttcagtattttggttcaaacggattatataactggttacagtatttcagctggtggtaatttttgcctccccttcccccaccccgttgttggggttcttcagccgaaactgagagacgttgatttgtgtactgagtagtttcagcagtttcaaatgactgagtattgctgaagtttcatggcagtttatttttacctttattgaaagttttaggaatttttgacttcagctctttcatgtcacaatgggacactttttctgaatgaagagattgaaagaatacagagtttttttccttttatcttttatttacgtggaaatttaagatgttgcagttttccggcagcatggtagtattgagatagctatgtgtgtctctgtatatgctgatgtttaggaatgctcttcagatgtgaaattttctttttgtttttgctttttggctcgtaaattggatatttcatctggagtggacaagtacaacagtggcaagtacatggaataataaagaagactttgatcttaaatctaaagaacttggctaattcgggagatagccatatgaaaactttaaaacagaagtatgggtagctgacttgaagtaactctatgtcaaatagtcgtaggttaagtatcttcaaagaacttcgatattatttcagaggatacaaaataaaaatacaaactggaaaataaagattacagagaaaaaaccaacaccttcctgtgcagtcctgttggaatttggacttgccatgaggtgttgaagccttgtttcactgagttggagagactggacctaaatggcgcagcatgactttgctccagcctggcttaatttccctactccaccatcatcaacaaagtcgtcattgaattttgagaagcattctgaaaactttgcatggacagagaatcgttatgatgtgaaccgtcgacgacacaactcttcagatggctttgattctgctattgggcgtcctaatggaggtaactttggaaggaaagaaaaaaatggatggcgtacacatggaagaaatggtacagaaaacataaatcatcgaggtggataccatggtggaagttcccgttctcgtagcagtattttccatgcaggaaaaagccaaggactacatgaaaacaacatacctgacaatgaaaccgggaggaaagaagacaagagagaacgcaaacagtttgaagctgaggattttccgtctttaaatcctgagtatgagagagaaccaaatcacaataagtctttagctgcaggtgtgtgggaatatcctccgaatcctaaatctagagctccaaggatgctggtcattaagaaaggtaatacaaaagacttacagctatctggattcccagtagtaggaaatcttccgtcacagccagttaagaatggaactggtccaagtgtttataaaggtttagtccctaaacctgctgctccacctacaaaacctacacaatggaaaagccaaacaaaagaaaataaagttggaacttctttccctcatgagtccacatttggcgttggcaactttaatgcttttaaatcaactgccaagaactttagtccatctacaaattcagtgaaagagtgtaatcgctcaaattcctcttctcctgttgacaaacttaatcagcagcctcgtctaaccaaactgacacgaatgcgcactgataagaagagtgaatttttgaaagcattgaaaagagacagagtagaagaggaacatgaagatgaaagccgtgctggctcagagaaggatgacgactcatttaatttacataacagcaatagtactcaccaagaaagggatataaaccgaaacttcgatgaaaatgaaattcctcaagagaatggcaatgcctcagtgatttcccagcagatcattcggtcttcaaccttcccacaaactgatgttctttcaagttcacttgaggcagaacacagattgttaaaggaaatgggctggcaggaagacagtgaaaatgatgaaacatgtgctcccttaactgaggatgaaatgagagaattccaagttattagtgaacagttacagaagaatggtctgagaaaaaatggtattttgaaaaatggcttgatctgtgacttcaagtttggaccgtggaagaacagcactttcaaacccacaactgagaatgatgacacagagacaagtagcagtgatacatcagatgacgacgatgtgtgaaggatttcctaacagctttagaaatcttagtgtgatacatctctcatacagtttggggtgaattgtaaaaatgaagaactataatttatgtagtgaaataccccattagaagaggattttttgggggacttcaatatgaagaaaaccaagaatgttttgttgggctgtgttgaacattatttctttgtaaatgaatgttgtaggaatgaggacttgggttggtccaacattgactttcttcatcactgcaacatttctctgactagcaatgtgacgatgtaacaaatgagattttctcatttaataataaaaaattgtgtaatgttttgcaaagcttctgtcttaaaatgtccaggtcttaagaaaaaaggcagcttacactgttttgcttgcagagtcatatctttttcgtacaatggaaatcctcaagtccactttgtgcggtctccctctccttcccccaaaaaacaacaacaacaaaacaaaaaccaaaaaggaaaatgtagcatgttggctaaaactggagcaaagtgcactaaaacaatttcctgaactcacctgttgtactattcaccttttaaaccataaattgctctttagccatttgtagtgcagtaaatgttacaggaaaagacttggcacattttcttccaaattttaagaggtgattttcaaaagctttattggggtatgttgtcagaccagggttttcagagttgatggaaaagagtcttgtgagaaaacttattttgataaattattacacacgcagaaaaactgatcacactgactggatctgtccacgacatggaaaataaactggattttcagaatattgttgttttctgtagtgttcaaggtattgtttctaaacataaacatactctaaacatgctttattcacttgttaaagtcatacttttaaaagtaataccttactaaagatggtgattacttttccgaggtcagaaaaggaaagctaagcgttttcattatcaaatacacaagcttattaaatgaatgactgttaactactttattttcatttgcacattaattttggaattgtttctgttttgctgctgacggaaatactattttggctctgtgtatatttgtattttgatttttctggtttgtttacccccatttgcttttagctcccccttatgtttaaatatattctaacttatgtaaagagcataatcttagagcaaaaatacttgaggttttatgtcagatctaatcttaagtgtttgttgttttttaaaaagtgttttctcagatggctgcagtgtttttgctatttctgcataaataccctacctggactccccagttttcaccagaaactgttatttttttttgttgttgttcccactgagactgatggtgatggggaaattaaaaacaacacactagcacactcccacaaaacttgaggaagagttagaatggtaataaaatattaaatagaccttatacttaaaataaggtttcactatataatttgtcacaattcaatctaatcagctaaagttaaatgtagttagaattagccacaggagaatgtaaagcatgctttgacgaagctatcggtaacacatattgaatgtctttgagactcttagattgtactatttgcttaatagattaatgaaatttatcagatacaacctgtatttccaaaaacaagctagaaggaacctgaggaatgtggtttacatttgagatccaccttactgtgttttctactttcagaaaagattctgtagttttggtttttggcatctttcttatactcagttttttctgccttaattcccatttaccagcagttaactcatgtttattgtgctttcatgcattgtgatatggaatgtgtttagtaatttactccttataaatatggtaaagtacagtggtaaaaaaaaaaa

SEQ ID NO: 500 - DNA, 4339 bp, Homo sapiens
taaaggggccgcatcaccctgccggcccggcgcgggtcgggggtgggtgcggtaggggtcccggggcggccgagcgcagaggacggacgggaaggagggcagggggcgcgggagccggcgaagcggagcgggcatcggaccgagccccccaaagaggccccgccccggccctggccccggccgggccggatggaaccccccgcggccaagcggagccggggctgccccgcgggacccgaggagcgcgatgccggggccggggccgcgcgtggccggggccggcccgaggcgctgctggacctcagcgccaagcgggtagccgagagctgggccttcgagcaggtggaggagcggttctcccgggtgcctgagcccgtccagaagcgcatcgtgttttggtcgtttccacgcagtgaacgggaaatatgtatgtactcgtcgctgggttacccgcccccagagggcgagcacgatgcccgggtgccctttacccgcgggctgcacctgctccagagcggggccgtggaccgcgtgttgcaagtgggattccacctgagcggaaacatccgcgagccagggagtcctggagagcccgagcgcctctaccatgtctccatcagctttgatcgctgcaagatcacgtccgtgagctgcggctgtgacaaccgcgacctcttctactgtgcccacgtggtggccctgtccctgtaccgcattcggcacgcccaccaggtggagctgcggctgcccatctccgagacgctctcccagatgaaccgggaccagctgcagaagttcgtgcagtacctcatcagcgcccatcacactgaggtgctgcccactgctcagcgcttggctgatgagatcctcctgctgggctccgagatcaacttggtgaatggtgccccagaccccaccgccggcgcaggaatcgaggacgccaactgctggcacctggacgaggagcagatccaggagcaggtgaagcagctactgtccaatggcggctactacggggccagccagcagctgcgctccatgttcagcaaggtgcgggagatgctgcgaatgcgggactccaacggggcgcgcatgctgattctcatgaccgagcagttcctgcaggacacgcgcctggccctgtggcggcagcagggcgcgggcatgacggacaagtgccggcagctctgggatgagctgggggccctgtgggtttgcgtcgtcctgagcccccactgcaaaccagaggaaagggcaggctggctccagctactcagcaggtgggacaagctcgacgtctgcccactggaagagggcaactactccttcgacggccccagcctgcagcccaccatggcccccgccccagagctgctccagaagggctccacctgcatcaccaacaccgaaggatgggtggggcaccccctggaccccattggctgcctctgcagggcgctcctggaggcctgtcgtctggaggaggagacacttaccctttacccagactcaggccccgagaagcggaaggtggcctaccagcacgtgcctgtgcccgggagccctggggagtcctacttggtgctggcgctggaggtggcactgctggggctggggcagcagcgggccctgccggaggggctgtacgcccaggacaaggtggtgcgcaacgaggagcagctgctggccctgctggaggaggtggagttggatgagcggttggtgcaggtgctgcgcaagcaggcggggctgctgctggaagggggtcccttcagtggctttggggaggtgctgttccgggagagcgtgcccatgcacacctgtgcccgctacctgttcaccgcactgctgcctcatgacccggacctggcctatcgcctcgcgctgcgagctatgaggctgcccatactggagacagcatttcctgctggagaacctcatcccagcccgctggactccatcatgagcaaccgcttcccccgctggttcatccttggccacctggagacccgccagtgtgaactggcttccaccatgttgacggccgccaagggagaccccaagtggctgcacacggtactgggctccatccagcagaacatccactctccggccctgctctttaagctggcgcaggacgcctgcaagacagccaccccggtcagcgccccaccagacaccacgctgctgggcatcgcactggagctggggctgcaggtgatgcggatgactctgaacgtaatgacctggcggcggagggagatggtgcgctggctggtcagctgtgccacagagattggcccgcaagccctgatgaatatcatgcagaactggtattccttattcacaccagtggaggcggctaccatcgtggcagtgacgggcaccacacacgccactctgctgcgactgcagctggacacatcgcggagggaggagctctgggcctgcgcccgcaccctggccttgcagtgcgcgatgaaggaccctcagaactgcgccttgcctgccctgaccctgtgcgagaagaaccactcggccttcgaggcggcctaccagatcgtgctggacgcggcggccggcggcctgggccacgcccacctcttcactgtggcccgctatatggagcaccgcgggctgccgctccgggcctacaagctggcgacgctggccctggcgcagctcagcatcgccttcaaccaggacagccaccctgccgtcaacgacgtgctttgggcctgctctctcagccactccctgggccggcacgagctctctgccatcgtccccctcatcattcgcagcatccactgtgccccaatgctgtccgatattctgcgccgctggactctctcggcgcccggtctgggccccttaggggcacgccgggccgccaagccactgggtgccgaccgggcgccgctctgccagctcctggacgcggcagtcaccgcctacatcaccaccagccactcgcgcctcacgcacatcagcccgcggcactatggggatttcatcgaattcctgggcaaggcccgggagaccttcctgctggcgcccgacgggcacctccagttctcacagttcttggagaacctcaaacagacctacaagggcaagaagaaactcatgcttttggtgcgggagcgttttggttgagggacagtggggtgcgtgggagtggggatccccctcgcccctgcgtcccccacccttgctctccaattaggcccacgtggcatttcagtattattaagtcagggaaggagcccggctggagatgggggcagggggagcagcatcctgccacgtgtgtgcctgggagtctgtgagcaagtgtgcaagactccagaagcagaagccatactgccacccagaagcctggaaggggtgtgtgcttgggctgctggtatgaccccactttgggcaccccaaaagcaataggcaaactccccttacccagactggcttgggctccaggagggaggctgggaggcaggactttccagaaatcgaccctctaagtcaatgtagcacattttcccccaaccccaccctgggtggccaagggtcctcccccaccccctactgctcagggccccccattatgccacctccaaagtggctgcccagccaggaccattggctcacccccactgaaggaattgaagaggcctcaggcctcagcctcatacctcacccccttatcctatccggccaggacccccatttccttgggcactagggtcccagggtgggctcagggttggggaagtcctcgctgccctctcttctcacctgctagtcactggacgtacaactcaggaactgagcgaggctcacactgccccttccaacctggggttgggggacacagacgcgagagagccggagacccccacccccgatctggaaaggaaagagacctgtatcttggtgtttttctggctttttcaccctttcgcctcctgtctttctgcttcgccccttcatcttactctgtttccatttttcccggcacttacctgcctttctctctgcacctaagtccctgccgccctctctctttggccatccttcctttcccccaccttgacccagggaggagaagggagaacatcacccccccaagtcacccccacatcttttcccttcttgtatattaaggacaaaataccacatcattttgtaactttttttctatttattgaacggtgtattacatgtccttttcctttttttttttcaaagattgaacagaaatttttctttttaattttattttgagactggggtgcatctccagagccactcacaccctcaacctcgtttcctccgc

SEQ ID NO: 501 - DNA, 1848 bp, Homo sapiens
gtgctctgctggctcagcctggtgtggacccacctcccgggcgctggctgcaatgactttctctttccctttgcaattgccttgggtcctgccgcacagagcggcctgtctttatcagaggtccctctgccagggggagggccccagagaaaaccagaaagagggtgagagactgaggaagataaagcgtcccagggcctcctacaccagcgcctgagcaggaagcgggaggggccatgactacgaggccctgggaggtcactttagggagggctgtcctaaaaccagaagcttggagcagaaagtgaaaccctggtgctccagacaaagatcttagtcgggactagccggccaaggatgaagcctcacttcagaaacacagtggagcgaatgtatcgagacacattctcctacaacttttataatagacccatcctttctcgtcggaataccgtctggctgtgctacgaagtgaaaacaaagggtccctcaaggccccctttggacgcaaagatctttcgaggccaggtgtattccgaacttaagtaccacccagagatgagattcttccactggttcagcaagtggaggaagctgcatcgtgaccaggagtatgaggtcacctggtacatatcctggagcccctgcacaaagtgtacaagggatatggccacgttcctggccgaggacccgaaggttaccctgaccatctttgttgcccgcctctactacttctgggacccagattaccaggaggcgcttcgcagcctgtgtcagaaaagagacggtccgcgtgccaccatgaagatcatgaattatgacgaatttcagcactgttggagcaagttcgtgtacagccaaagagagctatttgagccttggaataatctgcctaaatattatatattactgcacatcatgctgggggagattctcagacactcgatggatccacccacattcactttcaactttaacaatgaaccttgggtcagaggacggcatgagacttacctgtgttatgaggtggagcgcatgcacaatgacacctgggtcctgctgaaccagcgcaggggctttctatgcaaccaggctccacataaacacggtttccttgaaggccgccatgcagagctgtgcttcctggacgtgattcccttttggaagctggacctggaccaggactacagggttacctgcttcacctcctggagcccctgcttcagctgtgcccaggaaatggctaaattcatttcaaaaaacaaacacgtgagcctgtgcatcttcactgcccgcatctatgatgatcaaggaagatgtcaggaggggctgcgcaccctggccgaggctggggccaaaatttcaataatgacatacagtgaatttaagcactgctgggacacctttgtggaccaccagggatgtcccttccagccctgggatggactagatgagcacagccaagacctgagtgggaggctgcgggccattctccagaatcaggaaaactgaaggatgggcctcagtctctaaggaaggcagagacctgggttgagcctcagaataaaagatcttcttccaagaaatgcaaacaggctgttcaccaccatctccagctgatcacagacaccagcaaagcaatgcactcctgaccaagtagattcttttaaaaattagagtgcattactttgaatcaaaaatttatttatatttcaagaataaagtactaagattgtgctcaatacacagaaaagtttcaaacctactaatccagcgacaatttgaatcggttttgtaggtagaggaataaaatgaaatactaaatctttctgtaaaaaaaaaaaaaaa

SEQ ID NO: 502 - DNA, 4009 bp, Homo sapiens
ccggagggggcggccgcggagcactggttggagcgccgcgaagcgcccgagcctcttgccttcgcgggcggcgccctggccgccggcagccttgtggccggtgccccgatccgccgcgctccggacccgggcaggcggggcgcgcccgctgcgcgcgggatgtggcagcccagacggccctggccccgcgtgccctggcgctgggcgctggcgctgctggccctggttggcgcggggctgtgccacgccggcccgcagcccgggtatcccgcgcggcccagcgccaggaacaagaactggtgcgcctacatcgtgaacaagaatgtgagctgctccgtgctggagggaagtgagagttttattcaggctcagtacaactgtgcctggaaccagatgccctgtccgtcggcgctggtgtatcgagtgaacttcagacctagatatgtcactaggtataagacagtgacacagttggaatggaggtgctgtcctggctttagagggggagattgccaagaaggtcccaaagaccccgtgaagaccctccgccccacgccggctcggcctcgaaacagcttgaagaaagccacagataatgaacccagccaattctcagagcccaggaagactttgtccccaactggtacagcacaaccaagctggggggtagatccaaaagaggggcctcaggaacttcaggaaaagaagatacaggtgctagaggagaaggttcttcgactcacaaggacggttcttgacctccagtcttcccttgctggagtgagtgaaaatctcaaacatgccactcaggatgatgccagtagaacacgggcaccagggctcagcagccagcaccccaagcctgacaccactgttagtggagacacagaaacgggccagagtcctggtgtcttcaacactaaggaatctggcatgaaggacatcaagtctgaattggctgaagtcaaagatactctaaagaacaaaagtgacaagctggaagagctggatggaaaagtgaagggctacgaagggcagctcagacagctccaggaagcagctcagggcccgacggtgaccatgacaaccaacgaactctaccaagcctatgtggacagtaagatcgacgccctgagagaggagctcatggagggcatggacagaaagctggctgacctgaaaaactcatgtgagtacaagctcactggcctccagcagcagtgtgatgactatgggagcagctacctgggagtgatagagctcataggggagaaggaaacaagcctgagaaaagaaataaataacctccgagcccggctacaggagccttcagcccaggcaaattgctgcgacagtgaaaagaatggtgacattggtcaacagatcaagacattggaccagaaaatcgagagagttgctgaagccaccagaatgctgaatggaagactggacaatgagtttgaccgccttatagttccagagccagatgtggattttgatgcaaaatggaatgaactcgatgcaaggatcaatgtgacggagaagaacgctgaagaacattgcttttacattgaggaaacccttcggggcgccattaatggagaggtgggtgacttgaagcagcttgttgatcagaaaatacagtctctggaagaccgtctggggagcgttctcctacagatgaccaataacactggtgcagagctcagtcccccaggggcagcagccctgccaggagtgtcagggtcaggagatgaacgggtcatgatggaattaaaccacctgaaggacaaagttcaagttgttgaagacatttgcctgctgaacatccagggaaagcctcatgggatggaaggtgccttgccaaacagggaagaccgcgcagtacgcgacagcctgcaccttttgaaatctctcaacgacacgatgcacaggaagtttcaagaaaccgaacaaaccatccagaaacttcaacaggattttagttttctttattctcaattaaaccacacagaaaatgatgtgactcatcttcaaaaggaaatgagcaattgtagagcaggtgaaaacgctggcatgggtaggttcactaaggtgggtgagcaagaaaggacagtggacaccctgccgtccccccagcaccccgtggctcattgctgcagtcagctggaggagaggtggcagaggttgcagagccaggtcatctcggagctggatgcttgtaaggaatgcacgcagggggtccagagggaggtctccatggtggagggcagggtgtctcatatggagaaaacttgcagcaagctggactctatctcaggaaatcttcagaggatcaaggaggggctcaacaagcatgtcagcagcctgtggaactgtgtcaggcagatgaacggaacgctcaggtcgcattccagagacatttctggcctgaagaattcagtccagcagttctacagccacgtcttccagatttctactgatttgcaagatctggtcaaatttcagccatcagcaaaggcgccctcgcccccgccgcccgcagaggccccgaaggagccgctgcagcccgagcccgccccgccgaggcccagcggccccgcaaccgcagaggaccctgggcgacggcccgtcctgccccagcggccccccgaggagaggccgccccagccgccaggctccaccggggtcatcgcggagacgggccaggccgggccccccgcaggcgcaggcgtgtctgggcggggtctgccgcggggcgtggacggccagaccgggagcggcaccgtccccggcgcagaaggcttcgcgggcgcaccaggatacccgaagtcacctcctgtagcttccccaggagctccggtgccttctctggtgtctttttctgcggggctcacccagaagcctttccccagtgatgggggcgttgtcctctttaacaaagtgctggtgaacgacggggatgtttacaaccccagcaccggggtcttcacggctccttatgatgggcgctacctgatcacggccaccctcacccccgagagagacgcctacgtggaagcagtgctgtcggtctccaacgccagcgtggcccagctgcataccgctgggtacaggagagagttcctggaataccaccgccctccaggagctttgcatacctgcgggggcccgggggcattccacctcatcgtgcacctgaaggcgggagatgcagtcaacgtcgtggtgactgggggcaagctggctcacacagactttgatgaaatgtactccacatttagtggggttttcttatatcctttcctttcccacctctaaggtggctggggagatgtcaggggaaagatagatagttgtaaaaactctaaagctttaatatattcggtttgtatgtaatggaagcacggggctagagtttccacataggccccaacataaaggccttccctcgctgttgaggccaccatgccttactgcatccagccaggctgcagggagtgaggcacacggtgaacatggccactgacttttctgccactctaactggacaactggaagacttggaaaggcctccacctgtatctacactctgagggccctggactgggcctgagcttgccacagaggctccgtctgactgtgggctgggaggagggaggcaggggagagccggtcacggtggctggtctttactgcagggcagcactgtggccagctgtctgtctttacactgcatgcagaagtttaaacactgaagtgccgaagtggcccgtgccgccgcacagagaccccgactttagtttgggctgttccacgcttggctcaccattgccgcctgggacttaacctgctcaggcgggccttcgcccagctgcaaatagggatgcgttagagactgttcccaaagcttgttgggctccttaaatggcatgtacaatttaagtgcaaagacagggagtgtcaataaagatggaaagccatttccagttaacttttgttaatttaa

SEQ ID NO: 503 - DNA, 5318 bp, Homo sapiens
gtgtgtccacatctttgagtgccgggagtttaaaagttaggcagtccttataggtatggaagccgagctaatttccttctgagccccccaaatgcctcctccacatggcgggtccgcaaatggggggatctgcagaggatcaccccccacgaaaaagacatgcagcagaaaagcaaaaaaagaaaacagttatatatacaaaatgctttgaatttgagtcggccacacagcgcccgattgaccgccagcgatacgacgagaacgaggacttgtcggacgtggaggagatcgtcagcgtccgcggcttcagcctggaggagaagcttcgcagccagctgtaccagggggacttcgtgcacgccatggagggcaaagatttcaactatgagtacgtacagagagaagctctcagggttcccctgatatttcgagaaaaggatggactgggaattaagatgcctgaccctgatttcacagtccgagacgtcaaactcctagtggggagccggcggcttgtggacgtgatggatgtgaacacccagaagggcacggagatgagcatgtcccagtttgtgcgttactacgagacgcccgaggcccagcgggacaagctgtacaacgtcatcagcctagagttcagccacaccaagctggagcacttggtcaagcgtccgactgtggtagacctggtggactgggtggacaacatgtggccccagcatctgaaggagaagcagacagaagccacgaacgccattgcagagatgaagtacccgaaagtgaaaaagtactgtctgatgagcgtgaaaggttgtttcaccgacttccacatcgactttggaggcacttccgtttggtaccatgttttccggggtgggaagattttttggctgattcctccaacgctgcacaatttggcgctgtacgaggagtgggtgctgtcaggcaaacagagtgacatctttctgggagaccgtgtggaacgatgccaaagaattgagctgaagcagggctacacatttttcatcccttccggttggatccatgccgtctacacccctgtagactctttggtgttcggcggaaacatcctgcacagctttaacgtgcccatgcagctgcggatctacgagatcgaggacaggacgcgggtgcagcccaaattccgttaccccttctactatgagatgtgctggtatgtcctggagagatacgtgtactgtgtgacccagcgctcccacctcactcaggaataccagagggagtcgatgcttattgatgccccgaggaagcccagcatagacggcttctcttcggattcctggctggagatggaggaggaggcctgtgatcagcagcctcaggaggaggaggagaaggacgaggagggcgagggcagggacagggcacccaaaccgcccaccgatggctccacttcacccaccagcacgccctctgaggaccaggaggccctcgggaagaagcccaaagcacctgccctgcgattcctcaaaaggactttgtctaatgagtcggaggaaagtgtgaagtccaccacattggccgtagactaccccaagacccccaccggctctcccgccacggaggtctctgccaaatggacccatctcactgagtttgaactgaagggcctgaaagctctggtggagaaactggaatccctcccggagaacaagaagtgtgtccccgagggcatcgaggacccccaggcactcctggagggtgtgaagaacgtcctgaaggagcacgcagatgatgaccctagtctggccatcactggggtccctgtggtgacttggccaaagaagactccaaagaaccgggctgtgggtcggcccaaggggaagctgggcccggcctccgcggtgaagttggccgccaaccggacaacggcaggagctcggcggcgccggacgcgatgccgcaagtgcgaggcctgcctgcggaccgagtgcggagagtgccacttctgcaaggacatgaagaagttcgggggccccgggcgcatgaagcagagctgcatcatgcggcagtgcatcgcgccagtgctgccccacaccgccgtgtgccttgtgtgtggcgaggcggggaaggaagacacggtggaagaggaggaaggcaagtttaacctcatgctcatggagtgctccatctgcaatgaaatcatccaccctggatgccttaagattaaggagtcagagggtgtggtcaacgacgagcttccaaactgctgggagtgtccgaagtgtaaccacgccggcaagaccgggaaacaaaagcgtggccctggctttaagtacgcctccaacctgcccggctccctgctcaaggagcagaagatgaaccgggacaacaaggaagggcaggaacctgccaagcggaggagtgagtgtgaggaggcgccccggcgcaggtcggatgagcactcgaagaaggtgccgccggacggccttctgcgcagaaagtctgacgacgtgcacctgaggaagaagcggaaatacgagaagccccaggagctgagtggacgcaagcgggcctcatcgcttcaaacgtcccccggttcctcctctcacctctcgccgaggccccctctaggcagcagcctcagcccctggtggagatccagtctcacttacttccagcagcagctcaaacctggcaaagaagataagcttttcaggaaaaagcggcggtcctggaagaacgccgaggaccgcatggcgctggccaacaagcccctccggcgcttcaagcaggaacccgaggacgaactgcccgaggcgccccccaagaccagggagagcgaccactcccgctccagctcccccaccgcgggacccagcaccgaaggggccgagggcccggaggagaagaagaaggtgaagatgcgccggaagcggcggcttcccaacaaggagctgagcagggagctgagcaaggagctcaaccacgagatccagaggacggagaacagcctggccaacgagaaccagcagcccatcaagtcggagcctgagagcgagggcgaggagcccaagcggcccccgggcatctgcgagcgtccccaccgcttcagcaaggggctcaacggcaccccccgggagctgcggcaccagctggggcccagcctgcgcagcccgccccgtgtcatctcccggcccccaccctccgtgtccccgcccaagtgtatccagatggagcgccatgtgatccggccaccccccatcagccccccgcctgactcgctacccctggacgatggggcagcccacgtcatgcacagggaggtgtggatggccgtcttcagctacctcagccaccaagacctgtgtgtgtgcatgcgggtctgcaggacctggaaccgctggtgctgcgataagcggttgtggacccgcattgacctgaaccactgcaagtctatcacacccctgatgctgagtggcatcatccggcgacagcccgtctccctcgacctcagctggaccaatatctccaagaagcagctgagctggctcatcaaccggctgcctgggctccgggacttggtgctgtcaggctgctcatggatcgcggtctcggccctttgcagctccagttgtccgctgctccggaccctggatgtccagtgggtggagggactaaaggatgcccagatgcgggatctcctgtccccgcccacagacaacaggccaggtcagatggacaatcggagcaagctccggaacatcgtggagctgcgcctggcaggcctggacatcacagatgcctccctgcggctcatcatccgccacatgcccctgctctccaagctccacctcagttactgtaaccacgtcaccgaccagtctatcaacctgctcactgctgttggcaccaccacccgagactccttaaccgagatcaacctgtctgactgcaataaggtcactgatcagtgcctgtccttcttcaaacgctgtggaaacatctgtcatattgacctgaggtactgcaagcaagtcaccaaggaaggctgtgagcagttcatagccgagatgtctgtgagtgtccagtttgggcaagtagaagaaaaactcctgcaaaaactgagttagtccaaggataagtatgtaaatacggggcgggctctgggaggggagagactttacaaaaatgagggcttttattttccatttggaacgtgggacaacagaccacaacgcaattccattttgcaagtctttccaagggagaagctgttcaaccacccgtttgggggatgagtgagccgacactttcctttggtctttctgaatcgtaactgcactgctttctggaccatttctaaggcggcctttacaagaagacattcctgtcggagaggagggtggacttcggagaaattctcatactgaagcatgagcttaggagtttctgttagtggtagtggtgttttggacacttcattccttgcaacaccgaggttttgggtgttgacataaagtggaccacacaccacatctgctgccgtcttgacacttttttttgtttggttggttttgttacatcttacattatgcagaactatttttgtacaaattgtttaaaagttatttatgcaaggtttgaatgcataccagtgtttttattgttttgagattgccaattttcctgatttccttaaggtaggagagaatttaacgtgtacttcatcgacacaacccatctacaaatgtgcccagatctaacaaagtaggctaagaccttccacttaaaagcatgtttaactggaagttgagagtctgctttgtacctcaagagttacatgagcatgttgtggataaatgtaaattatagtcaaagtaagatactctgccaagtttcctctgtagagaattcacttttctcaaattttaaaatttcgacttcagcctttgcactcaggaggttctgctccagcatgagctcttgtacttacatagatctaatttatacagtgagtcaagacgtagaataaatgctcccacatagcctttcttttgcttttgcttctctcctctgaagtgtgagttgagttctcatttaggtttgtaacatggctatttcctagttgtaaagttctgcatttataagtgccattgttgtaaggtggtgtttcctagaccttccctgatgcgattttacctttgttgaatttgtataaacaattgtacaaaaaaaaccactcttgaactttgagggtttctgttctaggagtggactagaagtttaagcccagagtcagtaaacactgttttgaagtccaaaaaaaaaaaaaa

SEQ ID NO: 504 - DNA, 6565 bp, Homo sapiens
ggctcggagggcgggcgcgggcggaatggggactgcagctgcggcagcggcggcggcggcggcggcggcggccggggagggggcgcgtagcccgagccccgccgccgtgtcgctcggcctgggcgtggccgtcgtgtcgagcctggtgaacgggtccacgttcgtgctacagaagaagggcatcgtgcgtgccaagcggcgaggtacttcctatttaacagacattgtgtggtgggctggcacaatcgcaatggctgttggccagattggaaacttcctggcttacacggcggtccccacggtcctggtaacccccctgggcgcccttggagtaccgttcgggtccattttagcttcctatctcctgaaggaaaagctcaacatcttgggcaagttggggtgcctgctaagctgtgcaggctccgtcgtgctgattatccactccccaaagtctgagagtgtgacaactcaggctgagctggaggaaaagctgaccaatccagtgtttgtgggctacctgtgcatcgtgctgctcatgctgctgctgctcatcttctggatcgcgccggcccatgggcccaccaacatcatggtctacatcagcatctgctccttgctgggcagtttcaccgtgccttccaccaagggcatcgggctggcggcccaagacatcttgcataacaacccgtccagtcagagagccctctgcctgtgcctggtactcctggccgtgctcggctgcagcatcatcgtccagttcaggtacatcaacaaggcgctggagtgcttcgactcctcggtgttcggggccatctactacgtcgtgtttaccacgctggtcctgctggcctcagccatcctcttccgggagtggagcaacgtgggcctggtggacttcttggggatggcctgtggattcacgaccgtctccgtggggattgtccttatacaggtgttcaaagagttcaatttcaaccttggggagatgaacaaatctaatatgaaaacagactagattgcaataggagcttggatggttcgaggaataggcattggaggtggtttctggccgtgattggatgtgaagtagaagaggtcctcgatcatggtgttagaattgactggatagtaacaggtggtctggtggatagcggggagcatggctcagcaccagagcagaggcccagccagccctctgcagcccaaacgtccccaacggttgcctggcaccatctctctctgatgagacgaatctcattttcatttccattaacctggaagctttcatgaatattctcttcttttaaaacattttaacattatttaaacagaaaaagatgggctctttctggttagttgttacatgatagcagagatatttttacttagattactttgggaatgagagattgttgtcttgaactctggcactgtacagtgaatgtgtctgtagttgtgttagtttgcattaagcatgtataacattcaagtatgtcatccaaataagaggcatatacattgaattgtttttaatcctctgacaagttgactcttcgacccccacccccacccaagacattttaatagtaaatagagagagagagaagagttaatgaacatgaggtagtgttccactggcaggatgacttttcaatagctcaaatcaatttcagtgcctttatcacttgaattattaacttaatttgactcttaatgtgtatatgttcttagattagaataatgcaacttcgagtatgctttaatatttcaatattcaagttacaaatgtataaggcagttagaaataatacagtcacatgtcacttaatgatagggaaacattctgagaaatgcattgtaaggtgactttattgtgtgaacatcatggagtgcacttatacaaacctagatgggacacctatgacccacccaggccagatggtacagcctgttgctcctgggccacacacctgtacagcatgtgaccgcactgaataccgcaggcaattgtaacacagtggtgagtatttgtgtttacaaacataggaaaggtacagtaaaactatggtattacaatgttatgggaccaccgtcatgtaagtggtatgtctttgacagaaacatggttacgtggttcatgactgtatattcactggaagatagtcaagactaaagacacattagagcaaattgacccctttaacatgtgattattgtccaattaaagacagttgatttaagtagcatgaggtattattttatttgtattcgatctgtgttacctgggatccagtatcaaatatatccacattctttatcagcaagcattcatggccattcagaagaaataaattaggtaacttgataataaggctaagtgggagagtacctgttcaatagctcatatatcgagtaccctgtcatacaggaacaagttaaaggacacaattgaggttaggctagcttctacaaattgcaatatgcagtttttgaaagattttctaacaaaaagccaataaatgtagccatctccttgttgtttgcaatggcagagcatcctagagttcctcagctaacctctcattatgtgtcttaaatgcaaaagagccattaattatgccagtatttgaatcaaagaggtcattctctgtctatagtgttcccatccatgtgttccaaatgggagcatagcatgaagtgatgcacatatttcaccacggtatcatgtacttcatggccagtgttttatctcagcagggaactacgccaagttgaaagatggggttgggtaaagtagattaggtgaagtagaacataaaattgaatagtacccaattaaagttcctcagtaagaaaaaaaatgtgtttttgtaggcaaaaagaacatttctaaagtctcaaggaatagcttcctaaagtgttgagtaaagaggctaaataaaatgagactagtttaatatagagagaaaaatacctttatggagtaaacgtgtacatgatgatcatgggttgtcagtgatttgtgaactgagagcagcaacaacattattttttaaaaatcttaaatcctctcaatggatggttaacaaatgctcaaagtccattactctttttattggctcttgcaggttttgtgttttatcatcagtgcttttagaaatgcaggccttaacttactgaactgaactttctgaaaacgtaatgtagcagtatcaatatacttttgggcataaaaatagtttcctaggtaaggggtgtgagatattcaaagaatacatgtggctaacaagtgtaatgagaaagttcatgtgtcacatgaaaatgatcatgtttgtgttgctacagcttttgtgggaaatttagtttaaaggcagctcttggtgtaccttagtatattttaatccacaattataccattgatactgagaggtgatacccgatgatcttctctataatattcttagagtaaaacaaaatctcaaaagtattaatagctcttctacccttgaaggtgactggtcctgggacagttagaatctttcaggtttacctctgttcagcagatacttcagtaggatacatagcttttcttccagtgaaacaaagttcatatcatccattgtttttcaagcacgtgacaccagcctcaaagtaaatgacatgaccagtggttgaacagtctaattttcaaatttaatatagagcatataacttctgatttgatagtatttattttaaaaaattatgttttcatcattcatttgaaaatgaaaaagccccaaagtgagaactttgggggagggcctagaacatggatagatctcttagtggtctttccaaaagtacatgtacttgaaatattttcattatcatactattctttgaaaaaaaagatgcttactgtatacttgttttcaagcatcctctaaaatcaaaggttttgatcacaatatgcagatttctcttgatagatacttaaataggctatttctctcctcttcttgggcaatgccttgttttctcctctgaatatttgcatttgaaaggattgcttcctgttctgctcattgatcaaaggtagggccaattaaggattctaaccctaacccagcaccacaaagcccccctggagcatcttcccggctggcaggaccatgccatctctgtggagaaggtgctggggagggaagtccttccagtgccacatggagtgaggccctgcccatgctggggactttggggaggaatttggtattctggtggccttgctcagctctcattgagatcttttcctatcagaatgttagtgaatatacttcgcagctctttgttcagcaataaggaatattctttcaattcctgctcttcaagccaatttactacacccagttgtctttccagaagttcatcccagcggtaatatgttggtgtttgttcttctttggatttcacatctgttttctggtagaagtgagcactgttcacttgtgcagtcgtcttattttccttcttcctagatgactcagctctttgtaaatgttgtgctcaacttctaggggccagttctagactttggagatgcagtgtctcccaggtgtgcacggacacctggtccgtggaaacaggtgtgatgggcacaggctgctgcccttctgtctggtcgggggattcctcttcttcaagctgctcagctaacccagaagaggggagagagtactccggtggttcccagagcccctcccgttgtgccgcttcgacctgacacctgctcgatgctgacttaggcttcctgccaccaagcaggaaactagaaagagaacatttcagtgtaaggtctgttcccgacagcatggattagcttccgtgttctgaagttgttcttttcatggtgtctgacaccgagggcgttgttcgtccatcaggcgggattggatggagtcttggtgttttgccttctcagggaccaaaaatgtatcattgactccttaacagtgaccttcctcccaaggacatatccgtgttcatttttcataggttttactcatattcataggtagattctgttaatgtgagttggaaagaaaagaccaatttgtacaccagtcacaccacaagacagtttatcatataaaatacctcaattttttgtattcctcatttccacctcacaattgtactggtgatgaattttaagggtctgtcctttagcttataggtgatgtttcacatctggccagattcttatacctccattgtatacttgaaaaggttcagaattacaggaacagcagtgagaatttggcccactaccacgactcatttgtttcattcacattcctcacgtgcaacaacataattatattttaagaaaatgtaactttgttacatcaaaatatgttgtctagtaaaaagttgatattcagtagaacaaggatcatgtaaataaacatctatttcacatgtacccaaaagcatttaaaaagcagaatccagggcccagagcatgagccagggaggaggatgtttttcttcttttctctatttttccctaaattgtgcaaacataggtgagtctcttaacctttctgtgcctcagtttttctacctctaaaggggtgggatggttcttcaaattgtttctaaaacaccggcactttcagcagtgttctggtggcctgagatgagagcaccgtgttcagaagtgcctgggagtggcacagtggaaactccgcttgcacggaccatggagtctgctcaggaccatgctgtaggacacacagcctcatgcgctgagaaagcaaaggaagtgctgggtgtaaagtttgcatgattccatgaagctttagttttcctttttttgttttaaaagaaagggttttatatgttctattgtaaaatatggaaattaaacagggacttcagaaagccgcacagaaagatcaccttccgatggtgtgatgtgctcctgacattcggccgaggtctgtattctgaaaaagatttaatggcctgtgaaacacgtggattctgttgcactggatttgtaataaatgacgctgaacttcctgcttccaagcagctcaaccctgatgctgaactgacaccaggcgaatgtcagggctcccaaaccactagtgccaaagggtcatgttgaaaagttcagaatatttatttgtcagaatataataattgccccccaccttagtatttttgcactttacagaaatttagatactgtttttcagtggcttgagcgttttgccttttcaaaggataactattattttcttgaaaatggaatataatcatgagaggaagaagatgtaaaaaatgtcaaatgttgattggttgtgtaaaagttttgtcatagacatgtattggggagcttccaattagcatacatagacacatgtgtcagtggccaagacctgcttatattttgctttatagatgtagtcatagcatgttgttattgcctcatgtaaataaaaaggctattaagttttccagtaatatttattaatctgtatgtgttttaaaataaaataacttatttctagctgaa

SEQ ID NO: 505 - DNA, 1254 bp, Homo sapiens
ctcacttggccttacactccgctcggctcaccatgtgtcactctcgcagctgccacccgaccatgaccatcctgcaggccccgaccccggccccctccaccatcccgggaccccggcggggctccggtcctgagatcttcaccttcgaccctctcccggagcccgcagcggcccctgccgggcgccccagcgcctctcgcgggcaccgaaagcgcagccgcagggttctctaccctcgagtggtccggcgccagctgccagtcgaggaaccgaacccagccaaaaggcttctctttctgctgctcaccatcgtcttctgccagatcctgatggctgaagagggtgtgccggcgcccctgcctccagaggacgcccctaacgccgcatccctggcgcccacccctgtgtccgccgtcctcgagccctttaatctgacttcggagccctcggactacgctctggacctcagcactttcctccagcaacacccggccgccttctaactgtgactccccgcactccccaaaaagaatccgaaaaaccacaaagaaacaccaggcgtacctggtgcgcgagagcgtatccccaactgggacttccgaggcaacttgaactcagaacactacagcggagacgccacccggtgcttgaggcgggaccgaggcgcacagagaccgaggcgcatagagaccgaggcacagcccagctggggctaggcccggtgggaaggagagcgtcgttaatttatttcttattgctcctaattaatatttatatgtatttatgtacgtcctcctaggtgatggagatgtgtacgtaatatttattttaacttatgcaagggtgtgagatgttccccctgctgtaaatgcaggtctcttggtatttattgagctttgtgggactggtggaagcaggacacctggaactgcggcaaagtaggagaagaaatggggaggactcgggtgggggaggacgtcccggctgggatgaagtctggtggtgggtcgtaagtttaggaggtgactgcatcctccagcatctcaactccgtctgtctactgtgtgagacttcggcggaccattaggaatgagatccgtgagatccttccatcttcttgaagtcgcctttagggtggctgcgaggtagagggttgggggttggtgggctgtcacggagcgactgtcgagatcgcctagtatgttctgtgaacacaaataaaattgatttactgtctgcaaaaaaaaaaaaaaa

SEQ ID NO: 506 - DNA, 4411 bp, Homo sapiens
agtgttcttgcagggctgctgatgggtggtcctgttcttttcgcggtcctgtttgcgcagagatgaaacggggaacttagcgtatccctaccgctctttttgatgacaggagtaaagggctgttcagactacctaaacaatgttgttaagagaagcactcgtacttctcagacttcgctgttccggaccccgcgagccaggggcaggcaccgggtccacccggggctgagctgcggcggcgcctgacaatgccccctcgcgccccggcctcggcgcccgctcccggctccagcgcgcctgcacgtacgtagccttcacgtgtgtgtggatacggagtgcatgtgtggagacagaggaatatgctccaacaaatttcggatagaggcgccgaagacaggacgtggggaagctaaagaagtaaacaggtcatggcacgtttaacaaaaagacgacaggcggatacaaaagctatccagcatctttgggcagccattgagattatacggaaccagaagcagattgccaacattgaccgtattacaaagtatatgtctcgagtccacggtatgcaccctaaagagaccacccgtcagctgagcttagctgtgaaagatggtcttattgtcgaaactctaacagtgggctgcaaaggttcaaaagctggtattgaacaagaaggatattggttgccaggagatgagattgactgggaaacagaaaatcatgactggtattgttttgaatgccatttgcctggagaggtgttgatatgtgacctgtgttttcgtgtgtatcattccaagtgtttgtctgatgagttcaggcttagagacagcagtagtccctggcagtgcccagtttgcaggagcattaagaagaagaatacaaacaaacaggagatgggcacatacctcagattcattgtctcccgcatgaaggagagggctatagatcttaataaaaaggggaaggacaataaacacccgatgtacaggaggctggtgcactcagctgtggacgttcccaccattcaagagaaagtgaatgaagggaaataccgaagttatgaagagttcaaagctgatgcccaattgcttctccacaataccgtgattttctatggagcagacagtgagcaagctgacattgcgaggatgctatataaagacacatgtcatgagctggatgaactgcagctttgcaagaattgcttttacttgtcaaatgctcgtcctgacaactggttctgttatccttgtatacctaatcatgagctggtttgggctaaaatgaaaggttttgggttttggccagccaaagtcatgcagaaagaagacaatcaagtcgacgttcgcttctttggccaccaccaccagagggcctggattccttctgaaaacattcaagatatcacagtcaacattcatcggctgcacgtgaagcgcagtatgggttggaaaaaggcctgtgatgagctggagctgcatcagcgtttcctacgagaagggagattttggaaatctaagaatgaggaccgaggtgaggaagaggcagaatccagtatctcctccaccagtaatgagcagctaaaggtcactcaagaaccaagagcaaagaaaggacgacgtaatcaaagtgtggagcccaaaaaggaagaaccagagcctgaaacagaagcagtaagttctagccaggaaatacccacgatgcctcagcccatcgaaaaagtctccgtgtcaactcagacaaagaagttaagtgcctcttcaccaagaatgctgcatcggagcacccagaccacaaacgacggcgtgtgtcagagcatgtgccatgacaaatacaccaagatcttcaatgacttcaaagaccggatgaagtcggaccacaagcgggagacagagcgtgttgtccgagaagctctggagaagctgcgttctgaaatggaagaagaaaagagacaagctgtaaataaagctgtagccaacatgcagggtgagatggacagaaaatgtaagcaagtaaaggaaaagtgtaaggaagaatttgtagaagaaatcaagaagctggcaacacagcacaagcaactgatttctcagaccaagaagaagcagtggtgctacaactgtgaggaggaggccatgtaccactgctgctggaacacatcctactgctccatcaagtgccagcaggagcactggcacgcggagcacaagcgcacctgccgccggaaaagatgaagctggcccttcccggagtcaccccgatgattactcttttcagacacagcggtttttgtttccaagaagccaaaattgtttagaatttgcttcccattttgcaccagcctttaaacacttttcgtgaagaaattttgcacagtagtttaaatcttttgttaatgctcctccgaagtttttcagggggtaaaagtaacatcagtggagggtattattttaaataaattttaattgagaatttgttgcattttcagcaaattttaaaacatttttaggttttacagagattttaacctttaaacaacagatctttaaaaaacaggtgaatacaagtgagtttaacaaagaaacatttagaatagatctgaatgtaagaactacagaactgtttcagaaataaaacatactaccttgatgtgacatttttttcttaaccttgttgagctggttttgttcagcttaatttactgttcaaaggcattatctgttggtcacaccagtgggtatatgattgaatttagggaacagggttgacacagcagggctagtcctgcatattttttcttaaatatttcccaattgtgtttttcattatttcttttcaatatataacttttataacaaattattagctttgatcttgtagtttaaaattgcagggaactggggtaatcttttactgagctggatcttagagaaaatgaatatttaaattttaaagtttgcacatttcatctttgtcctaacatgagtgcttgtaacaaaataaacaacaaaaacaaagccaaaaactacctttatccatatgtgaaattatagatgaggcatacgaatttgtttaatgcttcccttcccttcccacatatcatctcactgcctattatctggtgtcacctcatgtatcgtaagttaatactaaaagaagagaaagcacttaagtttcacagaagccgttatgtttgtagtaatgggtcattgcctactaatgaactccatcactgtacacagaatgaagaataatgcatgttaattttcttgtattaaagatgccgtgatttgtaaaaagtctgtattttgcggaatgtctggattaagaagcattaccaataggaatggatcgatagttgaataatgattttttatacatagatatataaaatacagccaggaaaacttaaattacttttcttttaaaatatctcacaatttatgtggtatttttaaagactgatcttagaccaagtcaaattcccatttatcatttagttattttttgaggttagagaataatttgtacatatttatttagacctttgatatttattaaagcaattactcacaatggaagtgaaagaatcaggagaaaagccttttaaaaagtattctccaggtttgtcagggtcactctaaagataaaaatgtaactaagtcttctgtgaaatatcatccatctaatcttgatgctgttgcagatggtggtgacacaagttaattgacaaactactgccaaatggtgcacaatattttgtaaaaagtacccagtagccccatttcatacaatgtacctaaattatgcagtaacttggcatcatcgttccctccttgttgctgtgtaattagtcagtgttgccacagtgtgtggcgctgatggagatgtcagaaccgagaacacttaaccttctttgattgtttttcaagttttaagacttcgatccacccctatgagagcaagtaattgtggaaatatttttggtgtaaaatcattccagagtatgtaatatttaactgatagctgcatgaaagtgagattcgtgttactttggcttttctgtctctgttgacacggttgcacatttccaagttactacagcgtgaaaactgtgtgtttaaaaaaaaacaaaattaaaaaaagagattgtggcctggttttgtaaaagttttaggtaaaattacaattgattgttttaggaatcattattaaaaattttctgcaaatcataaagctatatcgaggtgttgagcttagccactatgcacattgtaattattcattgtggctgtccagttctatgatgcattctggcattttgtaagctgctctgactagcaatatatagattcatttaatgtgttaacattggttaataaatgtatttaaaaaaaactaaaaaaaa

SEQ ID NO: 507 - DNA, 3517 bp, Homo sapiens
acccgcctctgcgcgcccccgggcacgaccccggagtctccgcgggcggccagggcgcgcgtgcgcggaggcctgtaggagctgtccaggccatctccaaccatgggagtgaggcacccgccctgctcccaccggctcctggccgtctgcgccctcgtgtccttggcaaccgctgcactcctggggcacatcctactccatgatttcctgctggttccccgagagctgagtggctcctccccagtcctggaggagactcacccagctcaccagcagggagccagcagaccagggccccgggatgcccaggcacaccccggccgtcccagagcagtgcccacacagtgcgacgtcccccccaacagccgcttcgattgcgcccctgacaaggccatcacccaggaacagtgcgaggcccgcggctgttgctacatccctgcaaagcaggggctgcagggagcccagatggggcagccctggtgcttcttcccacccagctaccccagctacaagctggagaacctgagctcctctgaaatgggctacacggccaccctgacccgtaccacccccaccttcttccccaaggacatcctgaccctgcggctggacgtgatgatggagactgagaaccgcctccacttcacgatcaaagatccagctaacaggcgctacgaggtgcccttggagaccccgcatgtccacagccgggcaccgtccccactctacagcgtggagttctccgaggagcccttcggggtgatcgtgcgccggcagctggacggccgcgtgctgctgaacacgacggtggcgcccctgttctttgcggaccagttccttcagctgtccacctcgctgccctcgcagtatatcacaggcctcgccgagcacctcagtcccctgatgctcagcaccagctggaccaggatcaccctgtggaaccgggaccttgcgcccacgcccggtgcgaacctctacgggtctcaccctttctacctggcgctggaggacggcgggtcggcacacggggtgttcctgctaaacagcaatgccatggatgtggtcctgcagccgagccctgcccttagctggaggtcgacaggtgggatcctggatgtctacatcttcctgggcccagagcccaagagcgtggtgcagcagtacctggacgttgtgggatacccgttcatgccgccatactggggcctgggcttccacctgtgccgctggggctactcctccaccgctatcacccgccaggtggtggagaacatgaccagggcccacttccccctggacgtccagtggaacgacctggactacatggactcccggagggacttcacgttcaacaaggatggcttccgggacttcccggccatggtgcaggagctgcaccagggcggccggcgctacatgatgatcgtggatcctgccatcagcagctcgggccctgccgggagctacaggccctacgacgagggtctgcggaggggggttttcatcaccaacgagaccggccagccgctgattgggaaggtatggcccgggtccactgccttccccgacttcaccaaccccacagccctggcctggtgggaggacatggtggctgagttccatgaccaggtgcccttcgacggcatgtggattgacatgaacgagccttccaacttcatcaggggctctgaggacggctgccccaacaatgagctggagaacccaccctacgtgcctggggtggttggggggaccctccaggcggccaccatctgtgcctccagccaccagtttctctccacacactacaacctgcacaacctctacggcctgaccgaagccatcgcctcccacagggcgctggtgaaggctcgggggacacgcccatttgtgatctcccgctcgacctttgctggccacggccgatacgccggccactggacgggggacgtgtggagctcctgggagcagctcgcctcctccgtgccagaaatcctgcagtttaacctgctgggggtgcctctggtcggggccgacgtctgcggcttcctgggcaacacctcagaggagctgtgtgtgcgctggacccagctgggggccttctaccccttcatgcggaaccacaacagcctgctcagtctgccccaggagccgtacagcttcagcgagccggcccagcaggccatgaggaaggccctcaccctgcgctacgcactcctcccccacctctacacactgttccaccaggcccacgtcgcgggggagaccgtggcccggcccctcttcctggagttccccaaggactctagcacctggactgtggaccaccagctcctgtggggggaggccctgctcatcaccccagtgctccaggccgggaaggccgaagtgactggctacttccccttgggcacatggtacgacctgcagacggtgccagtagaggcccttggcagcctcccacccccacctgcagctccccgtgagccagccatccacagcgaggggcagtgggtgacgctgccggcccccctggacaccatcaacgtccacctccgggctgggtacatcatccccctgcagggccctggcctcacaaccacagagtcccgccagcagcccatggccctggctgtggccctgaccaagggtggggaggcccgaggggagctgttctgggacgatggagagagcctggaagtgctggagcgaggggcctacacacaggtcatcttcctggccaggaataacacgatcgtgaatgagctggtacgtgtgaccagtgagggagctggcctgcagctgcagaaggtgactgtcctgggcgtggccacggcgccccagcaggtcctctccaacggtgtccctgtctccaacttcacctacagccccgacaccaaggtcctggacatctgtgtctcgctgttgatgggagagcagtttctcgtcagctggtgttagccgggcggagtgtgttagtctctccagagggaggctggttccccagggaagcagagcctgtgtgcgggcagcagctgtgtgcgggcctgggggttgcatgtgtcacctggagctgggcactaaccattccaagccgccgcatcgcttgtttccacctcctgggccggggctctggcccccaacgtgtctaggagagctttctccctagatcgcactgtgggccggggccctggagggctgctctgtgttaataagattgtaaggtttgccctcctcacctgttgccggcatgcgggtagtattagccacccccctccatctgttcccagcaccggagaagggggtgctcaggtggaggtgtggggtatgcacctgagctcctgcttcgcgcctgctgctctgccccaacgcgaccgctgcccggctgcccagagggctggatgcctgccggtccccgagcaagcctgggaactcaggaaaattcacaggacttgggagattctaaatcttaagtgcaattatttttaataaaaggggcatttggaatcaaaaaaaa

SEQ ID NO: 508 - DNA, 4387 bp, Homo sapiens
gggcggggcgcgagcgagcgcgcgggctgggccggagccggcctggtcgccagcctaacccggcacagtgagcggagcgcctgggcggcggcggcggcggcgtgatggctccggccgcggaccgagagggctactggggccccacgacctccacgctggactggtgcgaggagaactactccgtgacctggtacatcgccgagttctggaatacagtgagtaacctgatcatgattatacctccaatgttcggtgcagttcagagtgttagagacggtctggaaaagcggtacattgcttcttatttagcactcacagtggtaggaatgggatcctggtgcttccacatgactctgaaatatgaaatgcagctattggatgaactcccaatgatatacagctgttgcatatttgtgtactgcatgtttgaatgtttcaagatcaagaactcagtaaactaccatctgctttttaccttagttctattcagtttaatagtaaccacagtttaccttaaggtaaaagagccgatattccatcaggtcatgtatggaatgttggtctttacattagtacttcgatctatttatattgttacatgggtttatccatggcttagaggactgggttatacatcattgggtatatttttattgggatttttattttggaatatagataacatattttgtgagtcactgaggaactttcgaaagaaggtaccacctatcataggtattaccacacaatttcatgcatggtggcatattttaactggccttggttcctatcttcacatccttttcagtttgtatacaagaacactttacctgagatataggccaaaagtgaagtttctctttggaatctggccagtgatcctgtttgagcctctcaggaagcattgatgaatcattccaccaagaaaacaaacaagcacctaccatagacctggcagaataaataaggaaatccttaaagatctacaagttcaaatatgtcatgaccatcacagcagaggagtgactttctgactaatgctgccacccacacagagaataaggagtagggcctgctgggtgtttagctcatggctttatcttatttgtccccctcctcctttcacgctccagtttataaagaaacagagatgatgtgtgtgtatgcctcaaatgcagaaacagttgggcttttcttaacaggttaacagtttgtgctggttataagaaattaaccttcttttctttttgccaagggttgcatgtgaattatacctttcttaatatttgattaaataatgcagtcagctaagagccaacaaaaccccatatccagatagttagctgtgagccagcactcagctgtgtcagatttgattaatattgtattaatctcatggatggttctcaaaggtaaaaaaagagagagaaagagagagagctagctgtgggattctgtgtagttcttcactatctgttccagggctagtcggaggatcataagcaagctcagacctgcccccagttcagtacttgaccacatcccaggatttatggtgtctgtctatggccacagccaaccagaatgagtgggtcatcttataacctttctgaagctccatgaggacatgtatagaatgctgcaccttcagccagctctgctctgatctttgcagatctttaagttgtcactgtttctacggctagacaaatatgactggtggtctagactacccatagttcatcctcctcacataacttatttgaagttgtcagggaatgtcattacactctgatttttaaaattatgcagtattttccagttctcagagaggtcatggttgtgcccagggaagtgtgttgcattaactaaagctaaaattatcagaatcctatttacataaagcatattaaaatatctgctccttaattttctgaaggaaatagatgtaagtttctgctacttgaaacctacagaaccgacaaaaattagggtgctaaaaaaatgacagtgaaatctcatcgtaaggcagctagttctaatttgcatttgaatgtataacaaattgcatcacttttcacaaacttaacacctgcctggagtaaaaatctgatttgacccctctgctcatgtttcatcatatttgtagctctgcatcatttagcatttttatgactttttttgctttatataaattattgtaaaatccagattgtttttaccacatgatgacgtgactcaggattaaatcctgagctacagtttcaaaaggaaaatcatttttttcttatgcaaagatggtaaaacactgttgtcattttttccagtattcaataagtagcctttgtacaaatttaaaaccaaaaactattctgttgtttttcttcacctactagccttagtttttaaccaagtatccaaggatgtcaacttgacatccttcccttagcatgccaacaagccattagactgattcttccacctatttttatgaacctccaggaagaaaaacacttgccaaaacattaagagaactttgattctgccttaagagggtataaaactaaaccatttgaaggcacagcccataagactatacttgattttgccccaagattctgacttctggctacatttcacctgcagttacctgggctatcggccgtgatacattttttaattcatttgttttccaccattatatttttatacttttcagttagatatacttctgcataaagagtatatatacagtgtaggataaaggcatatcgtacatggcaatgctgttaaacatggtaagactgaggttctgcaggattaaagtcagattaagggtacagaaagcacaccttgatactgaggccatttagagcaatttgtttaatgagtggttcagccatcaccaccagtggccacctgttcaataaaattgcctagcaccacagtggagagtcatctacaccccaaggtgagctgtaagactggccaattctttgaagacctttttttctgttgggagaatggaaagcagaaagggaagccaggctctttaatgttccaagtcagctgtgcctcacacaaggctctctttttagctactaagtaacatactcaagactttgtatctgtgcagcattttatggaaatcactggtgacctataggatattactaaattatttcaatagctttatttttttcctacttggattctaggtggacattacagagttgaattcctcactaccccctcccgctgtcatttgttttattggaaaacttcatgttaactagagtgtacaaaaagtctgtttcctgctgagccaatagtgatttgtttgcatatcacctaatgtgaaaagtgctcatctgtgaactctacagcaaattatattttagaaaatactttgtgaggccgggcatggtggcagagcgagactccgtctcaaaaaaaaaaaaaaaaaaaaaaaagaaaagaaaagaaaatataaggatgtaaaagaagcaatttgcttgcacatctgaatatccttcttgtgcctccattttcactcttgaaaactgaaagcaatttgacttttatttttgtttttctaaagaacagctaggtgaaaggaggttaagctgattgtcactctgcctgcccactacctactccccaccatggtgtttcatgaaacatccccaccacctgaagtgatctttttaatccttgtgatagtaaatgcattgataattaacaggaaaaacatgtttttaaataatctacaaatgagaacccaaatagtagtgttttgtttgacagaagtaaatcaaatattatggtttaaatataatgcaaaatttcaggacagttaatttggacttcccttaccctaagagggtttttcttataataaggagaagaggtgtggttcaaagaaaattaagagacaaaaccttcaggtacataatgcatgaaaatctttaaatgcctgcaaaaattaagttctgttataataccagccaattctgaattagccaatgccctaaaagcatctaacaatttaaggttatcttatgagtcctatgaaaacaattatttgttgctaaatttgagttttagctaccaacgccatgtttacgtgacaagaaattgttttggccctgtggtttatgacgtgctgctggataagcatttatgtaaaactgagtatttcaaagagaaccatttacaattggaatttccacctgtgtggctgtttgcagacctacctctgtcttccattttgcatcctgtcagtgctataattagtttgatcactttgtcttgtttttcagtgtctacaattatagcttattcactatgttctaactatttaaaaataatgggccgggcgcggtgg

SEQ ID NO: 509 - DNA, 628 bp, Homo sapiens
cctgcgtggctgggctgctcgggttagatcgtcaggaaaagcctaaagattagactgtaagaaaagaaaatagaagccatgtttcgaagacctgtattacaggtacttcgtcagtttgtaagacatgagtccgaaacaactaccagtttggttcttgaaagatccctgaatcgtgtgcacttacttgggcgagtgggtcaggaccctgtcttgagacaggtggaaggaaaaaatccagtcacaatattttctctagcaactaatgagatgtggcgatcaggggatagtgaagtttaccaactgggtgatgtcagtcaaaagacaacatggcacagaatatcagtattccggccaggcctcagagacgtggcatatcaatatgtgaaaaaggggtctcgaatttatttggaagggaaaatagactatggtgaatacatggataaaaataatgtgaggcgacaagcaacaacaatcatagctgataatattatatttctgagtgaccagacgaaagagaaggagtagaaaggatgattcttctttggccatcatttggtacagtctcatttccaagtcatgtataatctttatggcttccaaggacaagaattaaaatactcttttacgt

SEQ ID NO: 510 - skipped

SEQ ID NO: 511 - DNA, 7372 bp, Homo sapiens
ggatggcttcccctctgagggacgaggaggaggaggaggaggagatggtggtgtcggaggaggaagaagaggaggaagaagagggcgacgaggaggaggaggaggaggtggaggcggccgacgaggacgatgaggaggacgacgacgagggagtactcgggcgcgggccgggccacgaccggggccgcgaccgccacagcccccccggctgccacctcttcccgccgccgccgccgccgccgccaccgctgcccccgccgccgccgcccccgccgccagataaggatgacattcggctgctgccgtcagcattgggtgtgaagaagagaaaacgaggacccaagaagcagaaggagaacaagccaggaaaaccccgaaaacgcaagaagcgtgacagtgaggaggaatttggttctgagcgagatgagtaccgggagaagtcagagagtgggggcagtgaatatggaaccggaccgggtcggaaacgaagaaggaagcaccgagaaaaaaaggagaagaagacaaagcggcggaaaaagggggagggagatggggggcaaaagcaagtggaacagaagtcatcagcaactctgcttctgacctggggcctggaggatgtggagcatgtgttctctgaggaggattaccacacgctcaccaactacaaagccttcagccagttcatgaggcccctaattgctaagaagaatcctaagatcccaatgtctaagatgatgaccatccttggggccaaatggagagagttcagtgccaacaaccccttcaaggggtcagcagctgctgtggcggcggcagcggcagcagcagcagcagctgtagctgagcaggtgtcagctgctgtctcgtcggccacccccatagcaccctccggaccccccgcccttccaccaccccctgctgctgatatccagcccccacccatccgaagagccaaaaccaaagagggcaaaggtccaggccataagaggcggagtaagagcccccgagtgcctgatggacgcaagaagcttcggggaaagaaaatggcaccactcaaaataaaactagggcttctgggtggcaagaggaagaaaggaggctcgtatgtttttcagagcgacgaaggtcctgaaccagaggctgaggaatcagacctggacagtggcagtgtccacagtgcctcaggccggcctgatggccctgtccgcaccaagaaactaaagagaggccggccaggaaggaagaagaagaaggtcctgggctgtcctgcagtggccggggaggaggaggttgatggctacgagacggatcaccaggattactgtgaggtgtgccagcagggtggggaaattattctgtgtgacacctgccctcgtgcctaccacctcgtctgccttgatcctgagcttgaccgggctccagagggcaaatggagctgccctcactgtgagaaggagggggtccagtgggaggccaaggaggaagaagaagaatacgaagaggagggagaggaagaaggggagaaggaggaggaggatgatcacatggagtactgccgcgtatgcaaggacggcggggagctcctgtgctgtgacgcgtgcatctcctcctaccacattcattgtctaaaccctcccctgcctgacattcccaatggtgaatggctgtgtccccgatgcacatgccccgtgctgaagggtcgagtgcagaagatcctacattggcggtggggggagccacctgtagcagtgccagcccctcaacaggcagatggaaatccagatgtcccacccccccgtcctcttcaaggcagatcagagcgagagttctttgtcaagtgggtaggactatcctactggcactgctcctgggccaaggagcttcagctggaaatcttccatttggttatgtatcgaaactaccagcggaagaatgacatggatgagcccccacccctggactatggctccggcgaggatgatgggaagagcgacaagcgtaaagtgaaagacccgcactatgctgagatggaggagaagtactatcgttttggcatcaagccagagtggatgaccgtccaccgcatcatcaaccacagtgtggataaaaaggggaattaccactatctagtaaaatggagggacttaccatatgaccagtccacgtgggaggaagatgaaatgaatatccctgaatacgaagaacataagcaaagctactggagacaccgagaactaattatgggggaagaccctgcccagccccgcaagtataagaagaagaagaaggagctacagggtgatgggcctcccagttctcccactaatgatcctaccgtgaaatatgagactcagccacggtttatcacagccactggaggcaccctgcacatgtatcagttggaagggctgaactggctacgcttctcctgggcccagggcactgacaccattctagctgatgagatggggctaggcaagaccatacaaaccatcgtcttcctctactcactctacaaggagggccacacaaaaggtcccttcctggtgagtgccccactctctaccatcattaactgggagcgggagttccagatgtgggcacccaaattctatgtggtgacatacacgggtgacaaggacagccgggccatcattcgtgagaatgaattctcctttgaggacaatgccatcaaagggggcaagaaagcttttaagatgaagagggaggcacaggtgaagttccatgttctcctgacatcgtatgagctgatcaccattgatcaggcagcacttggttccatccgctgggcctgtcttgtggtagatgaggcccatcgactcaagaacaaccagtccaagtttttcagggttctcaatggttacaagatagatcataagttgctgctgacaggaaccccattgcagaataatctggaggagctcttccatctcctgaacttcctcaccccagagagatttaacaacttggagggcttcctggaggagtttgctgacatatccaaagaggaccagatcaagaaactgcatgatttgctggggccacacatgctgcggagactcaaggcagatgtctttaagaacatgccagccaagacagagctcatcgttcgggtggagctaagccccatgcagaagaaatactacaaatacatcctgactcgaaattttgaggccttgaattcacgaggtggtgggaaccaggtgtcgctgcttaatatcatgatggatcttaagaagtgctgcaaccatccatacctttttcccgtggctgctatggagtcccccaaactccccagtggggcttatgagggtggggcacttattaagtcgtctgggaagctcatgctgctccagaagatgctgcgaaagctgaaggagcaaggacaccgagtgctcatcttctcgcagatgaccaaaatgttagacttgcttgaggacttcttagactatgaaggctacaagtatgagcgcatcgatggtggtatcacgggtgccctgaggcaggaggccatcgatcggtttaatgctcctggggcccaacaattctgcttcctcctgtccacccgagctgggggcctgggcatcaatctggccactgctgacactgtcatcatctttgattctgactggaacccccataatgacatccaggcctttagccgggctcatcggattggccaggccaacaaagtgatgatttaccggtttgtgactcgcgcgtcagtggaagagcgaatcacacaagtggccaagagaaagatgatgctgacacacctggttgtgcggcctgggctgggctccaaggcaggctccatgtccaagcaggagcttgacgacattctcaaatttggcactgaagagctattcaaggatgaaaacgagggggagaacaaggaggaggacagcagtgtgattcattatgacaatgaggccatcgctcggctgttggaccggaaccaggatgcaactgaggacactgacgtgcagaacatgaatgagtatctcagctccttcaaggtggcacagtacgtcgtgcgggaagaagacaagattgaggaaattgagcgagagatcatcaagcaggaggagaatgtggaccctgactactgggagaagctgctgaggcatcactatgagcaacagcaggaagacctagcccggaatctaggcaagggcaagcgggttcgcaagcaagttaactacaatgatgctgctcaggaagaccaagacaaccagtcagagtactcggtgggttcagaggaggaggatgaagacttcgatgaacgtcctgaagggcgtagacagtcaaagaggcagctccggaatgagaaagataagccactgcctccactgctggcccgagtcgggggcaacattgaggtgctgggcttcaacacccgtcagcggaaggctttcctcaatgctgtgatgcgctgggggatgccaccacaggatgccttcaccacacagtggctggtgcgggacctgaggggcaagactgagaaggagtttaaggcctatgtgtctttgttcatgcgccatctgtgtgagcctggggcagacggctctgaaacctttgccgatggggtccctcgggagggactgagtcgccagcaggtgttgacccgcattggagtcatgtctctcgtcaaaaagaaggtgcaggagtttgagcacatcaatgggcgttggtcaatgccggaactgatgcctgaccccagcgccgattctaagcgctcctccagagcctcctctcctaccaaaacgtctcccaccactcctgaggcttctgctaccaacagtccctgcacctctaaacctgctactccagctccaagtgagaaaggagaaggcataaggacacctcttgagaaggaggaagctgaaaaccaggaggaaaagccagagaagaacagcagaattggggagaagatggagacagaggctgatgcccccagcccagccccatcacttggggagcggctggagccaaggaagattcctctagaggatgaggtgccaggggtgcctggagagatggagcctgaacctgggtaccgtggggacagagagaagtcagccacagagtcgacgccaggagaaaggggggaggagaagccgttggatggacaggaacacagggagaggccggagggggaaacaggggatttgggcaagagagaagatgtaaaaggtgaccgggagcttcgaccagggcctcgagatgagccacggtccaatgggcgacgagaggaaaagacagagaagccccggttcatgttcaatatcgccgatggtggcttcacagagcttcacacactgtggcagaatgaggaacgggcagctatttcctcggggaaactcaatgagatctggcacagaagacatgactattggcttctggctgggattgtcctccatggctatgcacggtggcaggacatccagaatgatgctcaatttgccattatcaacgagccatttaaaactgaagccaataaggggaactttctggagatgaaaaataagttcctggcccggaggttcaagctcctggagcaggcgctggtgattgaggagcagctgcggcgggcggcctacctgaacctgtcgcaggagccggcgcaccccgccatggccctccacgcccgcttcgccgaggccgagtgcctggccgagagccaccagcacctctccaaggagtcgctggcggggaacaagccggccaacgccgtcctgcacaaggttctgaaccagctggaggagttgctgagcgacatgaaggcggacgtgacccgcctgccagccacgctgtcccgaataccccccatcgcagcccgccttcagatgtccgagcgcagcatcctcagccggctggccagcaagggcacggagcctcaccccacaccggcctacccgccgggtccctacgctacacctccggggtacggggcggccttcagcgccgcacccgtaggggccctggccgccgcaggcgccaattacagccagatgcctgcagggtccttcatcacagccgccaccaacggccctccagtgcttgtgaagaaggagaaggaaatggtgggggcattggtgtcagacgggctggatcggaaggagccccgagccggggaggtgatctgtatagacgactgactggatcccaggcctgcccttcacccaggccccgtccccgaggccgacccccagctcaagcgctggggcctgctgccagccctccaccttccccaccccttgggccatcactgggctaggaacccctttgcccctctctgcagctcctctcttcaagaagggccctttgtctttctccactcccacacacctttcccaccaagccttgaagactgtgctggtgagaagaagtctgggtgggagatggctggcagggtcttccaagtaccttcctcccacactgccaagtatacacaacttcccagtaaatggttgtggggaggaaagaggtggagcctccccagccgtttccctgcagaatcagctctgtctcatgtggaagtggagaatcagccttgcctggcctttaggaacttttgtggggaagagagctttgaagagaggagggggactttagagagggatgaaaatgagccctgggagggaggaagggacgaggaggggtggctgcatgttaccgtcccctacctctccccacgtggagggtggagcagttatgagggaggaagtcaactgctgttcagcctcagaataaaggtgccgttcactggctcagttacctcctgtgtaccggcatcttgtgttgggaatgttcccccctccctagggaccaaggaccacccctacaaaaagagtaatggttgggtgatactccctcaagccaaagaggagctccccaacctgttctagggacccaggtaacctagaagggtgggagagaatacaatgggccagatgtggtggaagcccagctctggggctcaggttcctggaagacttctactaccctccctcctcaaggcctggatacagactaaatttgtataagtcaggcaggggacctagtcagggtcttgggagctaccttgtcgttgggaccagagcaaaatagtggagggcaggctagggaaatgtgggcacatcccccctcccaggaggggccggggagagtggcagtttgcatggcgaaccccccacttcctctttgctgccccttcactttcttgctgcccctttcccagtctctcttcacacccactcctggtctgtcctgatcccctcttctgtatcaggtttattggttgtacatataaattatactttcctttctgaaaaaaaaaaaaaaaaaa

SEQ ID NO: 512 - DNA, 2330 bp, Homo sapiens
cttggtcccgccccgggcccctggctcctggccccgccccagcccaggcaggtcactgcgccatttcctgtccaaagctgggcgaatcagggattccggttcacaatggatgctgataaagagaaagatttgcagaaatttcttaaaaatgtggatgaaatctccaatttaattcaggagatgaattctgatgacccagttgtgcaacagaaagctgtcctggagacagaaaagagactactgcttatggaggaagaccaggaggaggatgaatgcaggaccaccttgaacaagactatgatcagtcctccacaaactgctatgaagagtgcagaagaaataaactcagaggccttcttggcatctgtggagaaggatgcaaaggaacgagccaagagaagaagggaaaacaaagtcttggcggatgccctaaaagaaaaagggaatgaagcatttgctgaaggcaattatgaaacagctatcctgcgctacagtgagggtttggagaagctgaaggacatgaaagtgctgtacaccaaccgagcccaggcttatatgaaacttgaggactatgagaaggcactggtggattgtgagtgggctctcaagtgtgatgaaaaatgcacaaaagcatattttcacatgggaaaagccaacctggccctgaagaactacagtgtgtctagagagtgttataagaagatcttagaaataaaccccaagctgcaaacccaggtgaaaggttacctgaatcaagtagatcttcaggaaaaagcagaccttcaagaaaaggaagcccacgaactgctggattcaggaaagaacacagccgtgaccaccaagaacctcctggagaccctttccaagcctgaccagatccccttgttctatgctggggggattgagatcctgactgaaatgataaatgagtgcacagaacaaactttattcagaatgcacaatggatttagtatcatcagtgacaacgaggtcataagaaggtgtttttccacagcaggaaatgatgcagttgaagaaatggtctgtgtgtctgttctcaagctctggcaagcagtgtgcagcaggaacgaggaaaaccagcgtgtgctagtgatacaccatgacagggccaggctgttggccgccctcttgtcctccaaggtcctggccatccggcagcagagctttgccctgctgctgcatctcgcccagactgagagcggacggagcctgatcatcaaccaccttgacctgaccagattattggaagcgctggtgtcatttcttgatttctcggataaggaggccaacactgctatgggactgttcacagacttggctctggaagaaagattccaagtctggttccaggccaaccttccaggtgttctccctgcactcacaggcgttctgaagacagatcccaaggtaagcagctcctcggctctgtgccagtgcattgccatcatgggaaacctcagtgctgagcccactacccgaagacacatggcggcctgtgaggaatttggggatggctgcttgagcctcctggccaggtgtgaggaggatgtggacctgttcagagaggttatctacacactcctgggactcatgatgaacctgtgtcttcaggctccctttgtctctgaggtttgggctgtggaggtgagcagaaggtgcctgtctttactaaacagccaggatggaggaatcctgacaagagctgctggtgttctgagccggaccctttcttcctctctgaaaattgttgaggaggccttgcgagcaggagtggtaaagaaaatgatgaaattcctgaagacaggaggtgagactgcatcacgttatgctataaagatactagctatctgcacgaatagttatcatgaagctcgggaagaagtaataagactggataaaaagttgagcgttatgatgaagctgctcagctcggaggatgaggttctggtgggcaacgctgccctctgccttggtaactgcatggaggtgcccaacgttgcgtcttccctgctaaagacggaccttttgcaggtcttgttaaagcttgcaggcagtgacacacagaagacggccgtgcaggtgaacgcaggcattgctctggggaagctgtgcacagctgagcccagatttgctgctcaactgagaaagcttcatggcctagaaattctcaactctacgatgaaatacatcagtgattcttgagagagacagggtttgtgtgcatttggggaacacacagatgcacaccgtgtgttgttcctatgctaataaagacctttgatgtatccacttcaaaaaaaaaaaaaaaa

SEQ ID NO: 513 - DNA, 2694 bp, Homo sapiens
agagccagcggacggaaccattccaaacagcctagtctcgtgctgagagcctctccggtttcacgctgagacccgctcacccccgctctggccccttagatgctattttggcccgagtgtcacgtcgggcgctctttagagaggactgggacaagagttgcggacgcgaagaacgagtaagcggtggttcatccctcctgaccccacccccgtggcctggcccgatggtcgcgcccggggttgcgagatttgcgcctgcgcagtgcggcgcctagagggaaagcgagagggagacggacgttgagagaacgaggaggaaggagagaaaatggcgtccacggattacagtacctatagccaagctgcagcgcagcagggctacagtgcttacaccgcccagcccactcaaggatatgcacagaccacccaggcatatgggcaacaaagctatggaacctatggacagcccactgatgtcagctatacccaggctcagaccactgcaacctatgggcagaccgcctatgcaacttcttatggacagcctcccactgtagaagggaccagtacaggttatactactccaactgccccccaggcatacagccagcctgtccaggggtatggcactggtgcttatgataccaccactgctacagtcaccaccacccaggcctcctatgcagctcagtctgcatatggcactcagcctgcttatccagcctatgggcagcagccagcagccactgcacctacaagaccgcaggatggaaacaagcccactgagactagtcaacctcaatctagcacagggggttacaaccagcccagcctaggatatggacagagtaactacagttatccccaggtacctgggagctaccccatgcagccagtcactgcacctccatcctaccctcctaccagctattcctctacacagccgactagttatgatcagagcagttactctcagcagaacacctatgggcaaccgagcagctatggacagcagagtagctatggtcaacaaagcagctatgggcagcagcctcccactagttacccaccccaaactggatcctacagccaagctccaagtcaatatagccaacagagcagcagctacgggcagcagagttcattccgacaggaccaccccagtagcatgggtgtttatgggcaggagtctggaggattttccggaccaggagagaaccggagcatgagtggccctgataaccggggcaggggaagagggggatttgatcgtggaggcatgagcagaggtgggcggggaggaggacgcggtggaatgggcgctggagagcgaggtggcttcaataagcctggtggacccatggatgaaggaccagatcttgatctaggcccacctgtagatccagatgaagactctgacaacagtgcaatttatgtacaaggattaaatgacagtgtgactctagatgatctggcagacttctttaagcagtgtggggttgttaagatgaacaagagaactgggcaacccatgatccacatctacctggacaaggaaacaggaaagcccaaaggcgatgccacagtgtcctatgaagacccacccactgccaaggctgccgtggaatggtttgatgggaaagattttcaagggagcaaacttaaagtctcccttgctcggaagaagcctccaatgaacagtatgcggggtggtctgccaccccgtgagggcagaggcatgccaccaccactccgtggaggtccaggaggcccaggaggtcctgggggacccatgggtcgcatgggaggccgtggaggagatagaggaggcttccctccaagaggaccccggggttcccgagggaacccctctggaggaggaaacgtccagcaccgagctggagactggcagtgtcccaatccgggttgtggaaaccagaacttcgcctggagaacagagtgcaaccagtgtaaggccccaaagcctgaaggcttcctcccgccaccctttccgcccccgggtggtgatcgtggcagaggtggccctggtggcatgcggggaggaagaggtggcctcatggatcgtggtggtcccggtggaatgttcagaggtggccgtggtggagacagaggtggcttccgtggtggccggggcatggaccgaggtggctttggtggaggaagacgaggtggccctggggggccccctggacctttgatggaacagatgggaggaagaagaggaggacgtggaggacctggaaaaatggataaaggcgagcaccgtcaggagcgcagagatcggccctactagatgcagagaccccgcagagctgcattgactaccagatttattttttaaaccagaaaatgttttaaatttataattccatatttataatgttggccacaacattatgattattccttgtctgtactttagtatttttcaccatttgtgaagaaacattaaaacaagttaaatggtagtgtgcggagtttttttttcttccttcttttaaaaatggttgtttaagactttaacaatgggaaccccttgtgagcatgctcagtatcattgtggagaaccaagagggcctcttaactgtaacaatgttcatggttgtgatgttttttttttttttttaaataaaattccaaatgtttataaagagtcaaaaaaaaaaaaaaaaa

SEQ ID NO: 514 - DNA, 2124 bp, Homo sapiens
cgggcatgtcctgatctggcggccgctcctaccaccctgggcagccgagcagagtcgtccccagcgggtctccctccctgcctccctgactttgcaacaccgcgttccgggaggaccggcctcggcgagggaggaggcgggggagctgcgaacacccagacccaaaccctgacatgctctggggcggagaggaggaagccaggagctgagcgcgccgcgggggctgcttcgccctccggctccgagcgccgggctccgggcgccctgccctgcgcctgggcagcagccttgctggtcttgggggcgccccccgcttcccgccccgggggtccgcggccggcaggaccatgctgctgaaagagtaccggatctgcatgccgctcaccgtagacgagtacaaaattggacagctgtacatgatcagcaaacacagccatgaacagagtgaccggggagaaggggtggaggtcgtccagaatgagccctttgaggaccctcaccatggcaatgggcagttcaccgagaagcgggtgtatctcaacagcaaactgcctagttgggctagagctgttgtccccaaaatattttatgtgacagagaaggcttggaactattatccctacacaattacagaatacacatgttcctttctgccgaaattctccattcatatagaaaccaagtatgaggacaacaaaggaagcaatgacaccattttcgacaatgaagccaaagacgtggagagagaagtttgctttattgatattgcctgcgatgaaattccagagcgctactacaaagaatctgaggatcctaagcacttcaagtcagagaagacaggacggggacagttgagggaaggctggagagatagtcatcagcctatcatgtgctcctacaagctggtgactgtgaagtttgaggtctgggggcttcagaccagagtggaacaatttgtacacaaggtggtccgagacattctgctgattggacatagacaggcttttgcatgggttgatgagtggtatgatatgacaatggatgatgttcgggaatacgagaaaaacatgcatgaacaaaccaacataaaagtttgcaatcagcattcctcccctgtggatgacatagagagtcatgcccaaacaagtacatgacaatggatgaagtccgagaatttgaacgagccactcaggaagccaccaacaagaaaatcggcattttcccacctgcaatttctatctccagcatccccctgctgccttcttccgtccgcagtgcgccttctagtgctccatccacccctctctccacagacgcacccgaatttctgtccgttcccaaagatcggccccggaaaaagtctgccccagaaactctcacacttccagaccctgagaaaaaagccaccctgaatttacccggcatgcactcttcagataagccatgtcggcccaaatctgagtaactttatataaatatctcatggggttttatattttcatttgttgttgttgtttttttttaagaatcttctgatagagaaaaagactgctttgtcactcaaacatgttccttcgacctttcagtgtgcatgtgactcagtaacttcacatagaatatgattccctaagtatgctacacagcatcatattagatgtaagatgtaagacttgcaaaggacagaaggaatcttctgtaaccacatagctgtatgccagagaggaagccttgttattgggcatttgatgaggtttggcatggacttcaaggataaatgaatgaaaactttgcaccacttttgttacaaggtacggtagaaaatagtgaagtcagtttcctctcatcaaatctaaaattctccaaaatactctcaggcataacatacttagctgttaaattttgaactgctaattactaatacttgaataccaatagttactgagattcctattttgtggttagtctgactcaggatttggagcctaattaactctaaacttttgaaaattttaatcatcaagctatagaggctccaagtgcaattaataataactcatttataccttccacagaatttaataaagattctacttgtttctgtcttttaaaaaaaaaaaaaaaaaa

SEQ ID NO: 515 - DNA, 1216 bp, Homo sapiens
tgacgcatactatagcgctgttttcctgcactgataaacgaaaagcaatccaccaggtctcggcagctaactttccggcactacttatgcccgagcgtgtcgctcccagtgcgcaagtgcagcaggtggctgcacggggggcgcgggaggaggaggaggaggaggaggaggctggggtggggccggcggcaagtgctgtgatgcggttccggggaggggccgtcgggtagaggctgaataccagtttccgagcggcaaggcagcgatggcgatttttagtgtgtatgtggtgaacaaagctggcggcttgatttaccagttggacagctacgcgccacgggctgaggctgagaaaactttcagttatccgctggatctgctgctcaagctacacgatgagcgtgtgttggttgctttcggccagcgggacggcatccgagtgggtcatgcagtgctggccatcaatggcatggacgtgaatggcaggtacacggccgacgggaaagaggtgctggagtatctgggtaaccctgctaattacccggtgtccattcgatttggccggccccgcctcacttctaatgagaagcttatgctggcctccatgttccactcgctctttgccatcggctcccagctgtctcctgaacagggaagctcaggcattgagatgctggagacagacacattcaaattgcactgctaccagacactgacagggatcaagtttgtggttctagcagatcctaggcaagctggaatagattctcttctccgaaagatttatgagatttactcagactttgccctcaagaatccattctattccttagaaatgcctatcaggtgtgagctctttgaccagaacctgaagctagctctggaggtggcagagaaggctggaacttttggacctgggtcataggctgaacctgttatggacccccaaattctgagagttcctgcaacaagaatactgctgttgacactccagtggaaatcccagcagccttgttagtgcacttgaaagtgggagaatgctgaccctgatgacttgtactgattcctgagccttaacactgtgctctttccttctgtatataccatggtcttactttccaactctgtacagatttatttatggaggagctaggtccataaatgttgtaataaatattcctttgatcttggtgtttgcaaaaaaaaaaaaaaaaaa

SEQ ID NO: 516 - DNA, 1679 bp, Homo sapiens
gcccgcctgatgtcgtcccacgccgtgccggctctcaggcgccggaagtgagctgcgcagcgccggaagcggcggacgcaggaggcctcgtggaggacacagcagcatgggacagtcagggaggtcccggcaccagaagcgcgcccgcgcccaggcgcagctccgcaacctcgaggcctatgccgcgaacccgcactcgttcgtgttcacgcgaggctgcacgggtcgcaacatccggcagctcagcctggacgtgcggcgggtcatggagccgctcactgccagccgtctgcaggttcgtaagaagaactcgctgaaggactgcgtggcagtggctgggcccctcggggtcacacactttctgatcctgagcaaaacagagaccaatgtctactttaagctgatgcgcctcccaggaggccccaccttgaccttccaggtcaagaagtactcgctggtgcgtgatgtggtctcctcactgcgccggcaccgcatgcacgagcagcagtttgcccacccacccctcctggtactcaacagctttggcccccatggtatgcatgtgaagctcatggccaccatgttccagaacctgttcccctccatcaacgtgcacaaggtgaacctgaacaccatcaagcgctgcctcctcatcgactacaaccccgactcccaggagctggacttccgccactatagcatcaaagttgttcctgtgggcgcgagtcgcgggatgaagaagctgctccaggagaagttccccaacatgagccgcctgcaggacatcagcgagctgctggccacgggcgcggggctgtcggagagcgaggcagagcctgacggcgaccacaacatcacagagctgcctcaggctgtcgctggccgtggcaacatgcgggcccagcagagtgcagtgcggctcaccgagatcggcccgcggatgacactgcagctcatcaaggtccaggagggcgtcggggagggcaaagtgatgttccacagttttgtgagcaagacggaggaggagctgcaggccatcctggaagccaaggagaagaagctgcggctgaaggcgcagaggcaggcccagcaggcccagaatgtgcagcgcaagcaggagcagcgggaggcccacagaaagaagagcctggagggcatgaagaaggcacgggtcgggggtagtgatgaagaggcctctgggatcccttcaaggacggcgagcctggagttgggtgaggacgatgatgaacaggaagatgatgacatcgagtatttctgccaggcggtgggcgaggcgcccagtgaggacctgttccccgaggccaagcagaaacggcttgccaagtctccagggcggaagcggaagcggtgggaaatggatcgaggcaggggtcgcctttgtgaccagaagtttcccaagaccaaggacaagtcccagggagcccaggccaggcgggggcccagaggggcttcccgggatggtgggcgaggccggggccggggccgcccagggaagagagtggcctgagcccaagccgcaccggagcagcggctggattgaacgccccagattggggcccgagatgtggccctcggtttcctttcataaaggagttgtgtccccagcccttccactccagtaaagaactgaattggccagggaaaaaaaaaaaaaaaaa

SEQ ID NO: 517 - DNA, 738 bp, Homo sapiens
gaggaaactgttgagaaaacggaactactggggaaagggagggctcactgagaaccatcccggtaacccgatcaccgctggtcaccatgaaccacattgtgcaaaccttctctcctgtcaacagcggccagcctcccaactacgagatgctcaaggaggagcaggaagtggctatgctgggggtgccccacaaccctgctcccccgatgtccaccgtgatccacatccgcagcgagacctccgtgcctgaccatgtggtctggtccctgttcaacaccctcttcatgaacacctgctgcctgggcttcatagcattcgcgtactccgtgaagtctagggacaggaagatggttggcgacgtgaccggggcccaggcctatgcctccaccgccaagtgcctgaacatctgggccctgattttgggcatcttcatgaccattctgctcatcatcatcccagtgttggtcgtccaggcccagcgatagatcaggaggcatcattgaggccaggagctctgcccgtgacctgtatcccacgtactctatcttccattcctcgccctgcccccagaggccaggagctctgcccttgacctgtattccacttactccaccttccattcctcgccctgtccccacagccgagtcctgcatcagccctttatcctcacacgcttttctacaatggcattcaataaagtgtatatgtttctggtgctgctgtgacttcaaaaaaaaa

SEQ ID NO: 518 - DNA, 1240 bp, Homo sapiens
tttttttttttttgccggagtcgagcgggtgctgctagcggaggcgccatattggaggggacaaaactccggcgacagcgagtgacacaaataaacccctggacccccttgttccctcagctctaagggccgcgatgttgtacctagaagactatctggaaatgattgagcagcttcctatggatctgcgggaccgcttcacggaaatgcgcgagatggacctgcaggtgcagaatgcaatggatcaactagaacaaagagtcagtgaattctttatgaatgcaaagaaaaataaacctgagtggagggaagagcaaatggcatccatcaaaaaagactactataaagctttggaagatgcagatgagaaggttcagttggcaaaccagatatatgacttgcagcacttctaaaagattgaaaacaccaagaagatagatagaatattcactatttctcatattgatgcaattgtggtgctctttttcatttgaaacatcttctcctaaaatatacactttaagaaatagtcatttctgtttttgcattaaagtaaattaaagcagaaaacacatgctcacttttggctaacttcagtgtatagatttcatacttatgttgtctttcctgggtacagatttattactgaacaagtacgtgtaagtaaaatgtcattggtgagcaggacacaagataaaaggtgaacaccacatatggtgtgaattgtaaatgcttataccacaaacttgaaaatgtgtcatgtagagccatggaaaatgtctagttgtttttatgtagtacacacattttaatggtgctaacaacctgggctcttttgttcatagagttattctgaaaaaaatttcataaaagacactgcctaaagataggtagaataggctgtagcttgatttactgtggaataaaaaccaaaaaaaaaaaggtcttaattgtttcagtctttaattatgtctataaacttagaaaaaggcatttacatttgaatctagactaatttgtttagtaacattcttcctcatattcaatgactgtatgtatcagtccttatttagagactgcctgctttttaattcatatagctctttggttctattctttgttttgtttattattttgttgttttattgcttgttagacctttactaaagatattttgtgtatttagaaaaaatataacataaatatatgctttttaaatatgaaaaaaaaaaaaaaaaaa

SEQ ID NO: 519 - DNA, 1173 bp, Homo sapiens
gtgtctcagccacagcggcttcaccatgcacagctgggagcgcctggcagttctggtcctcctaggagcggccgcctgcgcggcgccgccccgtggtcggatcctgggcggcagagaggccgaggcgcacgcgcggccctacatggcgtcggtgcagctgaacggcgcgcacctgtgcggcggcgtcctggtggcggagcagtgggtgctgagcgcggcgcactgcctggaggacgcggccgacgggaaggtgcaggttctcctgggcgcgcactccctgtcgcagccggagccctccaagcgcctgtacgacgtgctccgcgcagtgccccacccggacagccagcccgacaccatcgaccacgacctcctgctgctacagctgtcggagaaggccacactgggccctgctgtgcgccccctgccctggcagcgcgtggaccgcgacgtggcaccgggaactctctgcgacgtggccggctggggcatagtcaaccacgcgggccgccgcccggacagcctgcagcacgtgctcttgccagtgctggaccgcgccacctgcaaccggcgcacgcaccacgacggcgccatcaccgagcgcttgatgtgcgcggagagcaatcgccgggacagctgcaagggtgactccgggggcccgctggtgtgcgggggcgtgctcgagggcgtggtcacctcgggctcgcgcgtttgcggcaaccgcaagaagcccgggatctacacccgcgtggcgagctatgcggcctggatcgacagcgtcctggcctagggtgccggggcctgaaggtcagggtcacccaagcaacaaagtcccgagcaatgaagtcatccactcctgcatctggttggtctttattgagcacctactatatgcagaaggggaggccgaggtgggaggatcattggatctcaggagttcgagatcagcatgggccacgtagcgcgactccatctctacaaataaataaaaaattagctgggcaattggcgggcatggaggtgggtgcttgtagttccagctactcaggaggctgaggtgggaggatgacttgaacgcaggaggctgaggctgcagtgagttgtgattgcaccactgccctccagcctgggcaacagagtgaaaccttgtctctctctacaaaaaaaaaaaaaaaa

SEQ ID NO: 520 - DNA, 2953 bp, Homo sapiens
atatagagacgtttccgcctcctgcttgaaactaacccctctttttctccaaaggagtgcttgtggagatcggatcttttctccagcaattgggggaaagaaggctttttctctgaattcgcttagtgtaaccagcggcgtatattttttaggcgccttttcgaaaacctagtagttaatattcatttgtttaaatcttattttatttttaagctcaaactgcttaagaataccttaattccttaaagtgaaataattttttgcaaaggggtttcctcgatttggagctttttttttcttccaccgtcatttctaactcttaaaaccaactcagttccatcatggtgatgttcaagaagatcaagtcttttgaggtggtctttaacgaccctgaaaaggtgtacggcagtggcgagaaggtggctggccgggtgatagtggaggtgtgtgaagttactcgtgtcaaagccgttaggatcctggcttgcggagtggctaaagtgctttggatgcagggatcccagcagtgcaaacagacttcggagtacctgcgctatgaagacacgcttcttctggaagaccagccaacaggtgagaatgagatggtgatcatgagacctggaaacaaatatgagtacaagttcggctttgagcttcctcaggggcctctgggaacatccttcaaaggaaaatatgggtgtgtagactactgggtgaaggcttttcttgaccgcccgagccagccaactcaagagacaaagaaaaactttgaagtagtggatctggtggatgtcaatacccctgatttaatggcacctgtgtctgctaaaaaagaaaagaaagtttcctgcatgttcattcctgatgggcgggtgtctgtctctgctcgaattgacagaaaaggattctgtgaaggtgatgagatttccatccatgctgactttgagaatacatgttcccgaattgtggtccccaaagctgccattgtggcccgccacacttaccttgccaatggccagaccaaggtgctgactcagaagttgtcatcagtcagaggcaatcatattatctcagggacatgcgcatcatggcgtggcaagagccttcgggttcagaagatcaggccttctatcctgggctgcaacatccttcgagttgaatattccttactgatctatgttagcgttcctggatccaagaaggtcatccttgacctgcccctggtaattggcagcagatcaggtctaagcagcagaacatccagcatggccagccgaaccagctctgagatgagttgggtagatctgaacatccctgataccccagaagctcctccctgctatatggatgtcattcctgaagatcaccgattggagagcccaaccactcctctgctagatgacatggatggctctcaagacagccctatctttatgtatgcccctgagttcaagttcatgccaccaccgacttatactgaggtggatccctgcatcctcaacaacaatgtgcagtgagcatgtggaagaaaagaagcagctttacctacttgtttctttttgtctctcttcctggacactcactttttcagagactcaacagtctctgcaatggagtgtgggtccaccttagcctctgacttcctaatgtaggaggtggtcagcaggcaatctcctgggccttaaaggatgcggactcatcctcagccagcgcccatgttgtgatacaggggtgtttgttggatgggtttaaaaataactagaaaaactcaggcccatccattttctcagatctccttgaaaattgaggccttttcgatagtttcgggtcaggtaaaaatggcctcctggcgtaagcttttcaaggttttttggaggctttttgtaaattgtgataggaactttggaccttgaacttatgtatcatgtggagaagagccaatttaacaaactaggaagatgaaaagggaaattgtggccaaaactttgggaaaaggaggttcttaaaatcagtgtttcccctttgtgcacttgtagaaaaaaaagaaaaaccttctagagctgatttgatggacaatggagagagctttccctgtgattataaaaaaggaagctagctgctctacggtcatctttgcttaagagtatactttaacctggcttttaaagcagtagtaactgccccaccaaaggtcttaaaagccatttttggagcctattgcactgtgttctcctactgcaaatattttcatatgggaggatggttttctcttcatgtaagtccttggaattgattctaaggtgatgttcttagcactttaattcctgtcaaattttttgttctccccttctgccatcttaaatgtaagctgaaactggtctactgtgtctctagggttaagccaaaagacaaaaaaaattttactacttttgagattgccccaatgtacagaattatataattctaacgcttaaatcatgtgaaagggttgctgctgtcagccttgcccactgtgacttcaaacccaaggaggaactcttgatcaagatgccgaaccctgtgttcagaacctccaaatactgccatgagaaactagagggcaggtcttcataaaagccctttgaacccccttcctgccctgtgttaggagatagggatattggcccctcactgcagctgccagcacttggtcagtcactctcagccatagcactttgttcactgtcctgtgtcagagcactgagctccacccttttctgagagttattacagccagaaagtgtgggctgaagatggttggtttcatgtttttgtattatgtatctttttgtatggtaaagactatattttgtacttaaccagatatatttttaccccagatggggatattctttgtaaaaaatgaaaataaagtttttttaatggaaaaaaaaaaaaaaaaaaaaaaaaaaaa

SEQ ID NO: 521 - DNA, 4907 bp, Homo sapiens
taatgggggtcgcccgggagtcggaagggggaggggaaagggaggaggcagccaaggaattgtttttttctctggccccgccctcgcccggggggccaatggtgatgatctgtttcccccggagcctcgcccagctcctgtgtttcagccaatgagcggcggaagcggctccgaggggggcgggtccgggaggctgtgcgtgtcttgtgagagctcttgaaccaagtcagcgctggagtcggctaggcggctggaaacggcggctgccgccggtgactcagggaggcgggaggcgggggaggagctcttcctgcaggcgtggaaaccatggtgctcacgctcggagaaagttggccggtattggtggggaggaggtttctcagtctgtccgcagccgacggcagcgatggcagccacgacagctgggacgtggagcgcgtcgccgagtggccctggctctccgggaccattcgagctgtttcccacaccgacgttaccaagaaggatctgaaggtgtgtgtggaatttgatggggaatcttggaggaaaagaagatggatagaagtctacagccttctaaggagagcatttttagtagaacataatttggttttagctgaacgaaagtcacctgaaatttctgaacgaattgtacagtggcctgcaataacgtacaaacctctgttggacaaagctggtttgggatccataacttctgttcgctttctgggagatcaacaaagagtatttctttctaaagaccttttgaagcctatacaggatgtaaacagtcttcgactttctcttacggataatcagattgtcagtaaagaatttcaagctttgattgtgaagcatttagatgaaagccatcttttaaaaggtgacaaaaacttagttggttcagaagtaaaaatttatagcttggacccatctactcagtggttttcagcaaccgttataaatggaaacccagcatcaaaaactcttcaagtcaactgtgaggagattccagcactgaaaattgttgatccgtcactgattcatgttgaagttgtacacgataaccttgtgacatgtggtaattctgcaagaattggagctgtaaaacgcaagtcttctgagaataatggaaccctggtttccaaacaagcaaaatcttgctctgaggcctctcccagtatgtgtcctgtgcagtctgtacctacaacagtttttaaggagatactgcttggctgtactgcggcaactccacctagtaaggacccaagacagcaaagtactccccaggctgccaactctccacctaaccttggagcaaaaattcctcaaggatgtcataaacaaagtttaccagaggaaatttcttcctgtctaaatacaaagtctgaagctctgagaacaaaaccagatgtctgcaaagcagggttgctctcaaagtcctctcagattggaactggagacttgaaaattctgactgagccaaaaggcagctgtactcagcctaagacaaacactgatcaggaaaacagattggagtctgttccacaagcattgactggccttcctaaggagtgcttacctacaaaggcttcttctaaggcagaattggaaattgccaatcctcctgaactgcagaagcacctagaacatgcaccttccccatcggatgtttcaaatgcaccagaagtgaaagcaggtgtcaatagtgatagccctaataactgttcaggaaaaaaggtagaaccttcagctttagcttgccgatcacagaatttaaaggaatcttcagtaaaagtagataatgaaagctgttgttcaagaagcaacaataaaatccagaatgccccatccaggaagtcggttttgacagacccagctaaactcaaaaagctgcaacagagtggcgaggccttcgtacaggatgattcttgtgtgaacatcgtggcacagttgcctaaatgccgagagtgtcgcttggacagtctccgcaaggataaggagcaacagaaggactcacctgtgttttgccgcttctttcacttcaggaggttacaattcaacaaacatggtgtgttgcgggtagaaggcttcttaacaccaaacaagtatgacaatgaagcaattggcttgtggttacctttaaccaaaaacgttgtggggattgatttggacacagcaaagtacatcttggccaacattggagaccacttctgtcaaatggtgatttctgaaaaggaagctatgtcaactattgagccacacagacaggttgcttggaagcgagctgtcaaaggtgttcgagaaatgtgtgatgtgtgcgacaccaccatcttcaacctgcactgggtgtgtcctcggtgtgggtttggagtatgtgtggactgctaccggatgaagagaaagaattgccaacagggtgctgcttacaagactttctcttggctaaaatgtgtgaagagtcagatacatgaaccagagaacttaatgcccacacagatcattcctggaaaagcactctatgatgttggagacattgttcattctgtaagagcgaaatggggaataaaggcaaactgcccttgttcaaacaggcaattcaaactcttttcaaagccagcctcaaaggaagacctaaaacagacttctttagctggagaaaaaccgactcttggtgcagtgctccagcagaatccctcagtgttggagccagcagctgtgggtggggaagcagcctccaagccagccggcagcatgaagcctgcctgtccagccagcacatctcctctaaactggctggccgacctaaccagcgggaatgtcaacaaggaaaacaaggaaaaacaaccaacaatgccaattttaaagaatgaaatcaaatgccttccacccctcccacctttaagcaaatccagcacagtcctccatacgtttaacagcacaattttgacacccgtaagcaacaacaattctggtttcctccggaatctcttgaattcttctacaggaaagacagaaaatggactcaagaatacaccaaaaatccttgatgacatctttgcctctttggtgcaaaataagacgacttctgatttatctaagaggcctcaaggactaaccatcaagcccagcattctgggctttgacactcctcactattggctttgtgataatcgcttgctgtgcttgcaagaccccaacaataagagcaactggaatgtgtttagggagtgctggaaacaagggcagccagtgatggtgtctggagtgcatcataaattgaactctgaactttggaaacctgaatccttcaggaaagagtttggtgagcaggaagtagacctagttaattgtaggaccaatgaaatcatcacaggagccacagtaggagacttctgggatggatttgaagatgttccaaatcgtttgaaaaatgaaaaagaaccaatggtgttgaaacttaaggactggccaccaggagaagattttagagatatgatgccttccaggtttgatgatctgatggccaacattccactgcccgagtacacaaggcgagatggcaaactgaatttggcctctaggctgccaaactactttgttcggccagatctgggccccaagatgtataatgcttatggattaatcactcctgaagatcggaaatatggaacaacaaatcttcacttagatgtatctgatgcagctaatgtcatggtctatgtgggaattcccaaaggacagtgtgagcaagaagaagaagtccttaagaccatccaagatggagattctgacgaactcacaataaagcgatttattgaaggaaaagagaagccaggagcactgtggcacatatatgctgcaaaggacacggagaagataagggaatttcttaaaaaggtatcagaagagcaaggtcaagaaaacccagcagaccacgatcctattcatgatcaaagctggtatttagaccgatcattaagaaaacgtcttcatcaagagtatggagttcaaggctgggctattgtacagtttcttggggatgtggtgtttatcccggcaggagctccacatcaggttcataacttatatagctgcatcaaagtggctgaagattttgtttctccagagcatgttaaacactgcttctggcttactcaggaattccgatatctgtcacagactcataccaatcacgaagataaattacaggtgaagaatgttatctaccatgcagtgaaagatgcagttgctatgctgaaagccagtgaatccagttttggcaaaccttaatctccctgcacattggaaatgaattacaggcagctgttcaaactcttcaggcaggattcctgtggactttgagattcatgttacctcatcttcttttttaaactgtacccaacttgtgagggtactctgtctaatgtatatttctagtgtttacagacagtaaatgtgtatatgtagtaactatttacagaacatgcatccttaaactgtgacttctcacctagtgcagaacttttaccaggctgtaaaagcaaaacctcgtatcagctctggaacaatacctgcagttattcttcagctgtttggacaacttagattgggtttataactattaggaatcactgcacagtttatttgggttgtgttttgtgtctgagtcccctccctcatcccttagggtccagaagagcaatggaggaagtgacagctaatgttgcagttcttattgtatggcataggactggcattatatagcagaaatcaactactgtacaatttcttggggttaaccatctttagttaaatggaattttaatttaaatgacgctttgctaattttaagtgttaagcattttgcattaaaatattcatataataaaaaaaaaaaaaaaaaa

SEQ ID NO: 522 - DNA, 2785 bp, Homo sapiens
gatccgccaccatggctgaaggagagaatgaagtgagatgggatggactctgcagcagagattcaactactagggagacagcattggaaaacattaggcaaaccattttgaggaaaaccgagtatcttcgttcggtgaaagaaacacctcatcgtccatcagacgggctttcaaataccgagtcttcggatgggttgaataagctacttgctcatctgcttatgctttctaagaggtgtcccttcaaagatgtgagagagaaaagtgagtttattctgaagagcatccaggaacttggcattagaattcctcgaccactaggacagggaccaagcagattcatcccagaaaaggagatcctccaagtggggagtgaagacgcacagatgcatgctttatttgcagattcttttgctgctttgggccgtttggataacattacgttagtgatggttttccacccacaatatttagaaagtttcttaaaaactcagcactatctactgcaaatggatgggccgttacccctacattatcgtcactacattggaataatggctgcggcaagacatcagtgctcctacttagtgaacctgcatgtaaatgatttccttcatgttggtggggaccccaagtggctcaatggtttagagaatgctcctcaaaaactacagaatttaggagaacttaacaaagtgttagcccatagaccttggcttattaccaaagaacacattgagggacttttaaaagctgaagagcacagctggtcccttgcggaattggtacatgcagtagttttactcacacactatcattctcttgcctcattcacattcggctgtggaatcagtccagaaattcattgtgatggtggccacacattcagacctccttctgttagcaactactgcatctgtgacattacaaatggcaatcacagtgtggatgagatgccggtcaactcagcagaaaatgtttctgtaagtgattctttctttgaggttgaagccctcatggaaaagatgaggcagttacaggaatgtcgagatgaagaagaggcaagtcaggaagagatggcttcacgttttgaaatagaaaaaagagagagtatgtttgtcttctcttcagatgatgaagaagttacaccagcaagagctgtatctcgtcattttgaggatactagttatggctataaagatttctctagacatgggatgcatgttccaacatttcgtgtccaggactattgctgggaagatcatggttattctttggtaaatcgcctttatccagatgtgggacagttgattgatgaaaaatttcacattgcttacaatcttacttataatacaatggcaatgcacaaagatgttgatacctcaatgcttagacgggcaatttggaactatattcactgcatgtttggaataagatatgatgattatgactatggtgaaattaaccagctattggatcgtagctttaaagtttatatcaaaactgttgtttgcactcctgaaaaggttaccaaaagaatgtatgatagcttctggaggcagttcaagcactctgagaaggttcatgttaatctgcttcttatagaagctaggatgcaagcagaactcctttatgctctgagagccattacccgctatatgacctgatgcctttccttcattaaagatgattctggaatgatcagcagatatagtctacaagggggaaggtactaagccccaggaccaatggtagacaaaataattcagaaatccattgtgccatgattcctttagtttctgctatttttctgtggaaaaccactgctggcacaagcagtgactgtttggcagcttcaagtttagagctgtgaagacaggctgccattcacagtattttgctttttgacagtacaagatgctgtgtaactgttttaatacagcaaatagtaactctccaaatcctgttgcttttatgttaaataagataacaagaattggagcatgcaaagaatgggacttggataatgacttaagctttatatgtaaagaattttagaagatcttggtgctgctattcctgctggaggaatgaatagatggctgtttcagttaagctattagtaataaaagtgaacattgctactatctgagcctacatacataacttgtgtgatttcaaattaaacttgcattatgtgttaattttcttgcatctaaaaaagcatagaattcctactcacacagctcagcaacaaccattttgatggtaacagttaatttctttcattagttttttaaattcagggttctggatattaaattaaaatggcattcttaaagattttcttcaaaaagcaatcctaaatgaaagtgtgtaaattataagaagctggcgatcttttgatatgctgtttcacaggatcctgacactggagggcagctgtcttgtgcattacttgtgttcccagcaccaaagttgtgggacatgttgctgtagactgctgcgcagtcctgggtgcattcagtctctctgcctctgcctgcctcctggtccccactttaaaggctgtgcagctccttaaataataaagctggaaaatatttttagtcgggttatcaaatttgatttacaaaaacgctaactttgtttgaaatgcaaacaggtttgaaaatatgtattaagtactttgtattctggaagcgtgaattgcttttgaagtctgtcagtattactggtatttttaaataaagaagaatttttctccaaaaaaaaaaaaaaaaaa

SEQ ID NO: 523 - DNA, 9771 bp, Homo sapiens
gccgaggctgcctgactggaatgagggtagctgcggcgactgcggcggctggagcggggccggccatggcggtgtggacgcgggccaccaaagcggggctggtggagctgctcctgagggagcgctgggtccgagtggtggccgagctgagcggggagagcctgagcctgacgggcgacgccgccgcggccgagctggagcccgctctgggacccgcggccgccgccttcaacggcctcccaaacggcggcggcgcgggcgactcgctgcccgggagcccaagccgcggcctggggcccccgagcccgccggcgccgcctcggggccccgcgggtgaggcgggcgcgtcgccgcccgtgcgccgggtgcgggtggtgaagcaagaggcgggcggcctgggcatcagcatcaagggcggccgcgagaaccggatgccgatcctcatctccaagatcttccccgggctggctgccgaccagagccgggcgctgcggctgggcgacgccatcctgtcggtgaacggcaccgacctgcgccaggccacccacgaccaggccgtgcaggcgctgaagcgcgcgggcaaggaggtgctgctggaggtcaagttcatccgagaagtaacaccatatatcaagaagccatcattagtatcagatctgccgtgggaaggtgcagccccccagtcaccaagctttagtggcagtgaggactctggttcgccaaaacaccagaacagcaccaaggacaggaagatcatccctctcaaaatgtgctttgctgctagaaacctaagcatgccggatctggaaaacagattgatagagctacattctcctgatagcaggaacacgttgatcctacgctgcaaagatacagccacagcacactcctggttcgtagctatccacaccaacataatggctctcctcccacaggtgttggctgaactcaacgccatgcttggggcaaccagtacagcaggaggcagtaaagaggtgaagcatattgcctggctggcagaacaggcaaaactagatggtggaagacagcaatggagacctgtcctcatggctgtgactgagaaggatttgctgctctatgactgtatgccgtggacaagagatgcctgggcgtcaccatgccacagctacccacttgttgccaccaggttggttcattctggctccggatgtcgatccccctcccttggatctgaccttacatttgctaccaggacaggctctcgacagggcattgagatgcatctcttcagggtggagacacatcgggatctgtcatcctggaccaggatacttgttcagggttgccatgctgctgctgagctgatcaaggaagtctctctaggctgcatgttaaatggccaagaggtgaggcttactattcactatgaaaatgggttcaccatctcaagggaaaatggaggctccagcagcatattgtaccgctacccctttgaaaggctgaagatgtctgctgatgatggcatccgaaatctatacttggattttggtggtcccgagggagaactgaccatggacctgcactcttgtccgaagccgattgtatttgtgttgcacacgtttttatcggccaaagtcactcgtatgggactgcttgtatgagcaacaaaaaatcagaaaagagccttgactgtcacaagaaatatttccacctcaaaaaaaaaaaagcacaaaaagaaactctttgctctccttcagcacagtgccttcccaaggacctgcaaataactgctgaaccataaccgtgtttaaagaagagcctacctttcacagtctaccttggccagatattctagcactctaaaaggctccaaaatgaagctgttgatttattctcatttcaaaatatggtttatgagtaattaggtttatttctactgctaaaaagaatggctcattgttttctttttttttcattgttttcatttttagacataatcaaatacccaagcattgttttctttttcttctccctgtaggatttgtgttgtgcttagccttgatctcttgttcagaacaattgtcccttcccaggtgctagcttgcagcagcctgttgcttcctgagcattccagataggtcgtatgtcttggaatttactgtcctcactagctccttccaccataggaagtccttgaattgtatcaccaaagggttgttccatttgccctggatctccctctatctcagcctggccatcacttcccaccttatcccaagctttgccactgtctctaggacttagaacttgtaaatttgatttgccttgccttctacttcctttctagtggtgactgagttgaaaagcaagttggaagccactgcttttaaagaaaagttttgcttggtttaggtttttccaattttatttttgttaggagccaggggataagatttattttaaatgaaaatcctcttcctaggttaagccattttttttattgcttaccaaatgtgcctttggttagggttagtggagctttattagtcactatttgaataactggaaatcactgccatttccaggagatcacctatcctagttttgaggaatagtcattgaggtgggtttccttaatggcatctcttctagtaggcagatctgtttgaacaagataaatcctaaagagccagcctgcttgaggagtagacttggtgggtgaagccagcaattccgcacaaacgtcatgttgaattgttttgggctgcccaaaaacaacaggatgcagcatcctggctgtggcctggccctttgtggcagcagtggcatggacaagcaactgctaattcgagacttactattggcttcacagcacaccctacagtgagcagggtgatgagaccgtggaacagctacctgcttttggttaagattgccagatatcattaggacacagtagcagcaagaatgctgattttgtagtgttagaaaatgaactcagcttgtttttcctaattttgaaggtggtatatatctgcaaacatttaaaatggtataatatcatataaaatgtcaaaattagcacagtccctggatctcaaagaataggtaatattgacttggatgttctttatgctctctgaagaaaggtctagggaaagttcttgtttgcttgattgatcaagagtgccacggaagaatgtgagcgctgtggagggtggaggagggtgtcacttcagatggggcaggcacagggggagaaaagaagagaaaaacacacctgtgtgcaaaatgagctatttggtttcagtgcggcctgaccgatggggaggacccatgagcagagagagttctaggtcaacattgtaactccattgtcctccttcacccataagtcagtcctccttcctcattacagtgaaaccaacaatatgcagaggttggggagagatgcctgttcttcccccagcttcatataattgtcaaagttccaaaaatgaattatctgaactgcttaaaactggaaattaaaatctagacaagaatatgtctttcaagagctttttatgttttgaaagttcataaacctaagattggctccatctgagataaattttcttttctttttttttttgagacggagtctcgttctgtctcccaggctggagtgcagtggcatgatctcggctcactgcaacctccacctcctaggttcaagtgattctcctgagtagctggggttatagctacccaccaccacacccagctaatttttgtatttttagtagaggcaggttttcaccatgttggctaggctggtcttgaactcccgacctcaagtgatccacctgccttggcctcccaaagtgctgggattataggtgtgagcccccgtgcctggcccacaataaattttcatttcagagaaggaaaaaaatctcttgaacgtccagaaatgatttctggaatcagaatttcaatatgtaataccctcaggtaggcaatcttgaaccctctatgcagtgagagcattattaatatgagatgttgaatgatgcctttacagacttcagcagcaaagccatttggttgaggttttctgtgttaatgtgaaaagctaagccactgagatttgcaggggagcttctgagccaccctgcttgttggttatatgaggatgtaaaataggtggaattaaaatgtgagcaggaaaggcaaggcatgtgtgcattttcactcattttggtcaaggttaaactgacatgtatagcactgaggtctgtagggttcttaatatcttttgagtcttgctgtgaaatgaaagtgtgggaggtttcctttgtccattagcagccccaagaaccagaacccttttgctgcttttcttacatacctaacagctctccagtcatgatgaccaaggttgttcttcaatcaaatgtgtttgtgggattttcagtccgcaaatgaagtgctctctaatgaatgggacaccatgataaatatgtatttatatttagatgccaaagtatggcaaattatttccaaatgataactacaaatgggaattttcgatattctaccttttttatagaaccagctcacttttcatttctttttcattttgaattaagaaaattgttgaggatgtggtgggttccagtgtgtggaatggaaaggaaactgcagaatagtgtctgctccccattcagagggactgcttcctgtgccccccagacccggggcttcgacagcttctccacattccacacagatgcctaggagcagcgagttggtatatgaaaagtctcccaccttttctcctaaaacttctctcctttctctccataaaaagaaaaggaaaggaacaaaagaaaaacattcagtttttctttttctgaaaaaggtaagtcctttcctgaagtcatcaaatgaaacattatctggaaattagtttctaatgttgtatatgaagaaatacttaaatataagttcctgcagtatttattagatagttgtaactgtaaactcacctccctagtagataagagtttcaggttaaatactggaacatatataggcagtcaaaaatactactttaaatgtcattcacctattttaaagccatgttttagcactttttaggccaaagaaggtctgatagtgcctgtttttatgttctgtactctcacaaactttgttactcaaaattattgcatggcaggagagattggattatttatttcttatatttttataagtaaaaaaatctttctaaacaacaaatacctaacattattactgattgttttcctaatttatcctcctaagttgaatggtaacaaagcttttccagctgaatgaatgcacttagctgataaaccagaatttgttcttttttttccttcttttttttttgagacaggttctcactctgtcaccgaggttggagtgcagtggtatgatcatagctgactgcagcctcaaccttctgggctcaaatgatcctttcacctcagcctcctgagtagctgggaccacaggtgtgtgccaccacacctggctaatttttatggatttttttttcttttttttttttcgccatgttgcccaggctggtcttgaactcttggcactcaagcagtccttctgcctcagcctcccaaagtgctgggattacagatgtgagccactgcacctggccccagaaattatgcttaaaaaaaaaattaagctgtgtggaatctggacaaggctatgtttctcctagaaacaggttttgctgtaaatggttttgatgggcgaaagtgtgagaaaaggttataatagattcttttttttaattttgtgagaaattccaggtcttcttgcttaacttatatgcatgtggatatatttgttttcaaagccatggaagaatctctgttcatatattttaatgcaaattaccttgtatgctgctatgcaaattctattaaaaggcctacctgcttaagaattaaacatttttgaaactttcagggaagacctgtagactcaagcactttctctgcttttttgtatcttatcttggacacttatgctgaattatgttcttattattttcactggttataagctattccttgtacataatatttaaactatccaaatatccagcatacatttccatgtggctgccatcggctgttgatgccatgaatgaaatggctggttagaaagccaaaggtcttcttttttcaattcctaatgaataagtaaaatgccagatctctttggtctcaaagcaaattgctctgatcagatcaaatatctatgtaatgaaaagagacttacttaaatttgggattctgcttaaactttaagttgaatttgactgtagtcattcattctttttatatatctctgtcaggtatgacattaattaccaggtggtattatactctactttgagtttggacatcactttcagttaaatttctgttgttattgtggcttttttttttttttaaccccactgaagatggaagtagagcagtctgccatctcctgctgttctttctctgtgccccctaattgcttggtaatctaaaattattctgactttccacatactgtctttaaaaaccaattgtagcaatctgcccgcctccaccctttaagctaaatctttcactgtgctggatacatagacactcgataaatgtgtgatgatagttctaaaataattatgctatatatcagggttctgtatttttgagcaatatcattattcctatgctgtgatgttaaatggaatttattttacactagtaatagactgcttaagtggctgatttgaaacctttctctaaaaaaacaaaaacatctggcagatgagtgacacaaattcattctcttaaaggatagaatttcaagttaaggataaggcacaataaataggcacatagaggacatctgtttttgtttttggttttggttttgtttttttttgtctctctgactagctaaactgccaactagaagaatggttgttatgtagtaactcagaagaatcttttaataagtttcttcttttgtttcaaaacaaacttgagcttcatttcttgccacctctattctttcttcccacgttgggtgactgaactgatgcttattctagttttagaagaggatccacatttaatgtaaggcataaatatgccttttgcaaattattgcttgttctccagtgaacatttgatcatattcaacagaaatccaccatataaaccataatccttgaattgccccttttaaaatagattggttaaaaccaaaaacctataagagagaaatgatatttcattgtattgtaggtttgggaatcctggttagatttataatttctggccgggtgcggtggctcatgcctgtattcccagtactttgggagcccaaggtgggtggatcacctgaggtaaggagtttgagaccagcctggccaacatggtgaaaccccatctctactaaaaatacaaaaagttagctgggcatggtggtgcgcgcctgtggtcccagctactcgggaggctgaggtgggagaatcccttgaacccaggaggcagaagttgcagtgagctgagatcatgccattgcactccagcctgggcaacagagcgagacttcatctccaaaaaaagaaaaagaagaaaaagatttataatttctgagtcccctaagtccctttctcagtttgcaataatcttacgtccatgctattgacactaattttgaaactggaaagctaattaatgacatattcatgtgttctttcatctaataaacatttattaatgtatagttctacaccaggcattctgaagggtccaaaagaaagttcctgccctctagtagcacataatccgttatttctcagcacaccatgccatctgtttatcattcagcagttaagtaattcatcacttcatatttttaccaaagtatatttacaagtctgtttatctggatctggcaaactggaaaatgtttgaagggatactcaggctttgatccatgccaacatgaaaggactccaagcacatttaagtaggctggtcttttcatcatgcatgattttttttttagtgcaaatttagactttagtttgggaaagagaacagtatacagtatcctttgtaagataaatcacaacaacaaaaattaagttttattgcacaaagtagataaatgagaaagtctttcttaaaaaatgcttctttaactgtaacagcaaaactaaatgcatattttatcaaccccttatttctaattgctgtattcatttccacccttaaactatttaagcatttcatctgctgaaagtccttatatacatggtagacggaatatttctccattaatgatagatcaaaatgaagatatttaaaaattaacaaaatcaggccaaggcaggaggatcactttagcccaggaggtccagaccagcctgggcaacacagcgggaccccgactccatttaaaaaattaaaaaaaaaaaaaaaacttttaacatttaaaaaataaaaattaacaaaatttcacttattccaggacacgctggcatttggactcaatgaaaagggcacctaaagaaaataaggctgactgaatgttttccataattttcacacaataacagtccctttctatccagcttgccttccatttatctctagggttagcttttcaggcaacatccttggtcattgcccagaaagtacctgagctatcagtgattggaatggcacaggaaaccgaatcacatgggtgccctccccttggttttcaagtatcttggagttgtgcacaaaaattaggtcatgccttcagtgtcttgttctttaaacctaccctttgacaatcaggtgctaatgattgtatactattaaaaccagcacataagtattgtaaatgtgtgttcctcctaggttggaagaaatgtctttccttctatctgggtcctgttaaagcgggtgtcagttgtgtcttttcacctcgatttgtgaattaatagaattggggggagaggaaatgatgatgtcaattaagtttcaggtttggcatgatcatcattctcgatgatattctcactttgtcgcaaatctgcccttatcgtaagaacaagtttcagaattttccctccactatacgactccagtattatgtttacaatccattggatgagtgcagcattataagaccttggtgcccagaaaaatctgtcctttttggtaccaaacctgaggtcttttggaagataatgtagaaaaccactacctattgaaggcctgttttggctaatctgtgcaaactctgatgatacctgcttatgtggattcttttccacactgctttcatttttaagtataaagacttagaaaactagaataatgcttttacaaataattaaaagtatgtgatgttctgggttttttccttctttttagaaccctgtatttaaacaagccttctttttaagtcttgtttgaaatttaagtctcagatcttctggataccaaatcaaaaacccaacgcgtaaaacagggcagtatttgtgttcctaattttaaaaagctttatgtatactctataaatatagatgcataaacaacacttccccttgagtagcacatcaacatacagcattgtacattacaatgaaaatgtgtaacttaagggtattatatatataaatacatatatacctttgtaacctttatactgtaaataaaaaagttgctttagtca

SEQ ID NO: 524 - DNA, 4006 bp, Homo sapiens
tgccaaggctccagcccggccgggctccgaggcgagaggctgcatggagtggccggcgcggctctgcgggctgtgggcgctgctgctctgcgccggcggcgggggcgggggcgggggcgccgcgcctacggaaactcagccacctgtgacaaatttgagtgtctctgttgaaaacctctgcacagtaatatggacatggaatccacccgagggagccagctcaaattgtagtctatggtattttagtcattttggcgacaaacaagataagaaaatagctccggaaactcgtcgttcaatagaagtacccctgaatgagaggatttgtctgcaagtggggtcccagtgtagcaccaatgagagtgagaagcctagcattttggttgaaaaatgcatctcacccccagaaggtgatcctgagtctgctgtgactgagcttcaatgcatttggcacaacctgagctacatgaagtgttcttggctccctggaaggaataccagtcccgacactaactatactctctactattggcacagaagcctggaaaaaattcatcaatgtgaaaacatctttagagaaggccaatactttggttgttcctttgatctgaccaaagtgaaggattccagttttgaacaacacagtgtccaaataatggtcaaggataatgcaggaaaaattaaaccatccttcaatatagtgcctttaacttcccgtgtgaaacctgatcctccacatattaaaaacctctccttccacaatgatgacctatatgtgcaatgggagaatccacagaattttattagcagatgcctattttatgaagtagaagtcaataacagccaaactgagacacataatgttttctacgtccaagaggctaaatgtgagaatccagaatttgagagaaatgtggagaatacatcttgtttcatggtccctggtgttcttcctgatactttgaacacagtcagaataagagtcaaaacaaataagttatgctatgaggatgacaaactctggagtaattggagccaagaaatgagtataggtaagaagcgcaattccacactctacataaccatgttactcattgttccagtcatcgtcgcaggtgcaatcatagtactcctgctttacctaaaaaggctcaagattattatattccctccaattcctgatcctggcaagatttttaaagaaatgtttggagaccagaatgatgatactctgcactggaagaagtacgacatctatgagaagcaaaccaaggaggaaaccgactctgtagtgctgatagaaaacctgaagaaagcctctcagtgatggagataatttatttttaccttcactgtgaccttgagaagattcttcccattctccatttgttatctgggaacttattaaatggaaactgaaactactgcaccatttaaaaacaggcagctcataagagccacaggtctttatgttgagtcgcgcaccgaaaaactaaaaataatgggcgctttggagaagagtgtggagtcattctcattgaattataaaagccagcaggcttcaaactaggggacaaagcaaaaagtgatgatagtggtggagttaatcttatcaagagttgtgacaacttcctgagggatctatacttgctttgtgttctttgtgtcaacatgaacaaattttatttgtaggggaactcatttggggtgcaaatgctaatgtcaaacttgagtcacaaagaacatgtagaaaacaaaatggataaaatctgatatgtattgtttgggatcctattgaaccatgtttgtggctattaaaactcttttaacagtctgggctgggtccggtggctcacgcctgtaatcccagcaatttgggagtccgaggcgggcggatcactcgaggtcaggagttccagaccagcctgaccaaaatggtgaaacctcctctctactaaaactacaaaaattaactgggtgtggtggcgcgtgcctgtaatcccagctactcgggaagctgaggcaggtgaattgtttgaacctgggaggtggaggttgcagtgagcagagatcacaccactgcactctagcctgggtgacagagcaagactctgtctaaaaaacaaaacaaaacaaaacaaaacaaaaaaacctcttaatattctggagtcatcattcccttcgacagcattttcctctgctttgaaagccccagaaatcagtgttggccatgatgacaactacagaaaaaccagaggcagcttctttgccaagacctttcaaagccattttaggctgttaggggcagtggaggtagaatgactccttgggtattagagtttcaaccatgaagtctctaacaatgtattttcttcacctctgctactcaagtagcatttactgtgtctttggtttgtgctaggcccccgggtgtgaagcacagaccccttccaggggtttacagtctatttgagactcctcagttcttgccacttttttttttaatctccaccagtcatttttcagaccttttaactcctcaattccaacactgatttccccttttgcattctccctccttcccttccttgtagccttttgactttcattggaaattaggatgtaaatctgctcaggagacctggaggagcagaggataattagcatctcaggttaagtgtgagtaatctgagaaacaatgactaattcttgcatattttgtaacttccatgtgagggttttcagcattgatatttgtgcattttctaaacagagatgaggtggtatcttcacgtagaacattggtattcgcttgagaaaaaaagaatagttgaacctatttctctttctttacaagatgggtccaggattcctcttttctctgccataaatgattaattaaatagcttttgtgtcttacattggtagccagccagccaaggctctgtttatgcttttggggggcatatattgggttccattctcacctatccacacaacatatccgtatatatcccctctactcttacttcccccaaatttaaagaagtatgggaaatgagaggcatttcccccaccccatttctctcctcacacacagactcatattactggtaggaacttgagaactttatttccaagttgttcaaacatttaccaatcatattaatacaatgatgctatttgcaattcctgctcctaggggaggggagataagaaaccctcactctctacaggtttgggtacaagtggcaacctgcttccatggccgtgtagaagcatggtgccctggcttctctgaggaagctggggttcatgacaatggcagatgtaaagttattcttgaagtcagattgaggctgggagacagccgtagtagatgttctactttgttctgctgttctctagaaagaatatttggttttcctgtataggaatgagattaattcctttccaggtattttataattctgggaagcaaaacccatgcctccccctagccatttttactgttatcctatttagatggccatgaagaggatgctgtgaaattcccaacaaacattgatgctgacagtcatgcagtctgggagtggggaagtgatcttttgttcccatcctcttcttttagcagtaaaatagctgagggaaaagggagggaaaaggaagttatgggaatacctgtggtggttgtgatccctaggtcttgggagctcttggaggtgtctgtatcagtggatttcccatcccctgtgggaaattagtaggctcatttactgttttaggtctagcctatgtggattttttcctaacatacctaagcaaacccagtgtcaggatggtaattcttattctttcgttcagttaagtttttcccttcatctgggcactgaagggatatgtgaaacaatgttaacatttttggtagtcttcaaccagggattgtttctgtttaacttcttataggaaagcttgagtaaaataaatattgtctttttgtatgtca

SEQ ID NO: 525 - DNA, 4062 bp, Homo sapiens
ctggacctgggcaccgccagccgcctgggcacgggactgggcgggggcgctgacctcggcctaggaggcccaggatcccggagacgcccgcgccctcaggaccctgcgggtcgcacgccctccccagcttctgctgctcgccgctcttcggcagggcgaggtcaggtgcccccttctcgcctctcttctcttctcttctcttcctcctccacttctgtgcccgcggagactccggccgcccccttccgcaggggtgtagtaatctgcggagctgacagcagccccgcagccaccctgcccgaagtctccggaagcggcacgagctcaggccgccgcagccccggcggacccactgttggacctgaggagccagccctcctcccgcacccaaacttggagcacttgacctttggctgttggagggggcaggctcgcgggtggctggacagctgcggagccgcgagggcatcttgcctggagaccgtcggctgcactcccgggctcctggctttgcctctgggatcccgaggtgtccacatcagacgcatgttgactgagacctagagtcatggatgtatgcgtccgtcttgccctgtggctcctctggggactcctcctgcaccagggccagagcctcagccatagtcacagtgagaaggcgacaggaaccagctcgggggccaactctgaggagtccactgcagcagagttttgccgaattgacaagcccctgtgtcacagtgaggatgagaaactcagcttcgaggcagtccgtaacatccacaaactgatggacgatgatgccaatggtgatgtggatgtggaagaaagtgatgagttcctgagggaagacctcaattaccatgacccaacagtgaaacacagcaccttccatggtgaggataagctcatcagcgtggaggacctgtggaaggcatggaagtcatcagaagtatacaattggaccgtggatgaggtggtacagtggctgatcacatatgtggagctgcctcagtatgaggagaccttccggaagctgcagctcagtggccatgccatgccaaggctggctgtcaccaacaccaccatgacagggactgtgctgaagatgacagaccggagtcatcggcagaagctgcagctgaaggctctggatacagtgctctttgggcctcctctcttgactcgccataatcacctcaaggacttcatgctggtggtgtctatcgttattggtgtgggcggctgctggtttgcctatatccagaaccgttactccaaggagcacatgaagaagatgatgaaggacttggaggggttacaccgagctgagcagagtctgcatgaccttcaggaaaggctgcacaaggcccaggaggagcaccgcacagtggaggtggagaaggtccatctggaaaagaagctgcgcgatgagatcaaccttgctaagcaggaagcccagcggctgaaggagctgcgggagggtactgagaatgagcggagccgccaaaaatatgctgaggaggagttggagcaggttcgggaggccttgaggaaagcagagaaggagctagaatctcacagctcatggtatgctccagaggcccttcagaagtggctgcagctgacacatgaggtggaggtgcaatattacaacatcaagaagcaaaatgctgagaagcagctgctggtggccaaggagggggctgagaagataaaaaagaagagaaacacactctttggcaccttccacgtggcccacagctcttccctggatgatgtagatcataaaattctaacagctaagcaagcactgagcgaggtgacagcagcattgcgggagcgcctgcaccgctggcaacagatcgagatcctctgtggcttccagattgtcaacaaccctggcatccactcactggtggctgccctcaacatagaccccagctggatgggcagtacacgccccaaccctgctcacttcatcatgactgacgacgtggatgacatggatgaggagattgtgtctcccttgtccatgcagtcccctagcctgcagagcagtgttcggcagcgcctgacggagccacagcatggcctgggatctcagagggatttgacccattccgattcggagtcctccctccacatgagtgaccgccagcgtgtggcccccaaacctcctcagatgagccgtgctgcagacgaggctctcaatgccatgacttccaatggcagccaccggctgatcgagggggtccacccagggtctctggtggagaaactgcctgacagccctgccctggccaagaaggcattactggcgctgaaccatgggctggacaaggcccacagcctgatggagctgagcccctcagccccacctggtggctctccacatttggattcttcccgttctcacagccccagctccccagacccagacacaccatctccagttggggacagccgagccctgcaagccagccgaaacacacgcattccccacctggctggcaagaaggctgtggctgaggaggataatggctctattggcgaggaaacagactccagcccaggccggaagaagtttcccctcaaaatctttaagaagcctcttaagaagtaggcaggatggggtggcagtaaagggacagcttgtccttccctgggtgttctgtctctccttccctcccttccttcaagataactggccccaagagtggggcatgggaagggctggtccaggggtctgggcactgtacatacctgccccctcatccttgggtccttcattattatttattaactgaccaccatggcctgcctgccctgcctccgtcccaaccatgggctgctgctgtcactccctctccacttcagtgcatgtcttagttgctgttccctcagctcccagctccacctctggggttcagcttctgtctctgctgtcccagttttgaggtttggtttcttgtttctgtctcttgctttcgggctcctccctcccaccactccccaacttcccctagcagttgcagggaagataggacgagtagcttctgacatgtgtgcctcagatctgttccaccccactcacagtggttctgtttgctccagactggggctagggcctaatctttgaagtttgttctttggtattgatgtgggtcagaaggagcctcatcctaatctcactcaggcctccagggatccatgggggagtgaaaccaattctcagagaacaacccaccagagacttttaaagagaggccaggcttgggaatgggttgggagaggcatctgttcattggagcatgagtggatgccagaactgtaggttataaggcagtcactttttctctctactcccacccacacctgcctccctcttacccctgctcccccacactgcaggaggatttgtctctaagaggtgctgccccaaagctccccaagcatcaatactcctagggctcaggacaagtggctcccctggccaggagagccacagccatgatacagggctcttatggagccctggagttgttgggcaaggatgctgtcattttttgaaccaaaagacaaacaggttaaaaggaaaaaaagtaatctgaatttcccaagtgcctacgctgcatattccccttgttagatcccattttcatgttactttgtagccttggccagaggctcaaaaaggacacaaccagtttggggaaggggtggctaaggaagatggtataggtgaaggcggctgtgtgaccactttcccccacccttcccaccctctagacaactctctcccttacctgtttttgctatggctgtaaaggtatttttcctctgccccactccctgccatacctttatcctgggatcctattttgggcctggggtgggtatacctggggctggtcttaggagggtgctaggctgcagactgccttgtactccctggacaccctcaaatggggttttctgtgttatttcataaaattctttgaagtccaataaagcatgtaggagattttaaccactaaaaaaaaaaaaaaaaaaaaaaaa

SEQ ID NO: 526 - DNA, 5262 bp, Homo sapiens
gcgccatattgaagaggacgggtctaatagatcgctggagacacaatttaactgaaccccgcccgttgtggactgactttgatgctctgagtccctccctccttcacgccgctagcaggccctgatgtagattgcctttgtcttacttgggacgtttacctgagcgcttggtgctggtgtcgggaccgggagataggagtgtctcaggagagacctggccgaaaaccgcgagaaagaaaagtgaagcctagtgaaactgcctttgcagtgactcaagaaaaactcatcacctggagtccgtgtaagctcggcgacagccctagcagcgaggccaaaacagtttgggaagaaagaaaacctaaagtatttgccgttggtgattcaagggaatcaaacttgacgtatggagccaagaaagcccttggaaaaactggcctcatattttgtgtacacagtccctgtacagggtttctgacctgtgagtcactgaaaactaagctgcgctttcctaaagtcctgcgaactgaagccagacaacttaaacctcagaagaaaataacagcaacctatttatatacataagccactttcatacctgcctactgttgtatagacttcagagtaatgtggcctgtatcgattttccaggagtattcttttgtgtgttgttttttctcaattcctcctattttctctttacaggatgtgagacttcacaacctgctaaaaatgagctttcaggacctacccatataggaataaaccatcctagccatgagagatcagatgaaacctgagaccagagagactcatttgtttcaaaatagtttctccaaaagattttataaaagaaaaggctggggggagtgggatatgaaaggaaaatgaatcttggggcccccaaatcactaagctcaagggataagtcaagttagaaactgttcagggccaacttaccttgcattctattcaaattcacccctctgctcacttagatgcatatctgattgtaatcagaaactcaaaagaatgcagcagtttgtctctcacctatctatgacctggaagcccccttccccgtttgagtcttcctgcctttgcttcactttatccctgcctttctagactgaaccaacatacttcttagatatattgattgatgtctcatgtctccctaaaatgtataaaactaagctgggccccaaccaccttgggcacatgtcgttaggacttcctgagactgtgtcacaagtttgtgtccacaactttgacaaaataaactttttaaattaactgagacctgtcctaaatttttagggttccatcagatatgcatttctctcacctgagcatcagagggatgatttcgagttctctgtgttttttgtccacaggaatttccttgtgggcaaattctgagggagggatgtagcttttttatgtttggagctattttatttagaaataaaatgggaggcaggtttgcctgagtcagttgcctgcttgacttcctttggcttagtcattttggagtcctgagatttattttcttttcacatacctgttttatttatgatggtttatggtcattgaaccttgtaacattgattacatttcttttcactggtcttttttcttaagtagataaacttatttttaacttgggcacaagagagcataaaaattatatgaggtacatagcctgcttaaatagaatatttaaaatacgttttgtccacagagctggaattctttgtaaatgaaaaccaaattttacttaatttttagagatgggatcttggctttgtcgcctaggctagagtgctgtgggggcaatcatagcccactgcaacctcgaattcctggcttaagtgatcctcccatctcagcctcctgggtgcttggacaacagacatgacaccttacctggctagttaaaaaaaattttttttgtagagatgggctttgcctgtgtggcccaggctgctcttgaactcctaggttcaagtgatcctccagcttgggccttccgaagtgctgggattacattgcttccagctttagttttttaaatgtttaacttgtttaacttatttaacttgctgtttattatttaatggagagcttttagtgtttgtcttttgaggtgggatcttgccatgcccagactagccttgaagtcctacagtcaagtgatctttgcatctcagtctcccaagaagtagtggtagagaatttttatgttacattcctttctctgtgtatatgtttgtgggaggacatatgtccctttgtatgtttgggcatatatattttttgtgtgaaagttatgcatgttattgttgatcaatacaagaggtttagaggccagagaagagaaataaaatgggaaaaactacaaacattctacctcccatgataccatgctataatggcaatcataatatttatgtattttttacttttttgtgttcatttttaaaaattagataaaaatagtttaagctagaggcttctctctttcatctttttttttctaatttaagttttccctaagtaggaattttggtaatacttcattatattgatgtatcaagatttctttagtttctcctttgttgtctttaggttgtctacaatattttttgtcattgtgaatatgctgtcatgaacattttgatgctgattattaccagattagtgtgttgtgtcaaagttttcatcagttggattatttttcagtttagtaagtgatgcaagccaaaactaaaactctaaggcaccttctccccacccaaccagtcatctgagtagacttcctcctcagccagggcagtcatagcccactgcaaccagccagcccctttccattccagtatccctttccctttaataaaatttaaggccaaacatggtggttcaatgcctgtaatgccagcactttgggaggctgaggtgggcggatcatgaggtcaggagataaagaccattctgggaaacatggtgaaacactgtctctactaaaagtataaaaattagctggatgtggtggcatgtggctgtggtctcagctactcgggaggctgctgaggcaggagaatcgcttgaacctggggaggcagaggttgcagtgagcagagatcatgccactacactttagtctggtgacagaatgagactccatctcaaaaaaaaaaaaatgatttgtgagatgaatttgttttgaaaatattagcttgttttcagttgtgatacatttgaagttggtacagagtccattttcttttatgtgttaatgtattgacaatatagttgtgttgacaacttcttttcttatttccagttcagtctttacagaagctgacgagagatttccttgtattttatggtggtatgattggccttagagcacttcagttttgagatctctgctgtatttgtatacaagtattttggaaggtcagttgataggatgaatgaaaaacaaaaattggaagtaatggtactagtaataagtggggattttcatgtaggtaaaggaactgataagtcatagggaatccgtgagttcttaatcttactgagtttagttgtgttctttgattattttggatagctttgtttaacggtgaatgaaatgattaaaatggaaaaattaagtgcagaaaatatgtttaacattatataggatgtcttgttttaggcatttattgctagataacatatgtccattcttgtattgctataaagaaatattggatactggctaatttataaataaaagagatttattggctcatgattctgcaggctgtacaggaaatatgattctggaatccgcttggcttctggaaaggcctcaggaaacttagaatgatgacacaaggcagaggggaagcaggcacatcttacatggcaggagcagggagcaagaaagagtgaagcgggaggtgctacacacttttaataatccagatctgagtcaggcatagcagcttatgcctataatcccagcacttttgggaggccaaggcaggcagatcacctgagggtcaggagttcaaggccagcctggccaacatggtgaaacctcatgtctactaaaagtacaaaaattagctgggtgtggttgcacctgcttataatcccagctgctcaggaggctgaggcaggagaattgcttgaacccgggaggcagatgtttcagtgaaccaagattgcaccactgcactccagcctgggtgaacagagtaagactctgccttaaaagtaaaataaaattaaattaaaattaaaaaccagatcttgcaagaactcactgtcagaagaacagcaccaagggtatggtgctgaaccattcatgaaggagccatcctcaagatccagtcatctcataccaggtccacctccatctaatattgggaattacaattcatcatgagggttggtggagacatggatccaagccatgtcacatattatcctgactgtagtggtttaagataacaatttttatctcacaatttattttgaatacaggcatgatttagctgtgtcctttggttcagtatctcttcaaagctgtaatcaggtttttcatgtgtttgtcatcaactgaaagattgactgagtatggttctgagatctctcaggtgattattggcagaattaagttccttttcgattcttggtcttatttcttcacccatctactatagtgcattcttgccatgcagccctttttatggagcaagtcacaatacagcagcttgcttcattagggcaagcaagcaagacaagctgcagcaaatgcaagtaacatggaagtctttataatctaatcatggaattgacatagttaaaaacaaatcattaggtaggctccaaattgatcagaacatggttattggacaaaaccatgactgtcaggaggctgcatcatggggagccattttacaagcagcaccatgggtgttatgggggattttattacatttgttctgctcttaagagttgaaagtctttaaaaatgtgtaagtctgtcgtttgttcttgacttctgtcatgttttcaagaatgcattatgcaatgatgtagaatactgtttgtaaagtagttgtctagactctagtgaaaataattacagataatctcagttcatcaacgaatcggtatattaatgtcatatttaacagttataggaataaactaagcataataataaatgatgatttgaatgttaaaaaaaaaaaaaaaaaaaaa

SEQ ID NO: 527 - DNA, 2193 bp, Homo sapiens
aagtgtggccacttcctcttgcctgtcctgactcaccctggctgctgcccattgtggctgccatggaaatacaactcgaggagaacccagaccaggacagggaggccatgttctgggtggcagtggagcctggcaaggtgccctcctggcctgggactgctgtggcagaggaagcatgaggtggggcctggcctgcccagctcagagctgaggtgcccccttggttttttacctccctgctccctggctggcccactgcacccacgcactcaacgcagtggcttcgctcctcctccaggatggctggaggtgggaccattgccaggatggcctcaagtgcccagccctcctggaagactcagtttccctctttgtcccatgcagaggtgcagagattcattattgtgggaccatccgtgaaaccggtgccaggatgcaccgggggtgtggatgaccggccgcccagccccagcacggcccggtcccgcatgccaccgccccgcgaggaccgctctccaagggctgcctggggccccgcgcccgtactctcctaacccggagctcttggcagcccattgctgcctggctacccggggaggaggaggcgcaggagtgagctgcccgagaccgcagggcaagtaagcggctgacggcggaaagaccctggggaaggggctttgcggccggctagaaacattttccccaagcggctccgcaaaatgaccagcctgttccgccggagcagcagcggcagcggcgggggtggcaccgccggggcacgcgggggcgggggaggcacggccgccccccaggagctcaacaacagccggcctgcccgccaggtgcgccgcctggagttcaaccaggccatggacgacttcaagaccatgttccccaacatggattacgacatcatcgaatgcgtgctgcgcgccaacagcggcgctgtggacgccaccatcgaccagctgctgcagatgaacctggagggcggtggcagcagcggcggcgtctatgaggacagctccgactcggaggacagcatccccccggagatcttggaaaggactttggaacctgatagctcggatgaagagcccccacctgtgtactccccgccagcctaccacatgcacgtgttcgaccgaccctaccctctggctcccccgactccgcctccccgtatcgacgcgctgggctctggagcccctacaagccagagacgctatcggaactggaacccaccactgctgggcaaccttccggatgactttctccgcatcctgccccagcagctggacagcatacagggtaacgctgggggccccaagcctgggagtggagagggatgtccacctgccatggctgggccagggcccggagaccaggagagccgctggaagcagtacctggaggacgagaggatcgcgcttttcctgcagaacgaggagttcatgaaggaactgcaacggaaccgcgacttcctcctcgctctggagagagatcgattgaaatacgaatcccagaaatctaaatccagcagcgtggctgtcggaaacgactttggcttttcctctcctgtcccaggaactggcgacgccaaccccgctgtgtctgaagatgccttattcagggacaagctgaaacacatgggaaagtccacccggaggaaactgtttgaacttgcccgagccttctcagagaagaccaaaatgaggaagtcaaagaggaaacacttgttgaagcatcagtcgctgggggctgccgcgtcaacagccaacctcctggatgatgtggagggccacgcgtgtgatgaagacttccggggcaggcgtcaggaggcacccaaggtggaggaaggcctgcgagaaggacagtaagagatgccagcagctcttccttgccagagatgatctgacccggtgggggcagctggaaagcaacactggcccccagctgaagggcccagctgcagccagacagatggtgcttgagaaccgaggcccggtgatcctccagccacagtccagcccaaccactgccactttccatgggacttagaacttcggagttgctgccttgcaattggaggaaggacctggggcccctataggcagcagccaattacagccccttttgtagccgggcgttcctatggtcaaagagtggaaatgcaggaaccaacctcccttt

SEQ ID NO: 528 - DNA, 2288 bp, Homo sapiens
cctaaagggatccgccccgccgagtcagccacgccttcgtctcccacgcgctgcgcccggccgcgccgtcacccagcagcggcgcagggcaccatgggaaacggacggaagctccattgagccaaataagttggccacgtggggcggaacggaaacctcgcagggtcagaccgtagcgacgcgggaagtccggacgcagtagctccctgaagcggaggcgaaggggagtttaagccccagcggcggcaatggcggagaggcccgaggacctaaacctgcccaatgccgtgatcaccaggatcatcaaggaggcgctcccggacggtgtcaacatctccaaggaggcccggagcgccatctcccgcgccgccagcgtcttcgtgctgtacgccacatcctgtgctaacaactttgcaatgaaaggaaagcggaagacgctgaatgccagtgatgtgctctcagccatggaagagatggagttccagcggttcgttaccccattgaaagaagctctggaagcatataggcgggagcagaaaggcaagaaggaggcctcagagcaaaagaagaaggacaaagacaaaaaaacagactcggaagagcaagacaagagcagggatgaggacaatgatgaagacgaagaaaggctggaagaagaagaacagaatgaagaggaagaagtagacaactgaaaagggcgggagactgtggcaccttggaaggtaccacttgaaatgagacgtgctacgtgtttctgtgaagcttttccatgctgggcagagtagtctcaggcaaaagtgcctgaaaagatcagaataaaaactgactagaaataccgtcaaaaccagcacttaccaaactcagagcatctgagtagcagaatcctgttttgcttcatcaatctgaaggttatggccttttgacaagagggattctgaacgactaaattagtcagtttgctcgcttttgtttacttaaatgtatggttagatggtttttgatctgcagtcttccctagtcccccaaataagtaataataacttccatgctgcctgctgtgttccagatcacagaggcagccaaggctcaggaaaaactggggctttgcttatggtcagcctatgtttgattgcacagtctttgacaatagtagcttactaagactgctcagaatgagtaagctttaggaaactactaaaatgctgtgggagaataacaaaatccgttctctctcttcacttgacagaagcattaactgaattttgtttttcatagacccacttggcccaaaacctttctatattgcctgtagatgatcggcctgctggtgtggtagtaatctgatcacagatattcttaaatcagcagtgtggaatggtattagtcaaacatggtgccagtgtcttttacaaaaacagatggcatagtgtcagatgtaccttactctctgctactgtacagctttaggatttgtcatcacctcccggaaggtgtaaaaccccaggcttcctcttcttgtagtccatctcccagacttgtgactatggcttttcattcttcaattcatgacgagtgccaaacttgattttctctaggcacagctttctccctctgtgcctcctgcttcctttctctctcctgcctctcctctgctccccatcccactttctcatctgcctccttttctcacttctgtcagtctgtaagctttgataacctgcttaatactccaaagtgtgagttcctctgatctcttgattccttagttctaatctcacgttttgtttttaagagatggagtctctcactctgtggcccaggctggagtgcagtggcatgatcatagctcattgcatccttgaaatcctgggctcaggtgatcctcccgcctgagcctcctgagtatctgggactacagatgcgtgccaccaagcctggctaattttgtctcatgtcttctaaaaattattttgtgaagccccttcacaaaaaaccttaagggaaatctgatggtgctcaggaatctaactctccctaaaccatcctctttaactgcttctaaaatatctctgttggcctttcttagcctttttctgtttccattcagtgctccaagcgctttttgtttctaagttgagtgcttggggtttgacaggtagtgacgtgtagtttgacactgttaacttgttaaatacagtgaaaagtttgtgagtgaagaatgctgagaagattgtaatgctttgtacaaataaaagtcttgttaaaaaaaaaaaaaaaaaaaaaaaaaa

SEQ ID NO: 529 - DNA, 3968 bp, Homo sapiens
aggccccgccgccgccgccgctgctgacccggcggccggccgccgttccgccccctcccgtggcggcgagcgggcgggcctccccacacgcccccgccgcccgcgccccgcgtccacccgcgccccgctcccggggactgggagaacaggatagcagcaggagtcggggggccgccgaagatggggaacactacctcgtgctgcgtgtcgtccagtcccaagctccggaggaatgcccactcccggctggagtcctaccggccagacacggacctgagccgcgaggacacgggctgcaacctgcagcacatcagcgaccgggagaacatagacgatttgaacatggaattcaatccttcagatcatcctcgggccagcacaatattcctcagtaaatctcagacggacgtgagagaaaaacgcaagagtctcttcattaaccatcatcctccaggacaaatagcaaggaaatacagttcctgctccaccattttcctagatgatagcacagtcagtcaaccaaacctcaagtatacaattaaatgtgtcgctcttgcaatatattatcacatcaaaaacagggacccagatggaaggatgctcttagatatttttgatgaaaatcttcaccctctttcgaaatccgaagtgccaccagattatgacaaacacaacccagagcagaagcagatttaccggttcgttcggacactgttcagtgctgctcagctgacggctgaatgtgccatcgtcaccctggtgtaccttgaaagacttttaacatacgcagagatagatatctgtccggccaactggaagcggattgttttaggggcgatcctgctggcctccaaggtgtgggatgaccaggctgtatggaatgtggattactgccagatcctgaaagacatcacggtggaggacatgaacgagctagagcgacagtttcttgaattgctgcagttcaacatcaatgttccttccagtgtctatgccaagtattattttgatcttcgttctctggcagaagcgaacaacctgagctttcccttggagcccctgagcagggagagggctcacaagcttgaggccatctctcgcctctgcgaggacaagtacaaggacctaagaagatccgcgaggaagcgctcagccagtgcagacaacctgactctgccccggtggtccccagccatcatctcttaactacggaggcccgccggaggccacaccatcccttagtttctcctttagtttgagaaaagacagacttggggtgggtttgtttttgttttttctttccttttctttttttacgcatagctccgtcaagctgcctggatgagcgcccatgcagcaaggcttggaggaagcgtcagtgccctggagatcccagctcgctctccccactgtcagcaacagcacttccttcgtggaggaagtggactcgaatcctggaggaggaaataaagggaaagggaagtcgtggagaggcagggaaaatggttaagcagcccggccctctggagtccccatgggggcggtagctgaagttggcgagcgcagcggtggatgcagagctggctgcacccagggctgggccagtgtgtcctgtaagacttcttgcattccttctgctgcttttttgggatgggggtatttttgttcatttgtttttgccctgttttgattttggtcccacagagcaggggatgtagtttgtacccaccatggcgcagacttccaaataaatagtactggtcatttctctctgcactatttctgcgcgctgtcttctgagctttcttcctcaccagtgggctgtgcttgttccatttctgtacacccttattttataccgtttttcttcaacaatggcgaaattgactgtagtgctgaaccaaaagtatccctttccctccttattcctcaccccaagaacattctagatcacatgggtgcttgtgccttccgattttcttgcatttgtttttttcctgacctgaagttgttgttacaaaatcagtcagactttgtgggctgaaggacacggtgcagcagagggtgtccctgtgagagttctgcagagtgctgggcatgtgcctggaactaccgagtaggagccatttctttgtacccctgcctaatccattcctctccttccaagtccattgttgcaagcaatattcttctcaatttttatatgtttactttaaatcaaagttagtctatttgtataaaatttttaaaaaatctaaaagaaaaagaaaaaaaacaagggtgggttgggtattccagtgggaagatcattgaagggaaaaatgttactatttactgaggtatttttcacagaatgattgaattaaaaaaaactcaacttgcattttcattgtgggtgcttagagaagttctacaaaattcaaactgtgaaggtttatgcttcattaattatgaccatactttttcattttctgacgatccctgatttccttatggactcaataagaatcttttatatcaagtaaaatgaaagttgatgatagaatatcaaatagtgaatttgatatgaaatctaagagtgtgagtcacttgcatatgtaatgctttgggtttttgcatattttcttaggtcacagtgacaggtttctgagttgtttcccttttcaagtctctgggaggccagtggcagcagcaggtctgtgtttcaccttcttcccatgtgagcttggaaaactttggcatcttaattagtcttgaatcatacacctgatccccaaacattgcctgctctcaatgaaacatgctttggaaatggaagggactcagaaagtcgaaatcccaagaactccaagccaaaagtgttaggttttagtgaaatttgtgtcaggtataagcatacctgtttgggccagaattattatcacagcctttctgacccaaactttcaaaagcaaataaacagcatataaaacgttaattatctttccattgtaattgtgatgatctactctgtatgggtaccaaaatcaccttctctcttcaagtcaaagttgaatttagaactttgaatacaggtcaaaaaatgtagaaaatatcattttatattccctaatctatatagctgaaaaagggttgtattttcttagctgaatatgaatacctcttaaacataaattagttcctctccagtgaagtatcttattttaccaatccatttcaggaaagaggttctgctgccgtaaaggcagaaattttatttttatcccttttatttgaatgagagatttgaaaatcgaattatgtaaatatttcaatgcatctgctattattttgtggagtttattaaactactttaaaaaaattgtatagtctatttattgtatgtatgtacatacagtctgatacctaaaatttaaagtggattccataaaaccagactcaagtcttgtttagactactgaatactgttttagcctgtgccctggattctacctctgtataggaaaattttccatattcattaattagtgttgatctgtattaattggttatgtttcttgcactaaggatgtttaaaactccgctgtaagtgtagattttagttttactggcaggatgaatcacttgacacataggtagatacttgaggttcattttcttttctttttctacatgatgatgaatagttatgttttcttctctgatttgttcaaagtttgccaaaagaaaacacaaaaccagtacagtacttactgataaatcgtagtgactgtaatttgtttgtaaggcgaattaatgctctacaattaaagctggattactattgaggaacacattgtcttagtgtagtttttgaatggaaagtttttgtcattaaggatgaaggaaacgacacaatttgttactttaattttatatttgatttaaacaacaaataaagtcattgggacaataaaaaaaaaaaaaaa

SEQ ID NO: 530 - DNA, 2770 bp, Homo sapiens
gaccggggtcggggcagggggcggggccgagcgggagaccagagagccggagccggatcccgatcccgagtccgagccgccgccgccatgagctgccccgtgcccgcctgctgcgcgctgctgctagtcctggggctctgccgggcgcgtccccggaacgcactgctgctcctcgcggatgacggaggctttgagagtggcgcgtacaacaacagcgccatcgccaccccgcacctggacgccttggcccgccgcagcctcctctttcgcaatgccttcacctcggtcagcagctgctctcccagccgcgccagcctcctcactggcctgccccagcatcagaatgggatgtacgggctgcaccaggacgtgcaccacttcaactccttcgacaaggtgcggagcctgccgctgctgctcagccaagctggtgtgcgcacaggcatcatcgggaagaagcacgtggggccggagaccgtgtacccgtttgactttgcgtacacggaggagaatggctccgtcctccaggtggggcggaacatcactagaattaagctgctcgtccggaaattcctgcagactcaggatgaccggcctttcttcctctacgtcgccttccacgacccccaccgctgtgggcactcccagccccagtacggaaccttctgtgagaagtttggcaacggagagagcggcatgggtcgtatcccagactggaccccccaggcctacgacccactggacgtgctggtgccttacttcgtccccaacaccccggcagcccgagccgacctggccgctcagtacaccaccgtcggccgcatggaccaaggagttggactggtgctccaggagctgcgtgacgccggtgtcctgaacgacacactggtgatcttcacgtccgacaacgggatccccttccccagcggcaggaccaacctgtactggccgggcactgctgaacccttactggtgtcatccccggagcacccaaaacgctggggccaagtcagcgaggcctacgtgagcctcctagacctcacgcccaccatcttggattggttctcgatcccgtaccccagctacgccatctttggctcgaagaccatccacctcactggccggtccctcctgccggcgctggaggccgagcccctctgggccaccgtctttggcagccagagccaccacgaggtcaccatgtcctaccccatgcgctccgtgcagcaccggcacttccgcctcgtgcacaacctcaacttcaagatgccctttcccatcgaccaggacttctacgtctcacccaccttccaggacctcctgaaccgcaccacagctggtcagcccacgggctggtacaaggacctccgtcattactactaccgggcgcgctgggagctctacgaccggagccgggacccccacgagacccagaacctggccaccgacccgcgctttgctcagcttctggagatgcttcgggaccagctggccaagtggcagtgggagacccacgacccctgggtgtgcgcccccgacggcgtcctggaggagaagctctctccccagtgccagcccctccacaatgagctgtgaccatcccaggaggcctgtgcacacatcccaggcatgtcccagacacatcccacacgtgtccgtgtggccggccagcctggggagtagtggcaacagcccttccgtccacactcccatccaaggagggttcttccttcctgtggggtcactcttgccattgcctggagggggaccagagcatgtgaccagagcatgtgcccagcccctccaccaccaggggcactgccgtcatggcaggggacacagttgtccttgtgtctgaaccatgtcccagcacgggaattctagacatacgtggtctgcggacagggcagcgcccccagcccatgacaagggagtcttgttttctggcttggtttggggacctgcaaatgggaggcctgaggccctcttcaggctttggcagccacagatacttctgaacccttcacagagagcaggcaggggcttcggtgccgcgtgggcagtacgcaggtcccaccgacactcacctgggagcacggcgcctggctcttaccagcgtctggcctagaggaagcctttgagcgacctttgggcaggtttctgcttcttctgttttgccccatggtcaagtccctgttccccaggcaggtttcagctgattggcagcaggctccctgagtgatgagcttgaacctgtggtgtttctgggcagaagcttatcttttttgagagtgtccgaagatgaaggcatggcgatgcccgtcctctggcttgggttaattcttcggtgacactggcattgctgggtggtgatgcccgtcctctggcttgggttaattcttcggtgacactggcgttgctgggtggcaatgcccatcctctgccttgggttaattcttcggtgacactggcgttgctgggtggcgatgcccgtcctctggcttgggttaattcttggatgacgtcggcgttgctgggagaatgtgccgttcctgccctgcctccacccacctcgggagcagaagcccggcctggacacccctcggcctggacacccctcgaaggagagggcgcttccttgagtaggtgggctccccttgcccttccctccctatcactccatactggggtgggctggaggaggccacaggccagctattgtaaaagctttttattttagtaaaatatacagaagttctttttctgaaaa

SEQ ID NO: 531 - DNA, 1317 bp, Homo sapiens
cccctcctccctccttgcagagccggcgccggaggagacgcacgcagctgactttgtcttctccgcacgactgttacagaggtctccagagccttctctctcctgtgcaaaatggcaactcttaaggaaaaactcattgcaccagttgcggaagaagaggcaacagttccaaacaataagatcactgtagtgggtgttggacaagttggtatggcgtgtgctatcagcattctgggaaagtctctggctgatgaacttgctcttgtggatgttttggaagataagcttaaaggagaaatgatggatctgcagcatgggagcttatttcttcagacacctaaaattgtggcagataaagattattctgtgaccgccaattctaagattgtagtggtaactgcaggagtccgtcagcaagaaggggagagtcggctcaatctggtgcagagaaatgttaatgtcttcaaattcattattcctcagatcgtcaagtacagtcctgattgcatcataattgtggtttccaacccagtggacattcttacgtatgttacctggaaactaagtggattacccaaacaccgcgtgattggaagtggatgtaatctggattctgctagatttcgctaccttatggctgaaaaacttggcattcatcccagcagctgccatggatggattttgggggaacatggcgactcaagtgtggctgtgtggagtggtgtgaatgtggcaggtgtttctctccaggaattgaatccagaaatgggaactgacaatgatagtgaaaattggaaggaagtgcataagatggtggttgaaagtgcctatgaagtcatcaagctaaaaggatataccaactgggctattggattaagtgtggctgatcttattgaatccatgttgaaaaatctatccaggattcatcccgtgtcaacaatggtaaaggggatgtatggcattgagaatgaagtcttcctgagccttccatgtatcctcaatgcccggggattaaccagcgttatcaaccagaagctaaaggatgatgaggttgctcagctcaagaaaagtgcagataccctgtgggacatccagaaggacctaaaagacctgtgactagtgagctctaggctgtagaaatttaaaaactacaatgtgattaactcgagcctttagttttcatccatgtacatggatcacagtttgctttgatcttcttcaatatgtgaatttgggctcacagaatcaaagcctatgcttggtttaatgcttgcaatctgagctcttgaacaaataaaattaactattgtagtgtgc

SEQ ID NO: 532 - DNA, 2010 bp, Homo sapiens; identical to SEQ ID NO: 388

SEQ ID NO: 533 - DNA, 1779 bp, Homo sapiens
gtgactgggtggggctgcctcacttctgcctgatttgggaagcgctgcaaggacaaccggctggggtccttgcgcgccgcggctcagggaggagcaccgactgcgccgcgtaagtgccgcctgccctgcgtgggtcgtgccagctcagcgggacaggtcctcgcctcggtccctcggacttagggagcgcggggcagaccctgagagatggttggtgccatgtggaaggtgattgtttcgctggtcctgttgatgcctggcccctgtgatgggctgtttcgctccctatacagaagtgtttccatgccacctaagggagactcaggacagccattatttctcaccccttacattgaagctgggaagatccaaaaaggaagagaattgagtttggtcggccctttcccaggactgaacatgaagagttatgccggcttcctcaccgtgaataagacttacaacagcaacctcttcttctggttcttcccagctcagatacagccagaagatgccccagtagttctctggctacagggtgggccgggaggttcatccatgtttggactctttgtggaacatgggccttatgttgtcacaagtaacatgaccttgcgtgacagagacttcccctggaccacaacgctctccatgctttacattgacaatccagtgggcacaggcttcagttttactgatgatacccacggatatgcagtcaatgaggacgatgtagcacgggatttatacagtgcactaattcagtttttccagatatttcctgaatataaaaataatgacttttatgtcactggggagtcttatgcagggaaatatgtgccagccattgcacacctcatccattccctcaaccctgtgagagaggtgaagatcaacctgaacggaattgctattggagatggatattctgatcccgaatcaattatagggggctatgcagaattcctgtaccaaattggcttgttggatgagaagcaaaaaaagtacttccagaagcagtgccatgaatgcatagaacacatcaggaagcagaactggtttgaggcctttgaaatactggataaactactagatggcgacttaacaagtgatccttcttacttccagaatgttacaggatgtagtaattactataactttttgcggtgcacggaacctgaggatcagctttactatgtgaaatttttgtcactcccagaggtgagacaagccatccacgtggggaatcagacttttaatgatggaactatagttgaaaagtacttgcgagaagatacagtacagtcagttaagccatggttaactgaaatcatgaataattataaggttctgatctacaatggccaactggacatcatcgtggcagctgccctgacagagcgctccttgatgggcatggactggaaaggatcccaggaatacaagaaggcagaaaaaaaagtttggaagatctttaaatctgacagtgaagtggctggttacatccggcaagcgggtgacttccatcaggtaattattcgaggtggaggacatattttaccctatgaccagcctctgagagcttttgacatgattaatcgattcatttatggaaaaggatgggatccttatgttggataaactaccttcccaaaagagaacatcagaggttttcattgctgaaaagaaaatcgtaaaaacagaaaatgtcataggaataaaaaaattatcttttcatatctgcaagatttttttcatcaataaaaattatccttgaaacaa

SEQ ID NO: 534 - DNA, 7666 bp, Homo sapiens
ggtcccctacccccacctactcgcccgccccctccggggccacccggggactctgaccccccggcctggcgccgcctgacggagcgggagtggctcgctccgggccggccggcgccggggatgaggctgcccggacgggtctaggggcgcgcgaggggccgagcatcccactcagctcgccggccccggcccccgcctcccccgctcctcccgcctggccgccccggcccgccgtgacccacggccgcctccggagcccgacgcgcagggcatatacttctcttgtcttggttggatgcacaaatctgtgtgcagtgctttttgcccgttgcctagacgatcacttggtttctctgaggatgtctggttctcgtaaagagtttgatgtgaaacagattttgaaaatcagatggaggtggtttggtcatcaagcatcatctcctaattctacagttgacagccagcagggagaattttggaaccgaggacagactggagcaaacggtgggagaaagtttttagatccatgtagcctacaattgcctttggcttcaattggttaccgaaggtccagccaactggattttcagaattcaccttcttggccaatggcatccacctctgaagtccctgcatttgagtttacagcagaagattgtggcggtgcacattggctggatagaccagaagtggatgatggcactagtgaagaagaaaatgaatctgattccagttcatgcaggacttccaatagtagtcagacattatcatcctgtcatactatggagccatgtacatcagatgaatttttccaagcccttaatcatgccgagcaaacatttaaaaaaatggaaaactatttgagacataaacagttgtgtgatgtaattttagtcgctggtgatcgcagaattccagctcacagattggtgctctcctctgtctcagactattttgctgccatgtttactaatgatgtcagagaggcaagacaagaagaaataaaaatggaaggtgtagaaccaaattcgttgtggtccttgatccagtatgcttatacaggccgccttgaattaaaagaagataatattgagtgcctgttatctacagcttgccttcttcagctttcacaggttgtagaagcatgctgtaagtttttaatgaaacagcttcatccatccaactgtcttggaattcgttcttttgctgatgcccaaggttgtacagatttgcataaagtggctcacaattatactatggagcatttcatggaagtaatcagaaaccaggaatttgtattattaccagccagcgaaattgcaaagctcttggctagtgatgacatgaacattcctaatgaggagacaatattgaatgcacttcttacttgggtccgtcatgatttggaacagagacggaaagatctaagtaaacttttggcttatattaggctacctcttcttgcaccacagttcctggcagacatggaaaataatgtactttttcgggatgatatagaatgtcagaaactcattatggaagcaatgaagtaccatttattaccagagagacgacccatgttacaaagtcctcggacaaaacctaggaagtcaactgttggtacattatttgcagttgggggaatggattcaacaaaaggagcaacaagcattgaaaagtatgatctccgtacaaatatgtggactccagtagcaaatatgaatgggaggaggctacagttcggtgttgcagtgctagatgacaaactgtatgtggttggaggaagagatggactgaagactttgaatactgtagagtgctacaaccccaaaacaaaaacttggagtgtgatgccacctatgtccacacatagacatggccttggtgtggctgtactggaaggtcccatgtatgccgtaggaggacatgatggctggagctatctgaacacagtggaaagatgggaccctcaggctcgccagtggaattttgttgccactatgtctacccctaggagtacagtaggtgtggcagtactaagtggaaaactttatgcagttggtggtcgtgatggaagttcttgtctcaaatcagtagaatgttttgatcctcatactaataagtggacactgtgtgcacagatgtcaaaaaggagaggtggcgtaggagtgacgacctggaatggactgctgtatgctataggggggcacgatgctcccgcatccaacttgacttccagactctcagactgtgtggaaagatatgatcccaaaacagacatgtggactgcagtagcatccatgagcatcagcagagatgcagtgggggtctgtttacttggtgataagttatatgctgttggggggtatgatggacaggcataccttaatactgtggaggcttatgatccccagacaaatgagtggacccaggttgctccactgtgcctaggaagagctggagcttgtgttgtgactgtaaaattataatttagtgccccgttttctacatgaagacaccgtcttcctttattaatttagtataattattctatcaatggatacatttttagtaaatgtgcattgtcacaatcctgggcacaaagtgcctgatgtcaaaatgaagatagtaaaacaagggaggaagcagtggatggaccaggattaattcctttcatttcttagtaaattaaaacctgcagctggtggattgtgatcacacattcccgaagtaataagtgaggacgaatgcactgctctggaacataacccagtgctaactgggggtttcatttattcagtcaagcacatcttactcacatccagatttattttcctacagtgcaaacacaccagatgaaactttaaaatgttactttttgtaagcttatcataaatgagttgcagtaatttgtttgcttgtttgtttaaccacaaccactattttaatgatatactaaagataacactatttagttttttcagaaacatctgcattatatgtgtgttggttgtggattttgtttctaaaattggcttagtccaataaataaagaaaagcattaaggacttaaagcaacaataaccaaataaaaacttgataggatctttgaagtctatttaaatattcattccattacatctagactcaccaagaactacatgttatgatgttaagttgaagttgaaacatgatgttttgcattaaatttaagatatgcaaatttatgtagagaaaataaatgttatataccctataatctttcacctaattagtatttaattatatggatttgttttatattataaaagatgttttgattttgtcttttgatattgacaaaattgtttggatatccttatgttctcaagtctgtatctgcctcccctgccttatttcttatgttttgccacagttaacccattgtgcttctttgtaatcaaacagtttgtgggagaatgggcttattgaatgtctaaaaaataagtttaaagtgtttgttaccctaagttttttacatttttaaactctaattacatatgtgaatgttattactctcagtgaattgttattgtttgcaaaaatgcactgggcagtaacattttgtgataaatcctataagatataagtcattgagatgtctaagatgctttttattttaaccccagttaataaccaccttacggaaaataatatttgctaatattgtttattgtgaactaggaatcaaagtttttgtatgcatcaatgcacttaatccttataacaaccttatgaggtagttctattccctttttatagctaaggaaattggggtacagagaagttagccccaaggttatatattgcaagtaagtggcagagcagggattcatacaaagaccttctcactcagcagtcttcactcttactattcctgccactaggtagaaaaagaaagatttcggccgggcacagtggctcacgcctataattcccagcactttgggaggctgaggtgggcggatcacgaggtcaggagatggagaccatcctggctaacacagtgaaaccccgtctctactaaaaataaaaaataaaaaaaaattagccaggcgtggtggcgggtgcctgtacgcccagctactcgggaggctgaggcgggagaatggcgtgaacccaggaggaggagcttgcagtgtgccaagatcgcaccactgcactccagcctgggtgacagagcgagactccatcaaaaaaaaataaataaaaaaaaaataaaagatttcattttatgtgaggaattattttaataaaaaaaagagggtttatgctctatagtaataaaatttaccagtaacacccaatcagaaaattttggttccttagtatttagggaagacttttgtttaaatctcttatggaattttacatgttttgatttagaaaagtagatgcaatataatatatttcaagttttatacatattagatgaattgcatggtattttaggcaacttaactataaacaaatttattcatagaagcattgttgccaacaatttagatgacctcgatgaaaaaacacaccaattgacaaaactggctcaaaaggaaataaaaaatccaaacagacctgtaacaagtaaagagattgaaccagtaatcaaaaatctcccaacaaagaaagtccaggactaaatgagtttactggcaaactatgccaaacatataaagaagaattaacactaatccttctcgaactctcccaaaaaatggaagagaaaggagcaccctgtgacattctataaggcggacattaccttaacaccaaagccagacaaagacctcacagggaagctacagaccaatatcccttatgaatatagatgcaaaaaaacttcaaaatactagcaggccaaatccagcagcttattaaaatgatcacacagcatgaccaagtgagatttatcaaagaaatgcagggatggttctacatacaaatgtcaatcgatgtaataatataccatattaatagaatgaaggggaaaaaacagcatgatcacctcaattgataagaaaaagcatttgacaaaaatccaacaccctttcatggtaaaaacactctgcaaactaggaagaaaagggaactttcttaacctgataaagacatccataaaaacccacagctaacaacataatagcaaaacattgaaaatttttcccctaatatcatgaaaattcctgatttccccactgctattcaacattatactagaaggtctagccagagcaattaggcaagaaaaagaaataaaatgaatcccaaataggaagaagtaaaactacatttgcagaaaacatggtcctatatattaaaaatcctaaagaatccacaaaatgattccggctgattttaaaaattcagcaatgttgcaggttgcaagatcaacacacaaaagtctaagaaaaacctgaggggaaattaaaacaatttcatttacaataacatgaaaaagaataaaatacttagaaataaatttgaccaagaaagtgcaagacttggacactgaaaagtacaaaacgttgctgaaagaaattaaagaagacctaaataaatggaagacatcctgtgctggcaggttggaagacttaacattgttaagatggcattactcccaaaattagtctatagatttaatacaatccccattaaaattccagtgacccttttacagaaactgaaaagctgaccctagaatttatatgggattgcaagttactgaaggtactcaagtctgttcaaaacaatcttgaacaagaataaagttgaaggactcacattttccaatttcaaaatttactgcaaagctacttcaatcaaaacagtgttgtgctggtataaaaatatataaagcaatagagtagaatggaaagtccagaaacaaattacgccaatacactatggtcaattgatttttgacaagggttccaggaccattcaatgaagaaagaacagtgtcttcaactaatagtgctaagacaagtgaatattcacatgcaaaagaatgaatttgtacctgtacttcataccatatataaaaattaattcaaaatagatcaaagacctaaatgtaagagctaaaaccataaaactttgagaagaaaatacaggaataaatcttcatgaccttggatttggcaatggtttcttagatatggcaccaaaagcacaagcaacaacagcaaaaaaaaaaaaaaaaaaaaaaaatcaaaattaaaagcttctacatatcaagggacactatgaagaaagtgaaaagacaacccacagaatgggagaaaatatttgtaaatcttacatatctggtaaggaactaatacctagaatatataaggaactccgatgctcgacaacaaaaagacaaaccaattttaaaatgggcaaaggacttaaatagacatttctctaatgaagatatacaaatggccgacaagcacatggaaagcactcaacctcatcagtcattatgcaaatcagcgccacaagaagataccacttcacacctattagaatgacgaaatagacctaggatctaaacctacaggaaaaaaaatgaataatagagaaaataaatgttagagaggatgtggagaaattgaaaaccttcattcgttgttggtgggaatgttaaatggtgtagccactgtggaaaacagtttggcagttcctcaataagttaaaaaaaagaattaccatatgacccagcaagtccactcctgggcatatactgaaaagaactgaaaacaggtgttcaagcaaaaactttcacgcaaatattcattgcagcactagtcacagtagccaaaaaagaggaaacaacccaaatggccatcagctgatgaatgaataaacaaattgtggtatctccacacggcacaatagaatattcagccataaagagaaatgagggactgatacatgctaaagcatggatgagccttgagcgcatttttgccaagtgaaagaaggcagacacaaaaggcaacgtattgcatgagtgcatttatatgaaatatccaaaataggcaaatccatggagacagaaagcagataaatggttgtaagaagctgagagaaaggagtggggagagattgctaaaaaggagtttccttctagggtgatgaaaatgttctggaactacttattggggatgattgcacaacatggtgaaggtactcaatgtcactaatggtaaatttcacatacactttaccataatttttaaaaagctttattagctacattatgttatgatacttaaatgtcataacaatagcattctgtacgcttcactaggataaaaacttcggatttatatgcatctggaagagaaatttttcactgtaatttgcaaataaatgaatttctaaaaatctaacagaaaggctcttaaatcttaatttcaacctaagaagggagtgagaaacaacgagaaccatgaggggagagttaacggggaacttccccaccgtccggtacatggcaggcattccacaaatgttttctgaaagttgaaatagacatcttttcatgaactctgtaatatttgaaattattgataactcttacacaaaaacaaatattcaataaaatgatatttaatttcactgtgaaaaaaaaaaa

SEQ ID NO: 535 - DNA, 4007 bp, Homo sapiens
gccccagcccagccccgcggggaggctcccgcagcccagggacctcgagctttccccgcgccgggcgctgcagccgggcccctcccgcgaggcgcccggcagcctgaggcttccttttggttcccgccccgggacgggaggctccgtccgctccctggacagccggggtgctccctccttctccctcccgcgctctcctcccccgtccgtttgcagggaggtgctctcctcgggcggcggggaaggcggggctggcctgccactcctcctgctatgatgcctgggcagatcccggacccttcggtgaccacaggctccctgccagggcttggccccctgaccgggctccccagctcggccctgactgtggaggagctgaaatacgctgacatccgcaacctcggggccatgattgcacccttgcacttcctggaggtgaaactgggcaagaggccccagcccgtgaaaagtgagctagatgaggaagaggagcgaaggaaaaggcgccgggagaagaacaaagtcgcagcagcccgatgccggaacaagaagaaggagcgcacggagtttctgcagcgggaatccgagcggctggaactcatgaacgcagagctgaagacccagattgaggagctgaagcaggagcggcagcagctcatcctgatgctgaaccgacaccgccccacctgcatcgtccggaccgacagtgtcaagacccccgagtcagaaggcaacccactgctcgagcagctcgagaagaagtgaccatgggctgggaggaggtggaggaggaggaagaggagaaggaaaagtgacgaagagagaggaggaggggggccccagatggcccttcctttggtgcatgaaaaactgtacaatgaggttcagcacagccagcatcagccgagcttttttgtgaaactcagatcagccacccaggaggaagagcgggctgaggaaacccagagggaccaagcgctgagaccaaagttgaccctcgggtagggttgtcctgcctggggccccacttgaaggaggcaggacagaggcaccgaggccagggagacgcccaacgaggcagccctgggctcttctctggcctcttcaccagggcacccatccaaggaacctccgaacagccaggaaaagccatgagttgcaaccaaaacgcggctgaggatggaactcagaatgaaactgcaacccacctgcccccagccctgcccctcgccctgatgcgaagctggagaggggcgtgctgcggggccctgatgcccccacccacctcggtccagcgcggccctgcccaggaggcggcagccgggcgcaccctcgccagccctgctggagtttgctgtgggcactgaggcgcgggcgcccttccaaagcacatactcaccgaatgtttacagactggctgtcctggcagggctttcaactgcacatgttttttatactttcctttttttttttttttttaatattttttacaaaaaaaaagattttatacaagcaatatatatatggatttctataatcactcgatgtgatacagtataaatatgctatggtttgtttgttatgaacagatagccaccagttacggccgttgtgtgtaactcctaagtactgtagtctctgggtgtcgggggtggccagggcgggggcggggtgcatttccatccttgtaaacccttcatagtactcagtcctgtatcgctcagtaaacattgctcttacttacatagccgccttgcgtggtgtctgcctggggaatgggtgcaaggccctctcagggtcggagactgtttggagcctctgctataggcctgttcattttcacaacagctctcctatttcacagatgaggaagctaaggctcagagacattaagccacctgcagttactattttgagagcagtcagagtgttcgctcactctgcagatgttttctgagggcctgttgtgtgtgccaggccctgagaattcactggaggatgaaacagacctaagtcttgcccttgtggggcctccagtaaggagtgaatcctgtgcttgctccataagttgtctcatttcgtcttcatggcagccttgccagggaacagcacttgtccccaattcacagatggcgaattagaggtccagggaattaaactcgcagacaccatttgttgaagacttattttgtgacaagcagacatagtctcttcccttctcacaagagcacaaactaggcacgattcttctcattttacagatggtttaactgaggctcagagaaggtaagcgacttatccaaggtaacccagctagcaagggatagagctggtgtttgaactctccctccagaggcctgtgactctcctcctgtcaccaacccactatgattgtcctcatggttgaataggaagcttatgaggccacagttatagatttagtttctgggaaggctggatagagttccaggttgtcccatgatcacagagtgaaccaactaccctggtcaatgtgtgtctgacccagggaagggtgtggatggcttctctgccccctcacctcgacagctgaatccctgccacccagggccggagcagctcagtggcattcactcagtgcctgctgtgtacctggcactcggcagttctcaaggcatgtcacgcatgaggaaggcgggagaggtgtttttagcttccttgtatactgaagcttgcaaaggctacagtttacccaactaaacttgactcctgcattctaatcatgtgttctttctcctccatccctggacttaggataactagttgctggtgatgacttcgtgtcaagaacagcagtgaacctgggttgcttcccaaattgtggacgaggccttctgggatgggcagaagtggagaatggtgattaacacacctgtgatccctccctcgctcactcctctcagtttccctccacccaacacacttggtgtggactcccctgcaccccgccctagaaacaggacctggtcctctcactgtcagctgtggcagaaggttgtggcagcgggttgccttctgtctcgggggtcttgaggctgtcggtccggacgatgcaggtgaggcagtgtcagttctgcatcaggaacccctcgcgctgtaatcctttgatatttttcaagccatgagaaaaatgaagtggacttaccagggtccctccagtgacctagtggatgttcttacaggactgccgtgtgccactggctgtggcttccctggtcctgtgcttggccaccgggagctggcatctccaaaatagagcctccttagcctgtgcaggtgggctgtcttccaaagtcaccacaccagtgacttgtgctgtgcggagccttcctcaccaggaccactggctgctcctgtggctagaagtcacaattataggcttcattgcaagagccagcatttgagtttcttctgggcacctgccactgtgcatgtgtgacctcaactgctttgtgcaccctgactggggggtaggtgctagcgttccaacattacagatgagaaaaccgaggcacacagaagaggtaacctgcccaaggtcacaggtgttaggtggcagagccaagatgttattgtcagtctgacttcaggtgcataaaacctgaggctgagcctccccatgagaggaaaaatgtgtttgtggtgtgacctcagttgccagggaacttgtgcaggaagccgggagagatggcacagacccacctgtgctcacagtacatgttaagaattcccaagtctcaggcaaaccatctccaagggtgttcacagaagacacaccttaaaggcaaacgggttcatgatgtaatcttctattgactagctgtgaacctcatttttcttatctgtgaagtgggaacagtaataatccaagtctttttatggagttatcaagatcaaaaaaggaatggatatacaaagtgttttgtgaaataaaagctccctaaaatggtaaaaaaaaaaaaaaaaaa

SEQ ID NO: 536 - DNA, 6975 bp, Homo sapiens
gggagagggaagggggcggagctagccggagccgcgagtccattttggggctgtgcttggcgcgtaccgtgcggtccctgtagttggaggacgggcggtcgcgcggcctttcccactagccggaggtcggagataagtacccgccgcccggctcctctcgggaaagcggggtggtcctcgaaccttcagcgagggtggggagttgcccagtagcctctagttcgttagtcaaaacgtgaaaaaaaagacctgctttgccctgggaaatagtaaccctgccaaatacatcagcttgtaggagacagagaataacagcacctggccgggtgcagtggctcaggcctgtaatcgcagcactttgggaggctgaggtgggcggatcacctgaggtcaggagctcgagaccagcctggccaaaatggatgtgatggagctgcttgaagaagatctcacatgccctatttgttgtagtctgtttgatgatccacgggttttgccttgctcccacaacttctgcaaaaaatgcttagaaggtatcttagaagggagtgtgcggaattccttgtggagaccagctccattcaagtgtcctacatgccgtaaggaaacttcagctactggaattaatagcctgcaggttaattactccctgaagggtattgtggaaaagtataacaagatcaagatctctcccaaaatgccagtatgcaaaggacacttggggcagcctctcaacattttctgcctgactgatatgcagctgatttgtgggatctgtgctactcgtggggagcacaccaaacatgtcttctgttctattgaagatgcctatgctcaggaaagggatgcctttgagtccctcttccagagctttgagacctggcgtcggggagatgctctttctcgcttggataccttggaaactagtaagaggaaatccctacagttactgactaaagattcagataaagtgaaggaattttttgagaagttacaacacacactggatcaaaagaagaatgaaattctgtctgactttgagaccatgaaacttgctgttatgcaagcatatgacccagagatcaacaaactcaacaccatcttgcaggagcaacggatggcctttaacattgctgaggctttcaaagatgtgtcagaacccattgtatttctgcaacagatgcaggagtttagagagaaaatcaaagtaatcaaggaaactcctttacctccctctaatttgcctgcaagccctttaatgaagaactttgataccagtcagtgggaagacataaaactagtcgatgtggataaactttctttgcctcaagacactggcacattcattagcaagattccctggagcttttataagttatttttgctaatccttctgcttggccttgtcattgtctttggtcctaccatgttcctagaatggtcattatttgatgacctggcaacttggaaaggctgtctttcaaacttcagttcctatctgactaaaacagccgatttcatagaacaatcagttttttactgggaacaggtgacagatgggtttttcattttcaatgaaagattcaagaattttactttggtggtactgaacaatgtggcagaatttgtgtgcaaatataaactattataaaatctgtttcaagtatgcagttttcttttgttagaaattgttagagaatagagagtggtaattcagatttggtcaacgattctagtcacatattttcctccaaaagtattccttccaaaaataatctatacatgttcaaattaggtagcataaagataaaagtgaaatttagtagtataggcctgaacctttttttgtttaaaagagtgcttttgaaataagcatccaccccaaatgttggttgtatttatgctgtgataaaaataggtgagagatcatatgatctaatattgtattgatggaagtataggtagtatagtagtgattgttcttcaagcatgcagtaaagatcacttttttttttttttttttttttgagatggagtcttgctctgtcgcccaggctggagtgcagtgatgcaatcttggctcactgcagcctctacctcccaggttcaagtgattatcctgccttagcctcctgagtagctgggattacaggcgcgtgccaccacgcccagctaattttttgtatttttagttgagacagggtttcactgtcccttaagaccatcctgttagccaagatggtcttgatctcctgacctcgtgatccgcctgcctcggcctcccaaagtgctgggattacaggtgtgagccaccgtgcccagccaaagactgctcttaaagcacctttttgacagtgaacatggtctaaaaaagggaagatattgtagaagatttcacacacacacgcgtgtgtgggagacaactaaaggtattgaaggtactaattaattagatttccaaaattttctacagagagttaattatcaccaaaatgtgaatggtacatacaaaacctggcattttcttgtgataagtttacatttttaggagagtggagctttcaatctgcccttttctcctttgtttttgtagttttcaccaaagatgatcaactagaaatgttaagtggctatgcaagcaaaagcatagataggttaaaaaaaaggatcagctggctgggcagggtggctcatgtctataatctcagcattctaggacagtgatgtgggaggattatttgaggctaggagttccagttcgaaaccagcttcgtaaacatagcaagacccagtctctaccaaaaaaaaaaaaaaaaaaaaaaaaaaaaaaaatatatatatatatatacacacacacacacacatatgtacacatacatatatatacatatatatgtatatatagaacacatggcaagagcaggaaatgggaagactaccttttttctggcagctatgtgttgttttgttcgaaagatggcaagtgtacaaccaaaccaatccacttgcttacagaaagaatgtttagtgtagttaagactaatttgacaacagataaaacagtctgtcagctattacaaagtaatcagctgaacactaatgctgttctgtctgctcacaagagataaagataccctctcatggaataaacaccttgcttagaattcatataacaaagaagtaaccttataactgctctctagtctgccttatttgtgtcatagagtaagatattccttgaaagcccattaagtggaatagactttctgaaaataagagttctttacctcagtcctcctctaatttggttgagaggaggtaatgaaaatggggacaggataaaaggtggcaactaaatttaaagcacagaagaaatgatttccttctagctatgagaatagtcaaattgagcttgccaggctgtctcattcctaacatgtaattcatgatttagccactaaatttctaaggagatcataagaaattaagaaaaacgtttaagtctagcctctgcgtggtagacaggtatggggagggagaatgcttttcccctcccagtaataaaaaaaaaaaaaaaaaaaatatatatatatatatatatatatatatatatatatatatatatatatatatatatagttttactaggttttcatggataagtttttaaatgtaagacaggaaagggatctatttgatgtctatcttcagatatattggcagttttccttaagctatttagttcctcatctgttgctttttcattttgtatactgcaagttcccaggcaactcgaatttgcaaacacagccatggatacactatttaccttacagtagtttcctgggaatctaagtctggtttttgttattcttccctcccctccactgcataatcatgtataactagcaacatttatggttataggttgatttcctaagtgtggctgatggtagcctctagtttgaagtgagggaagaatgagtagtcaggaactggtcactttgaatgtgggagggaagatattcacgacaaggttttctacgataaagcagtttcctgcttctcgtttggcacgcatgttagatggcagagaccaagaattcaagatggttggtggccagatttttgtagacagagatggtgatttgtttagtttcatcttagattttttgagaactcaccagcttttattacccactgaattttcagactatcttaggcttcagagagaggctcttttctatgaacttcgttctctagttgatctcttaaacccatacctgctacagccaagacctgctcttgtggaggtacatttcctaagccggaacactcaagcttttttcagggtgtttggctcttgcagcaaaacaattgagatgctaacagggaggattacagtgtttacagaacaaccttcagcgccgacctggaatggtaactttttccctcctcagatgaccttacttccactgcctccacaaagaccttcttaccatgacctggttttccagtgtggttctgacagcactactgataaccaaactggagtcaggtattttgtactttgcagtatttctcttgtataccagtttgtgatgttttctctaaaaacttgaagttcctcaggcctgtaacttctggaaaagatgattattcaaaataatgttttggggtaaccagtggagttgggtagaatgaccaaataattattttccaaactgggatactttttagagtgaaaggggctattattaggtgggacaaaaggaataaatgaagactgcccagaaaaaactgagactatggacattcaaatcatgggagaaaataattttgtagattatgttccattgctaatgaatttgacttagaaaagaattgccttatttttaagagattgtttcagtggttcacataaaggctcgctcactggtttctcttgagttccttacacactatataagttgttctttcagttttatgattcaactactgtttttccttcagctgactttatttttaaacacccttaaagacagatatatctcatggcaaatttggtatcctgttacagccttggctcttaaacaactcaaaatattgggataggctgtcagtatgttaaggatagttgctcctgagtcaattcttcacttactccctctgttgttcttggctggatcctaacgctgatttccactctgctgtcacaaacatttttccccccgtaaaatgtcttaatgctgtcctaccattattttaccaactgtgaaagctggctttaatttttaggaggaaaagaaaagcctgcatgtgttctttattggtatcatttaaaatatacttttttttttttttttggtaaaggtaggcgtattttaagatattttcttaacttgagcagtagccaacaggaaggataccagtgtctctctctcttagcgacacactccttggtcttgcttaccaactggaggacactaggtagaataaccgagtatgacaattcttaattgtttacattttataacttcctgtccttcaaaagagtttgaaatgtcattttgggaaaagagagccagtcaagctagtaggctgattgtgaagaaaatctaataccttatctttatctcaaacctctgtacaactttattttcattgatgggatactttaacaaaaatgaaattttttttggtttttaaaatatgagtgattatgacctctttggggatcatgcttcaaaaagtcagaaacctagagacaaaactgtcattgatttttaagaagaaacacactaggtcaaaagaagatgtcctggaaatatgaagtactctttaaaaaccatgcatttggagaaagtaattgtttccttgaaaaacatgattaaaaactaaaactgggatgttcctgtgtgtacacagtgccaaatggttttccctttttatgttgtgttttagaaacagcacgaaagttttttccattttaaagtgagaaaacattatatttagacttccataattccaaaatcagaagctatttttaaaattagcattttcttgcatcaccaaatggtattcaattgtttgaagctcaaaatttttaccattccataaatgtttgtgaatttttagacagtgccaatttaaaagtagagatagccaatctgaatacggtgaaattatggggatctctggtgattgggatgaaaactctggccttaaaaggtccacttttagtatataattgcctaattagcaatcatttttattttttgctcactccctggtctgaatctatctgtctattcagatattttttggtaggtttggaaaatggagaagtgagcctaattggtgcctaattgtctggtgtatcattcactttattcagtttgttctatcaatatgatttacccctcaaggttaacctagcaggttgctcagttattatctctcaaggtcacagtactagaaatacttggcttgcatctttcagatgccattcatgttatcaagctcaaattatagttggtcacaggattctaaagtctttatttgacttctcctttttgaactggctcaaatggaaaagtgtagttgcttttaaatgttaaaaataagtttaaactttatatttcccattggtttcccctattttgtcctttctttgtgtgcttgaaatattttatttttcagtttgtcctcatagggaatcaagtattttagctaggtgatgtcttgcaagtacgttccactttgttacaatctactatctgtatatactatttgtatcttaattcttttatgagatgttctgtaacatttttctcactttgacaaatgtttttagactgtacagtcaagatctggcgcttgggggtaagtggaatgatttgctaatattgagaatctgttgtatcaaacataataaactttttttgagatgtgaaaaaaaaaaaaaaaaaaaaa

SEQ ID NO: 537 - DNA, 674 bp, Homo sapiens
ccccttggttccgcccgcgcgtcacgtgaccccagcgcctacttgggctgaggagccgccgcgtcccctcgccgagtcccctcgccagattccctccgtcgccgccaagatgatgtgcggggcgccctccgccacgcagccggccaccgccgagacccagcacatcgccgaccaggtgaggtcccagcttgaagagaaagaaaacaagaagttccctgtgtttaaggccgtgtcattcaagagccaggtggtcgcggggacaaactacttcatcaaggtgcacgtcggcgacgaggacttcgtacacctgcgagtgttccaatctctccctcatgaaaacaagcccttgaccttatctaactaccagaccaacaaagccaagcatgatgagctgacctatttctgatcctgactttggacaaggcccttcagccagaagactgacaaagtcatcctccgtctaccagagcgtgcacttgtgatcctaaaataagcttcatctccgggctgtgccccttggggtggaaggggcaggattctgcagctgcttttgcatttctcttcctaaatttcattgtgttgatttctttccttcccaataggtgatcttaattactttcagaatattttcaaaatagatatatttttaaaatccttaaaaaaaaaaaaaaaaa

SEQ ID NO: 538 - DNA, 2591 bp, Homo sapiens
cggaggtgcgcgggcgcgggcgagcagggtctccgggtgggcggcggcgacgccccgcgcaggctggaggccgccgaggctcgccatgccgggagaactctaactcccccatggagtcggccgacttctacgaggcggagccgcggcccccgatgagcagccacctgcagagccccccgcacgcgcccagcagcgccgccttcggctttccccggggcgcgggccccgcgcagcctcccgccccacctgccgccccggagccgctgggcggcatctgcgagcacgagacgtccatcgacatcagcgcctacatcgacccggccgccttcaacgacgagttcctggccgacctgttccagcacagccggcagcaggagaaggccaaggcggccgtgggccccacgggcggcggcggcggcggcgactttgactacccgggcgcgcccgcgggccccggcggcgccgtcatgcccgggggagcgcacgggcccccgcccggctacggctgcgcggccgccggctacctggacggcaggctggagcccctgtacgagcgcgtcggggcgccggcgctgcggccgctggtgatcaagcaggagccccgcgaggaggatgaagccaagcagctggcgctggccggcctcttcccttaccagccgccgccgccgccgccgccctcgcacccgcacccgcacccgccgcccgcgcacctggccgccccgcacctgcagttccagatcgcgcactgcggccagaccaccatgcacctgcagcccggtcaccccacgccgccgcccacgcccgtgcccagcccgcaccccgcgcccgcgctcggtgccgccggcctgccgggccctggcagcgcgctcaaggggctgggcgccgcgcaccccgacctccgcgcgagtggcggcagcggcgcgggcaaggccaagaagtcggtggacaagaacagcaacgagtaccgggtgcggcgcgagcgcaacaacatcgcggtgcgcaagagccgcgacaaggccaagcagcgcaacgtggagacgcagcagaaggtgctggagctgaccagtgacaatgaccgcctgcgcaagcgggtggaacagctgagccgcgaactggacacgctgcggggcatcttccgccagctgccagagagctccttggtcaaggccatgggcaactgcgcgtgaggcgcgcggctgtgggaccgccctgggccagcctccggcggggacccagggagtggtttggggtcgccggatctcgaggcttgcccgagccgtgcgagccaggactaggagattccggtgcctcctgaaagcctggcctgctccgcgtgtcccctcccttcctctgcgccggacttggtgcgtctaagatgagggggccaggcggtggcttctccctgcgaggaggggagaattcttggggctgagctgggagcccggcaactctagtatttaggataaccttgtgccttggaaatgcaaactcaccgctccaatgcctactgagtagggggagcaaatcgtgccttgtcattttatttggaggtttcctgcctccttcccgaggctacagcagacccccatgagagaaggaggggagcaggcccgtggcaggaggagggctcagggagctgagatcccgacaagcccgccagccccagccgctcctccacgcctgtccttagaaaggggtggaaacatagggacttggggcttggaacctaaggttgttcccctagttctacatgaaggtggagggtctctagttccacgcctctcccacctccctccgcacacaccccaccccagcctgctataggctgggcttccccttggggcggaactcactgcgatgggggtcaccaggtgaccagtgggagcccccaccccgagtcacaccagaaagctaggtcgtgggtcagctctgaggatgtatacccctggtgggagagggagacctagagatctggctgtggggcgggcatggggggtgaagggccactgggaccctcagccttgtttgtactgtatgccttcagcattgcctaggaacacgaagcacgatcagtccatcccagagggaccggagttatgacaagctttccaaatattttgctttatcagccgatatcaacacttgtatctggcctctgtgccccagcagtgccttgtgcaatgtgaatgtgcgcgtctctgctaaaccaccattttatttggtttttgttttgttttggttttgctcggatacttgccaaaatgagactctccgtcggcagctgggggaagggtctgagactccctttccttttggttttgggattacttttgatcctgggggaccaatgaggtgaggggggttctcctttgccctcagctttccccagcccctccggcctgggctgcccacaaggcttgtcccccagaggccctggctcctggtcgggaagggaggtggcctcccgccaacgcatcactggggctgggagcagggaaggacggcttggttctcttcttttggggagaacgtagagtctcactctagatgttttatgtattatatctataatataaacatatcaaagtcaa

SEQ ID NO: 539 - DNA, 1118 bp, Homo sapiens
ctcggtaactgggttgcaggcccgcggctgcggagtgcgcaggcgcgccgagatggccgcgctcctggccgcctagagccggagcggcccgcggagctgcggaggcagccatggtcggggcgctgtgcggctgctggttccgcctgggcggggcccgcccgctcatcccgttgggcccgactgtggtacagacctccatgagccggtcccaggtagccctgctgggcctgagtctgctgctcatgctcctactgtatgtggggctgccaggcccccctgagcagacttcctgcctctggggagaccccaatgtcacagtcctggctggtctcacccctggcaactcgcccatcttttaccgcgaggtgctcccactcaaccaggcacacagggtggaggtggtgctgcttcatggaaaggcctttaactctcacacgtgggagcagctgggcacactgcagctactgtcacagaggggctaccgggccgtggcccttgaccttccaggttttgggaactcggcaccttcaaaggaggcaagcacagaggcagggcgggcagcgctgctggagcgggcgctgcgggacctggaggtacagaatgccgtgttggtgagcccctcgctgagtggccactatgccctgcccttcctgatgcgaggccaccaccagctacatggatttgtgcccatcgcacccacctccacccagaactacacccaggagcaattctgggctgtgaagactccaacccttatcctgtatggagagctggaccacatcctggctcgagagtcactgcggcagctccgccacctgcccaaccactctgtggtgaagctacgcaatgcaggccatgcctgttacctccacaagccgcaagacttccaccttgtcctgcttgccttccttgaccatctaccttgaactaacccactcccagctcccagcctggcatgagcttggacagtctggaccgccaccctccctgaaccagggagacagcctctgggattggaggccagaggccagggtcagacccagccaggactcctcatttcatctcacagacacaataaaaaagcatatttgtcctgcctgggaagtgaaaaaaaaaaa

SEQ ID NO: 540 - DNA, 2165 bp, Homo sapiens
ctttttaagctcccctgagccggtgctgcgctcctctaattgggactccgagccggggctatttctggcgctggcgcggctccaagaaggcgtgagttcgcggccgctccggtggcttcttttttttatatctataatttaattaaattatttatttattgaggccgcgcacgggccgtgcccagcttcctgcccctcgccatccttcgggggagggggaatatttttgtccccccgcctggctgtgacacataaataccccgcgggggcctgggcggcgagcacgcggcggcggcggtctctgagcgcctctgctctctcccggtttcagatccgcatttgctaccagcggcggccgcggcggagccaggccggtcctcagcgcccagcaccgccgctcccggcaacccggagcgcgcaccgcaggccggcggccgagctcgcgcatcccagccatcactcttccacctgctccttagagaagggaagatgagtgagtcgagctcgaagtccagccagcccttggcctccaagcaggaaaaggacggcactgagaagcggggccggggcaggccgcgcaagcagcctccgaaggagcccagcgaagtgccaacacctaagagacctcggggccgaccaaagggaagcaaaaacaagggtgctgccaagacccggaaaaccaccacaactccaggaaggaaaccaaggggcagacccaaaaaactggagaaggaggaagaggagggcatctcgcaggagtcctcggaggaggagcagtgacccatgcgtgccgcctgctcctcactggaggagcagcttccttctgggactggacagctttgctccgctcccaccgcccccaccccttccccaggcccaccatcaccaccgcctctggccgccacccccatcttccacctgtgccctcaccaccacactacacagcacaccagccgctgcagggctcccatgggctgagtggggagcagttttcccctggcctcagttcccagctccccccgcccacccacgcatacacacatgccctcctggacaaggctaacatcccacttagccgcaccctgcacctgctgcgtccccactcccttggtggtggggacattgctctctgggcttttggtttgggggcgccctctctgctccttcactgttccctctggcttcccatagtggggcctgggagggttcccctggccttaaaaggggcccaagccccatctcatcctggcacgccctactccactgccctggcagcagcaggtgtggccaatggaggggggtgctggcccccaggattcccccagccaaactgtctttgtcaccacgtggggctcacttttcatccttccccaacttccctagtccccgtactaggttggacagcccccttcggttacaggaaggcaggaggggtgagtcccctactccctcttcactgtggccacagcccccttgccctccgcctgggatctgagtacatattgtggtgatggagatgcagtcacttattgtccaggtgaggcccaagagccctgtggccgccacctgaggtgggctggggctgctcccctaaccctactttgcttccgccactcagccatttccccctcctcagatggggcaccaataacaaggagctcaccctgcccgctcccaacccccctcctgctcctccctgccccccaaggttctggttccatttttcctctgttcacaaactacctctggacagttgtgttgttttttgttcaatgttccattcttcgacatccgtcattgctgctgctaccagcgccaaatgttcatcctcattgcctcctgttctgcccacgatcccctcccccaagatactctttgtggggaagaggggctggggcatggcaggctgggtgaccgactaccccagtcccagggaaggtggggccctgcccctaggatgctgcagcagagtgagcaagggggcccaaatcgaccataaagggtgtaggggccacctcctccccctgttctgttggggaggggtagccatgatttgtcccagcctggggctccctctctggtttcctatttgcagttacttgaataaaaaaaatatccttttctggaaaaaaaaaaaaaaaaaaaaaaaaaaaaaaaaaaaaaaa

SEQ ID NO: 541 - DNA, 1429 bp, Homo sapiens
gccacttccgggagtcggaaaggaaagctgtgggaccatcctggcaaccccggtgtttggctgggttctagcgtagccgtctgtgtggccggtgggggacctgcggtcggagtgggagggccagtctgcacccaagaggtggaagaggacgggctttaggctggaagcgccttagaggagccatttttccaggtggggccccaggcagaggctccgacagggagcctggccatagtcgcgcagccggggaggtggagcgcgtcccagacccgagcccccgacctcagccaaacccattccttctgcccttggaggccagaggggactctgagctccggaaaggatgcctggtttgcttttatgtgaaccaacagagctttacaacatcctgaatcaggccacaaaactctccagattaacagaccccaactatctctgtttattggatgtccgttccaaatgggagtatgacgaaagccatgtgatcactgcccttcgagtgaagaagaaaaataatgaatatcttctcccggagtctgtggacctggagtgtgtgaagtactgcgtggtgtatgataacaacagcagcaccctggagatactcttaaaagatgatgatgatgattcagactctgatggtgatggcaaagatcttgtgcctcaagcagccattgagtatggcaggatcctgacccgcctcacccaccaccccgtctacatcctgaaagggggctatgagcgcttctcaggcacgtaccactttctccggacccagaagatcatctggatgcctcaggaactggatgcatttcagccataccccattgaaatcgtgccagggaaggtcttcgttggcaatttcagtcaagcctgtgaccccaagattcagaaggacttgaaaatcaaagcccatgtcaatgtctccatggatacagggcccttttttgcaggcgatgctgacaagcttctgcacatccggatagaagattccccggaagcccagattcttcccttcttacgccacatgtgtcacttcattgaaattcaccatcaccttggctctgtcattctgatcttttccacccaaggtatcagccgcagttgtgccgccatcatagcctacctcatgcatagtaacgagcagaccttgcagaggtcctgggcctatgtcaagaagtgcaaaaacaacatgtgtccaaatcggggattggtgagccagctgctggaatgggagaagactatccttggagattccatcacaaacatcatggatccgctctactgatcttctccgaggcccaccgaagggtactgaagagcctcacctgggggcattttgtgggtggagggccagagtgtgtatacccaggcttgtctggaaggagaaggcctttgctgcctgaaagtctcatgttaaaaaaaaaaaaaa

SEQ ID NO: 542 - DNA, 1386 bp, Homo sapiens
ggaagccgggattcgccctccggggagcgattggtcctcgggaggggcggggaggtggacgcgggtaccggcggtcgtcgggtcggcagcctttggtcagttggcagcggcaagcgcgctgcggttccggtggcgccatgtcgttctgcagcttcttcgggggcgaggttttccagaatcactttgaacctggcgtttacgtgtgtgccaagtgtggctatgagctgttctccagccgctcgaagtatgcacactcgtctccatggccggcgttcaccgagaccattcacgccgacagcgtggccaagcgtccggagcacaatagatctgaagccttgaaggtgtcctgtggcaagtgtggcaatgggttgggccacgagttcctgaacgacggccccaagccggggcagtcccgattctgaatattcagcagctcgctgaagtttgtccctaaaggcaaagaaacttctgcctcccagggtcactaggcgggcagcccacacccaccccagacggccaccacactgaggccacacgttggccattccaccttggagttggaaccctgggcgtcgagacaggaaggcagggcgcagtggttgaaacatcaggacactcccaaggccccggctctgaacaagaccttttcgtttcttggaaaagagactcatttgctgatggttcatgccttctgctgggacaggcctgggctgtgcagccacactgtcggctgacttagccccctgctcactctaggtgcctccaggaggtgagccctgggtgcagctggtctctgaatgacgttacaccctcaccttcttttcctggccctgtctctggactctcccctgtgaggcccaattccaagacagactctcgtcctcaccgaagcttaggcccacatctcccaggctgcttaggagacagaatggaaacggaggccgcccctgccagccgccctggccctggtcactgcatgatccgctctggtcaaacccttccaggccagccagagtggggatggtctgtgacctgctgggaaggcaggctgatggggcacacccttggcctctcgtccacgaggggagaaacctaaaccctgtttcacaatctgtgcggaagtagcttgcctcacttctgcttaggaaagcggctgttgctccataactctaaccagcacagggctgaggcctgcagtgcacacctgcagggaggcccttcccaaggtgtggtgactgtgccttactgtacatgctcggaggcctggccatataggagggtgggtgatgctgaaatcaccccccatcttaagtaattactttctggagtaatcaggtggaaatccatagacaaatgaaacattcagaaaaaaaaaaaaaaaaaaaa

SEQ ID NO: 543 - DNA, 2430 bp, Homo sapiens
cacacccgcactcctcccgggtttctgctctccgcccgtgtggagtggtgggggcctgggtgggaatgggcgtgtgccagcgcacgcgcgctccctggaaggagaagtctcagctagaacgagcggccctaggttttcggaagggaggatcagggatgtttgcgagcggctggaaccagacggtgccgatagaggaagcgggctccatggctgccctcctgctgctgcccctgctgctgttgctaccgctgctgctgctgaagctacacctctggccgcagttgcgctggcttccggcggacttggcctttgcggtgcgagctctgtgctgcaaaagggctcttcgagctcgcgccctggccgcggctgccgccgacccggaaggtcccgaggggggctgcagcctggcctggcgcctcgcggaactggcccagcagcgcgccgcgcacacctttctcattcacggctcgcggcgctttagctactcagaggcggagcgcgagagtaacagggctgcacgcgccttcctacgtgcgctaggctgggactggggacccgacggcggcgacagcggcgaggggagcgctggagaaggcgagcgggcagcgccgggagccggagatgcagcggccggaagcggcgcggagtttgccggaggggacggtgccgccagaggtggaggagccgccgcccctctgtcacctggagcaactgtggcgctgctcctccccgctggcccagagtttctgtggctctggttcgggctggccaaggccggcctgcgcactgcctttgtgcccaccgccctgcgccggggccccctgctgcactgcctccgcagctgcggcgcgcgcgcgctggtgctggcgccagagtttctggagtccctggagccggacctgcccgccctgagagccatggggctccacctgtgggctgcaggcccaggaacccaccctgctggaattagcgatttgctggctgaagtgtccgctgaagtggatgggccagtgccaggatacctctcttccccccagagcataacagacacgtgcctgtacatcttcacctctggcaccacgggcctccccaaggctgctcggatcagtcatctgaagatcctgcaatgccagggcttctatcagctgtgtggtgtccaccaggaagatgtgatctacctcgccctcccactctaccacatgtccggttccctgctgggcatcgtgggctgcatgggcattggggccacagtggtgctgaaatccaagttctcggctggtcagttctgggaagattgccagcagcacagggtgacggtgttccagtacattggggagctgtgccgataccttgtcaaccagcccccgagcaaggcagaacgtggccataaggtccggctggcagtgggcagcgggctgcgcccagatacctgggagcgttttgtgcggcgcttcgggcccctgcaggtgctggagacatatggactgacagagggcaacgtggccaccatcaactacacaggacagcggggcgctgtggggcgtgcttcctggctttacaagcatatcttccccttctccttgattcgctatgatgtcaccacaggagagccaattcgggacccccaggggcactgtatggccacatctccaggtgagccagggctgctggtggccccggtaagccagcagtccccattcctgggctatgctggcgggccagagctggcccaggggaagttgctaaaggatgtcttccggcctggggatgttttcttcaacactggggacctgctggtctgcgatgaccaaggttttctccgcttccatgatcgtactggagacaccttcaggtggaagggggagaatgtggccacaaccgaggtggcagaggtcttcgaggccctagattttcttcaggaggtgaacgtctatggagtcactgtgccagggcatgaaggcagggctggaatggcagccctagttctgcgtcccccccacgctttggaccttatgcagctctacacccacgtgtctgagaacttgccaccttatgcccggccccgattcctcaggctccaggagtctttggccaccacagagaccttcaaacagcagaaagttcggatggcaaatgagggcttcgaccccagcaccctgtctgacccactgtacgttctggaccaggctgtaggtgcctacctgcccctcacaactgcccggtacagcgccctcctggcaggaaaccttcgaatctgagaacttccacacctgaggcacctgagagaggaactctgtggggtgggggccgttgcaggtgtactgggctgtcagggatcttttctataccagaactgcggtcactattttgtaataaatgtggctggagctgatccagctgtctctgacctacaaaaaaaaaaaaaaaaaa

SEQ ID NO: 544 - DNA, 1458 bp, Homo sapiens
ttagttcctcggggagcccctggtgccccggatacggctgattttgtcgtgtgggacctgttctggctgctccagccccaggaaggacccaggacacccggaagccggaaatggactcagtggcctttgaggatgtggctgtgaacttcacccaggaggagtgggctttgctgagtccttcccagaagaatctctacagagatgtgacgctggaaaccttcaggaacctggcctcggtcggaatccaatggaaagaccaggacattgagaatctgtaccaaaacctggggattaagctaagaagtctggtggagagactctgtggacgtaaagaagggaatgaacacagagaaactttcagccagattcctgattgtcacctgaacaagaaaagtcaaactggagtgaaaccatgcaaatgcagcgtgtgtgggaaagtcttcctccgtcattcattcctggacaggcacatgagagctcatgctggacacaaacgatctgagtgtggtggggaatggagagagacgccccgtaaacagaaacaacatgggaaagcctccatttcccccagtagtggtgcacggcgcacagtaacaccaactcgaaagagaccttatgaatgcaaggtgtgcgggaaagcctttaattctcccaatttatttcaaatccatcaaagaactcacactggaaagaggtcctataaatgtagggaaatagtgagagccttcacagtttccagtttctttcgaaaacatggaaaaatgcatactggagaaaaacgctatgaatgtaaatactgtggaaaacctatcgattatcccagtttatttcaaattcatgttagaactcacactggagaaaaaccttacaaatgtaaacaatgtggtaaagccttcatttccgcaggttaccttcggacacatgaaatcagatctcacgcgctggagaaatcccaccaatgtcaggaatgtgggaaaaaactcagttgttccagttcccttcacagacatgaaagaactcatagtggaggaaaactctacgaatgtcaaaaatgtgccaaagtctttagatgtcccacgtcccttcaagcacatgaaagagctcacactggagaaagaccttatgaatgtaataaatgtggtaaaaccttcaattatcccagttgttttcgaagacataaaaaaactcatagtggagaaaagccatatgaatgtacaaggtgtggtaaagcctttgggtggtgcagttccctccgaagacatgaaatgactcacactggagaaaaaccctttgattgtaaacagtgtggtaaagtctttactttttcaaattaccttagacttcatgaaagaactcatttggccgggcgtagccagtgctttggcaggaggcagggggatcacctgagcccaggagtttgagaccagcctgggcaacataagaaggcccccggaattc

SEQ ID NO: 545 - DNA, 1867 bp, Homo sapiens
ggggctgcgccgggttccgtgtgtctatgtcaatgtgtctgtccttcactcctccattgtctgccgccactgctgctgctgctgctgctgccgctgctgctgcacgaatcgccgcagcccccagccttgcgcgtcgtcgctacctcctcggacagaaattttatgaataagcatcagaagccagtgctaacaggccagcggttcaaaactcggaaaagggatgaaaaagagaaattcgaacccacagtcttcagggatacacttgtccaggggcttaatgaggctggtgatgaccttgaagctgtagccaaatttctggactctacaggctcaagattagattatcgtcgctatgcagacacactcttcgatatcctggtggctggcagtatgcttgcccctggaggaacgcgcatagatgatggtgacaagaccaagatgaccaaccactgtgtgttttcagcaaatgaagatcatgaaaccatccgaaactatgctcaggtcttcaataaactcatcaggagatataagtatttggagaaggcatttgaagatgaaatgaaaaagcttctcctcttccttaaagccttttccgaaacagagcagacaaagttggcgatgctgtcggggattctgctgggcaatggcaccctgcccgccaccatcctcaccagtctcttcaccgacagcttagtcaaagaaggcattgcggcctcatttgctgtcaagcttttcaaagcatggatggcagaaaaagatgccaactctgttacctcgtctttgagaaaagccaacttagacaagaggctgcttgaactctttccagttaacagacagagtgtggatcattttgctaaatacttcactgacgcaggtcttaaggagctttccgacttcctccgagtccagcagtccctgggcaccaggaaggaactgcagaaggagctccaggagcgtctttctcaggaatgcccgatcaaggaggtggtgctttatgtcaaagaagaaatgaagaggaatgatcttccagaaacagcagtgattggtcttctgtggacatgtataatgaacgctgttgagtggaacaagaaggaagaacttgttgcagagcaggctctgaagcacctgaagcaatatgctcccctgctggccgtgttcagctcccaaggccagtcagagctgatcctcctccagaaggttcaggaatactgctacgacaacatccatttcatgaaagcctttcagaagattgtggttctcttttataaagctgatgttctgagcgaagaagcaatactgaaatggtataaggaagcacatgttgctaaaggcaaaagtgtttttcttgaccagatgaagaaatttgttgagtggttacaaaatgcagaagaagaatccgaatcggaaggtgaggaaaattaaatggctcaacaagcacaatacctaggttaccacacaccactttttgattgggaatgctgaaccatttgagaagagaaacttggcttctgttttcgcaaaggaaaaaaaaaataggataggcttcccttgtgcagagggagaaatggttttgtttttgttttgtttttaaatggagccctgaggcatcagctattatacttgggactctacctctcactcactatatgctaacttaaagccattcaacaaggagtcaagtagatctgaaattaaatactcaacagactcctccttttttagctgtatttttcaggtactgtgtggtgaccgccccactggtgtctattacaggccactttggtagttgtgtatctgctcatgtatgtgatttgacaaaccagttttttaaaataaatggctttttaaaaatctgggaaaaaaaaaa

SEQ ID NO: 546 - DNA, 2351 bp, Homo sapiens
ctcactcggttcaaggcagcgcgactgcgggtggcgcacgaccagggcgcagaccttggggcgcgcggcccatggagtcggggctgctgcggccggcgccggtgagcgaggtcatcgtcctgcattacaactacaccggcaagctccgcggtgcgcgctaccagccgggtgccggcctgcgcgccgacgccgtggtgtgcctggcggtgtgcgccttcatcgtgctagagaatctagccgtgttgttggtgctcggacgccacccgcgcttccacgctcccatgttcctgctcctgggcagcctcacgttgtcggatctgctggcaggcgccgcctacgccgccaacatcctactgtcggggccgctcacgctgaaactgtcccccgcgctctggttcgcacgggagggaggcgtcttcgtggcactcactgcgtccgtgctgagcctcctggccatcgcgctggagcgcagcctcaccatggcgcgcagggggcccgcgcccgtctccagtcgggggcgcacgctggcgatggcagccgcggcctggggcgtgtcgctgctcctcgggctcctgccagcgctgggctggaattgcctgggtcgcctggacgcttgctccactgtcttgccgctctacgccaaggcctacgtgctcttctgcgtgctcgccttcgtgggcatcctggccgctatctgtgcactctacgcgcgcatctactgccaggtacgcgccaacgcgcggcgcctgccggcacggcccgggactgcggggaccacctcgacccgggcgcgtcgcaagccgcgctcgctggccttgctgcgcacgctcagcgtggtgctcctggcctttgtggcatgttggggccccctcttcctgctgctgttgctcgacgtggcgtgcccggcgcgcacctgtcctgtactcctgcaggccgatcccttcctgggactggccatggccaactcacttctgaaccccatcatctacacgctcaccaaccgcgacctgcgccacgcgctcctgcgcctggtctgctgcggacgccactcctgcggcagagacccgagtggctcccagcagtcggcgagcgcggctgaggcttccgggggcctgcgccgctgcctgcccccgggccttgatgggagcttcagcggctcggagcgctcatcgccccagcgcgacgggctggacaccagcggctccacaggcagccccggtgcacccacagccgcccggactctggtatcagaaccggctgcagactgacaccctcggcccacgactgtcttcccaagttttacagacttgttctttttacataaaggaatttgtaggaaatgcagccaaaggtgcagtcggaaaagatgcaggggaaatgtatttatgcagcgacaccccacaatgtgaacaaacagacaaaaaatctgtgccctcgtggaattgacgttctgcttgggaacacagaaaagaactcggtgatgaaataatggagatgattccagtgacaaacgacagagatggtgatggtggtcagggaagacctctctgcagaggtagtgacttgtgatgtgagctgagacctctgtcctgggaagaccaaaagaaaagcatttcaggatgagggaatggcatgcgcaaaggccctgaggctgaaatgtgcccatgtgttctaagaaatgcagcgatgctggtgtgcctggagcagggacggagggggagaatgggaggagacaaggagctgaaggagtagttcccgaaggaccttgtgggtgatatagaggacttcgcttttgctctgagtgaggtgggagccatagaagcttctaagcagaagagggacttgccctaattcaggtgatcacaggtgtcttgtggcctccatgggaggttgaaaaccagagaaggtgaaggggggctgcactgagccacaggaacaatgatggagattccagctaagcccagaccccgtggattctagatagattttagaggcagcagacagaattactgaggaattgagtgtaagagtggaataaagttatcaaggacaatgccaagggtggggcacccccaaatttgactctgggagactcagccaaatcctatctggtaataaaatttcttttttatttttcttttctttctttctttcttttttttttttttgagttgggatcttgtgctctgtcacccaggctggagtgcaatgggcacaattatagctcactgcagcctggaactcctgggatcaagcctggagttcctgcttcagcctccctagtagctgggactacaggcatgcaccaccatgcccagttaataaaatttcttcaaatgcaaaaaaaaaaa

SEQ ID NO: 547 - DNA, 2221 bp, Homo sapiens
cttggctcgctgcgcctctgcctcccaggttcaagagattcttctgcctcagcctcctaagtagctgggattacaggaaatgagaacagaagccattgccagacctctggaaataaacgagactgaaaaagtgatgagaattgcaataaaagagattttgacacaggttcagaagactaaagacctgctcaataatgtggcctctgatgaagctaatttagaagccaaaatcgaaaagagaaaattagaactggaaagaaatcggaagcgactagagactctgcagagtgtcaggccatgttttatggatgagtatgagaagactgaggaagaattacaaaagcagtatgacacttatctggagaaatttcaaaatctgacttatctggaacaacagcttgaagaccatcataggatggagcaagaaaggtttgaggaagctaaaaacactctctgcctgatacagaacaagctcaaggaggaagagaagcgcctgctcaagagtggaagtaacgatgactcggacatagacatccaggaggacgatgaatccgacagtgagttggaagaaaggcggctgcccaagccacagacagccatggagatgctcatgcaaggaagacctggcaaacgcattgtgggcacgatgcaaggtggagactccgatgacaatgaggactcggaggagagtgaaattgacatggaagatgatgatgacgaggatgacgatttggaagacgagagcatttctctctcaccaaccaagcccaatcgaagggtccggaaatctgaacccctggatgagagtgacaatgacttctgacccttttgccaagggaccctggcagattaaaaccctcagacttgtaggtaaatgggaacttagaaggttaggaaggtaacccctgttttgtttactaagctggctggactcatgatcactgaagcaatacttatttctgctttagcctcctatgtttgcattccatgaagcttaaataagaattgaagcaaatccctaagatttatttttttccaccttatttatcttctaaaacttgaggaatgcatgtgttcttagtgattcacatccacgggacaaaaactcaagaagaaataagagctgacgccacacaagtcttggctgcttttgttactatacattttctctgagactccagcagagttggggctggaacttggcactggggactcatgtttggaatcgtaggggaacatctggctgttaatcacttgcacagttgagaacatttcctatacatcggcttttaattctagctcttatttcattttgtaatcttattttctttcgtctgcatgttcacaataccaagcattaaatgtattttaataactaaacttttctgaaagaaggttagctaaagttaaatgaaaacttggtttctttgaaaatcaggcaatagagacaggctccagatgaggaatcctccattttctgtccgaagctgacattcctctggcagtccagttcaccttggattacagccaccttcatgtttccacggttggtactaaatctggaaactctggtgacctgggctgccctctcagaaactccagactcccatggcaatgacagccgggacacttttcttccctccagccagggtttctctaaaggagctttgttttgtctaaagtgtggcaagacatagtgcacaacacagggacaaaggcaggtttcctgcagctcgctacctaagtgtttctgtaggggaaggagccaattaagaaaaagtgttggtacagattcatgtttctgatttaaaaaaacaacaacacaggattgaattaagtagagtaatagcactagaagaatttttctgttgtgaaattagaagtggagttggtttttttcttttttcttcttctttttttttaatatgaaaagtacttagctgggagtggtggcaagcgcccttgggtccagctactcaggaggccaaggtgggaggatcacttgagcccaggagttttagactagcctggacaactaagtgagactccatctctacaaaaaatttaaaaattagccaggtgtggaggggcatgcctgtggtctcagctattcaggaggctgaggcaggagaatcacttgagaccaggaagttgaggctgcaatgagccgtgatcatgccactgcactccagcctgggtgacagagtgagaccctgtcttt

SEQ ID NO: 548 - DNA, 1744 bp, Homo sapiens
cagcgcccgggccatggcggcggcggtggcgggagctgctgtctgagcagcggttgcggaccgagcgaacttggcccaggagcccgggcctagggagaggcgcggcggcggcgggagcgcgaacggctggagctggccttcttcgccttctcctcggctgtggagccctggtggggggtctgcgcccggtcaccatgacgacgccggcgaatgcccagaatgccagcaaaacgtgggaactgagtctgtatgagctgcaccggaccccgcaggaagccataatggatggcacagagattgctgtttcccctcggtcactgcattcagaactcatgtgccctatctgcctggacatgctgaagaatacgatgaccaccaaggagtgcctccacagattctgctctgactgcattgtcacagccctacggagcgggaacaaggagtgtcctacctgccgaaagaagctggtgtccaagcgatccctacggccagaccccaactttgatgccctgatctctaagatctatcctagccgggaggaatacgaggcccatcaagaccgagtgcttatccgcctgagccgcctgcacaaccagcaggcattgagctccagcattgaggaggggctacgcatgcaggccatgcacagggcccagcgtgtgaggcggccgataccagggtcagatcagaccacaacgatgagtgggggggaaggagagcccggggagggagaaggggatggagaagatgtgagctcagactccgcccctgactctgccccaggccctgctcccaagcgaccccgtggagggggcgcaggggggagcagtgtagggacagggggaggcggcactggtggggtgggtgggggtgccggttcggaagactctggtgaccggggagggactctgggagggggaacgctgggccccccaagccctcctggggcccccagccccccagagccaggtggagaaattgagctcgtgttccggccccaccccctgctcgtggagaagggagaatactgccagacgaggtatgtgaagacaactgggaatgccacagtggaccacctctccaagtacttggccctgcgcattgccctcgagcggaggcaacagcaggaagcaggggagccaggagggcctggagggggcgcctctgacaccggaggacctgatgggtgtggcggggagggtgggggtgccggaggaggtgacggtcctgaggagcctgctttgcccagcctggagggcgtcagtgaaaagcagtacaccatctacatcgcacctggaggcggggcgttcacgacgttgaatggctcgctgaccctggagctggtgaatgagaaattctggaaggtgtcccggccactggagctgtgctatgctcccaccaaggatccaaagtgaccccaccaggggacagccagaggaaggggaccatggggtatccctgtgtcctggtctatcaccccagcttctttgtcccccagtacccccagcccagccagccaataagaggacacaaatgaggacacgtggcttttatacaaagtatctatatgagattcttctatattgtacagagtggggcaaaacacgcccccatctgctgccttttctattgccctgcaacgtcccatctatacgaggtgttggagaaggtgaagaaccctcccattcacgcccgcctaccaacaacaaacgtgcttttttcctctttgaaacctgcaaaaaaa

SEQ ID NO: 549 - DNA, 3476 bp, Homo sapiens
atccccgcctgacgggagctagccctcagtccgcccgagctgtggttgtgggcgccggacaagtccaaggcgcctcctcccaatatggacagccgctacaacagcactgcgggcatcggggacttgaaccagctgagcgctgccatcccggccacgcgggtggaggtgtccgtgtcctgcagaaatcttcttgacagagacacattttctaaatctgatccaatttgtgtcttatatgtacaaggagttggaaataaagaatggagagagtttggaagaactgaagtaattgataatactttaaatcctgattttgtaagaaagtttattctggactacttttttgaagaaagagagaatcttcgttttgacttgtatgatgttgattcaaagagccccaacttatccaaacatgactttctgggacaagtgttttgtacattgggagagatcgttggttcacagggaagtcgcctggaaaaaccaatagtaggaattccagggaagaaatgtggtacaatcatacttacagcagaggaattaaactgttgcagggatgccgttttgatgcaattttgtgcgaacaaattggacaagaaggacttctttggaaaatcagatcctttccttgtattttatcgaagtaatgaagatggcagttttacaatttgtcacaagacagaagttgtcaaaaacactctaaatccagtatggcaagcattcaagatctcagtcagagcattatgtaatggagactatgacagaacaatcaaagtagaggtgtatgactgggaccgagatggaagtcatgatttcattggagaatttacaacaagctatagggaactttctagagggcagtcacaattcaacgtatatgaggtggtgaatcccaaaaagaaaggaaaaaagaaaaaatatactaattctggaacagtaactttactctctttcttggtagaaacagaagtttcattccttgactacattaagggagggacgcaaatcaatttcacagtggctattgattttacagcatcaaacggcaaccctgctcagcccacttccctccactacatgaatccttaccaactgaatgcctatggtatggcactaaaagcagtgggagaaattgttcaagattatgacagtgataaaatgtttccagctctaggatttggtgcaaaactgcctccagatggaaggatatctcacgaatttgctttgaatgggaatcctcaaaacccctactgtgatggcattgagggggtcatggaggcttattacaggagtctgaaatctgtacaactatatgggcccaccaactttgctcctgtaattaatcatgtagcaagatatgcttcttctgtaaaggatggctcccagtattttgtgcttctgattgttacagatggtgttatctcagatatggcccagactaaggagtccatagttaatgcctcaaaacttccaatgtcaataattatagtaggtgttggaccagcagaatttgatgcaatggtcgaattggatggagatgatgtaagagtctcctctagaggaaaatatgctgaaagagacattgtgcagtttgtgccattcagggattatattgacagaagtggaaaccacatactgagcatggctagattggctaaagatgtcctagctgagatccctgagcagtttctctcctatatgagagcccgaggaatcaagccatcacctgcgcctcccccatacaccccacctacacatgtgttacagactcaaatatgactgtgctctgaaatgctaatgtcaactacaaatcaaaagtgctgagttaatgctttgtgcctggtgctctgtaatgaaccaggcaatgagatagttttctcagtttggtttcagcagttaatgtgctttcttggatccaaatttaaatatcttcctaaaccaaaactgtaaatatggttgttgcatgagcaacagaaaaaattgtttaaatgcttgaagcaaagtatggatgtcttctctaaatctttctttctttttttttttaacagaaacagctaatttccaatgtattgttgggaaaaagcacaaactgtgtttttaactcaaatattgtcttcgactgctatgtgtataggaaagcagtctctgtatcaatgtttacatgttactactttttaaatttcaatacttttataactgttcttaaaaataagagttttaaatactgaatcctttgtcttctaaattgcaatagctataatcacaagagcaatatctctttgaatgactgtctggacaaacacaattgcaaataagggaagggaaaaatgcttttctatttttcagtaactggattgtcttaagaaactacatctgcttaataaacaatttctcagcaatgtttgctgggtatgggagtttaagcccggcagatgtgtctcctggttgaacatgcatttttcatggagtttgggttctaaatttagactgcagttggtttgtattttgtaacactaagtagaaattataaaaagtcaaacattgtgatctataaatgcacagaaaatactttgtaaaaagtagcatccttatataataatgctatttagaaagactgaaaccaagactatttaactgtgaactatgtagcagatgttttaaactttttattccattatatcttgtctagatattttaattcaaagggatactggctctcttgatcggaatttcttgttatcaccattccacgttgccacacaaggtgcacaggctggaagtcttttgtgaaattcccagttaaatatatacaactatgtgacttagtgcacaacacatttgtgaaataacctactcctatatactgacctgcctgtccacgaataattgtaaagggtttttgcatgtacagtttttacaagaattacagttttgtgaagttgtgtctaaattaaagcatttctttagaacaaatggccttaaattctcacggaattcctggaaatgattgtgaattgccttcaaataatagaaaagtgtatttatttgtgtgtgtgtgtgtgtcaaaaatgtaactgctttataatattttttccttacctatatattctatttaatacttggtttatttctactgtacattgttttctttgtcccaagttgacctagggtgacttttataagcatgaaactattttactggaaagaaaaatatatacatccacatatctaacagtatcaatgttatataactatgtaataattgttgatttttaattatgtattaaaatctttaaatcataactatttgctttgtacgtttcatgtatgaatgacaatagtttgatgatttcctttactgatcttaaatatttatgccactacagtgtattacctacagatttttaaatttagctttatttatcaacccaaaaaacaaataaataagatcaatattctttaaaaaaaaaaaaaaa

SEQ ID NO: 550 - DNA, 1568 bp, Homo sapiens
actgcgcaggcgcgcggggcaagagggtggcagtgcgcctgcgccgcgtcggcgtgcggaacgccgcggtgtctcggcgcctctgcgcgcgggaagatggcggaacaggctaccaagtccgtgctgtttgtgtgtctgggtaacatttgtcgatcacccattgcagaagcagttttcaggaaacttgtaaccgatcaaaacatctcagagaattgggtcattgacagcggtgctgtttctgactggaacgtgggccggtccccagacccaagagctgtgagctgcctaagaaatcatggcattcacacagcccataaagcaagacagattaccaaagaagattttgccacatttgattatatactatgtatggatgaaagcaatctgagagatttgaatagaaaaagtaatcaagttaaaacctgcaaagctaaaattgaactacttgggagctatgatccacaaaaacaacttattattgaagatccctattatgggaatgactctgactttgagacggtgtaccagcagtgtgtcaggtgctgcagagcgttcttggagaaggcccactgaggcaggttcgtgccctgctgcggccagcctgactagaccccaccctgaggtcctgcatttctcagtcggtgtgtaatcacgttccagggcccaaagcccagctctttgttcagttgacttactgtttcttaccttaaaaagtaattgtagatggaaatcagttgtgtttggcaggagaatcaataaaaatctttgattcagacagcttatggggtattttaagcattcttagactagttgaacatctcactttgccccagttacaaaaatagtagaacaagcaacataaaacaatgaaggaaaacctcacttgaaggcccaggtcaacatctaagcctgttgagacttagataatcgagtctacctcttcagtaggtttgtgtggatggcctggagggcaggtgccctctgctccccagtgctacctctctcttccctagggccttttgtggattgacagtagtcccctccgtaggagctcacagtctagattagaagtgttttaatttctacacacccatagtgcacacttgtatattgaaaagatagggaagagagaaacatttatggaatcagtcgttggcaccttcaatacttcatgatttttgtcgagtttacttcatgaggaggtcagcccattggctcccatctgaaccactttgcctctgaaacttaattacatccagaaagaaggacacttgtatgctagtctatggtcagttgaggaatatgactgtttttatatgcacatgtaacccaaatgtccaatataaattggcttattttttaaaataattttaaaagttgggaaaagtgttattatttggcatgcttaaatattgaataagtattcttcatcagcatttaataaatgtataggcagatgtaaggtaatttctgtgtattttgagataatgtcaaaatcatgaatatttcaaaataaactggggagttataaaaatacaactagagatataaaaaaaaaaaaaaaaaaa

SEQ ID NO: 551 - DNA, 1772 bp, Homo sapiens
gaaagcgggcttcccgccccgcccagaccgccgaggctgccgccggagtcgccaccgccgcgccctcgcccacccgcccgcccgccgctcccggccccgctcgccccctccgccgccgccgcccgcccctgcgactacgctgcggcctcccgcccgctcccgctcgctcccgcggccctcgctcgcctcgcgccggcagttttgggcctacacctcccctccccccgccagccgccaaagacttgaccacgtaacgagcccaactcccccgaacgccgcccgccgctcgccatggatgccggtgtgactgaaagtggactaaatgtgactctcaccattcggcttcttatgcacggaaaggaagtaggaagcatcattgggaagaaaggggagtcggttaagaggatccgcgaggagagtggcgcgcggatcaacatctcggaggggaattgtccggagagaatcatcactctgaccggccccaccaatgccatctttaaggctttcgctatgatcatcgacaagctggaggaagatatcaacagctccatgaccaacagtaccgcggccagcaggcccccggtcaccctgaggctggtggtgccggccacccagtgcggctccctgattgggaaaggcgggtgtaagatcaaagagatccgcgagagtacgggggcgcaggtccaggtggcgggggatatgctgcccaactccaccgagcgggccatcaccatcgctggcgtgccgcagtctgtcaccgagtgtgtcaagcagatttgcctggtcatgctggagacgctctcccagtctccgcaagggagagtcatgaccattccgtaccagcccatgccggccagctccccagtcatctgcgcgggcggccaagatcggtgcagcgacgctgcgggctacccccatgccacccatgacctggagggaccacctctagatgcctactcgattcaaggacaacacaccatttctccgctcgatctggccaagctgaaccaggtggcaagacaacagtctcactttgccatgatgcacggcgggaccggattcgccggaattgactccagctctccagaggtgaaaggctattgggcaagtttggatgcatctactcaaaccacccatgaactcaccattccaaataacttaattggctgcataatcgggcgccaaggcgccaacattaatgagatccgccagatgtccggggcccagatcaaaattgccaacccagtggaaggctcctctggtaggcaggttactatcactggctctgctgccagtattagtctggcccagtatctaatcaatgccaggctttcctctgagaagggcatggggtgcagctagaacagtgtaggttccctcaataacccctttctgctgttctcccatgatccaactgtgtaatttctggtcagtgattccaggttttaaataatttgtaagtgttcagtttctacacaactttatcatccgctaagaatttaaaaatcacattctctgttcagctgttaatgctgggatccatatttagttttataagcttttccctgtttttagttttgttttgggttttttggctcatgaattttatttctgtttgtcgataagaaatgtaagagtggaatgttaataaatttcagtttagttctgtaatgtcaagaatttaagaattaaaaaacggattggttaaaaaatgcttcatatttgaaaaagctgggaattgctgtcttaaaaaaaaaaaaaaaaaaaaaaaa

SEQ ID NO: 552 - DNA, 2361 bp, Homo sapiens
atttctgctcattccgcggcgtcggctgcggctgcagtggtggtggcgggtaccgcacggggtatggtccccgggtccgagggcccggcccgcgccgggagcgtggtggccgacgtggtgtttgtgattgagggtacggccaacctgggaccctacttcgaggggctccgcaagcactacctgctcccggccatcgagtattttaatggtggtcctcctgctgagacggacttcgggggagactatggggggacccagtacagcctcgtggtgttcaacacagtggactgcgctcccgagtcctacgtacaatgtcacgctcccaccagcagcgcctatgagtttgtcacctggctcgatggcattaagttcatgggcgggggtggtgagagctgcagcctcatcgcggaaggactcagcacagccttgcagctgtttgatgacttcaagaagatgcgcgagcagattggccagacgcaccgggtctgcctcctcatctgcaactcacccccatacttgttgcctgctgttgagagcaccacgtactctggatgcacaactgagaatcttgtgcagcagattggggagcgggggatccacttctccattgtgtctccccggaagctgcctgcgcttcggcttctgtttgagaaggcagcccccccggccttgctggagccgctgcagcctccgacagatgtgagccaggacccgaggcacatggtgctggttcggggactcgtgctgcctgttgggggtggctcagccccaggccccctccagtcaaagcagccagtccccctgcctcccgccgcaccctcaggtgccactctctcagcagccccccagcagcctctgccccccgtccccccgcagtaccaggttcccgggaacctgagtgcagctcaggtggccgcgcagaatgcagtggaggctgccaagaaccagaaggctgggctgggccctcgcttctcgcccatcacccctctccaacaagctgctcccggagtgggtccccccttcagccaggccccagctccccaactacccccaggaccccctggcgcccccaagccaccacctgcttcccagcccagtctggtctccactgtggcccctggctccggcctggctcccacggcacagcccggggcaccgtccatggcaggcactgtggccccaggaggggtgagcggcccttccccagcccagctgggagccccagccctcggtgggcagcagtcagtctccaataagcttctggcctggagcggggtcctggagtggcaagagaaacccaaacctgcctcagtggatgccaacaccaagctgacgcggtcactgccctgccaggtctacgtgaatcatggcgagaacctgaagacggagcagtggccccagaagctgatcatgcagctcatcccccagcagctgctgaccaccctgggccctttgttccggaactcaaggatggtccagttccatttcaccaacaaggacctggagtctctcaaaggcctctaccgcatcatgggcaacggcttcgcgggctgcgtgcacttcccccacacggcgccctgtgaggtgcgcgtgctcatgctcctgtactcgtccaagaagaagatcttcatgggcctcatcccctacgaccagagcggcttcgtcaacggcatccggcaggtcatcaccaaccacaagcaggtccagcagcagaagctggagcagcagcagcgaggaatggggggacagcaggcacccccagggctggggcccattctggaggaccaagccaggccctcacagaatctgctccagctccgcccaccgcagccccagcctcagggtaccgtaggggcctctggggccacggggcagccccagccccaaggtactgcccagcccccgccaggtgcccctcaaggccctcctggagcagcttctggcccaccccctcctggacccatccttcggccccagaaccctggggccaaccctcagctgcgaagcctcctcctcaacccaccaccgccgcagactggggtgcccccaccccaggcctccctccaccacctccagccaccaggggctcctgcgctgctgcctccgccgcaccagggcctggggcagccccagttggggcccccactcctgcatccaccacctgcccagtcctggcccgcacaacttccccctcgggctccactgccaggtcagatgctgctgagcgggggtccccggggcccggtcccccagccgggcctgcagcccagcgtcatggaggacgacatcctcatggatctcatctgaatccccaacacccaataaagttcctttttaacacacaaaaaaaaaaaaaaaaaa

SEQ ID NO: 553 - DNA, 3091 bp, Homo sapiens
agctgcgtggtgacggagatgcccgttcgctcgggatcaggaacggtgagctcctgggaccgcaatgccctgagaacgcagccgggtgctgagcctccggagtccggtagctgaatgaaatacgcagggatcaccagccggacccaaatcttgcgtccctgccagcatcctggagtcctaagaggcagggattggagcggacaggatctcagaactctggtcccgggcgcacaacggcggagtcgctgttcctggtgctgaaacgctcagtcctggaagaacgtggccgcctgcccgcctggtaccgcgccgcggccgctgcggggaactgtccagtgctgaaaacggatgcggcccggcccgcagagctcagacccaagcctgccgcacccagcggagctcgaaccgagctcctggaagcgctgacgcagagcgcagggagagccggagcggcgagctccaagcctggcatggacctgcagagacccgattcctaccagggaggagctggccctgacttcaacgaccacgtcctgcataagaccatcctggtgggtgacagtggtgtgggaaagacgtctctgctggttcagttcgatcagggcaagttcatccccggctccttctcggccactgtgggcatcggattcacgaacaaggtggtgactgtggatggcgtgagagtgaagctgcagatctgggacaccgctgggcaggaacggttccgaagcgtcacccatgcttattacagagatgctcaggccttgcttctgctgtatgacatcaccaacaaatcttctttcgacaacatcagggcctggctcactgagattcatgagtatgcccagagggacgtggtgatcatgctgctaggcaacaaggcggatatgagcagcgaaagagtgatccgttccgaagacggagagaccttggccagggagtacggtgttcccttcctggagaccagcgccaagactggcatgaatgtggagttagcctttctggccatcgccaaggaactgaaataccgggccgggcatcaggcggatgagcccagcttccagatccgagactatgtagagtcccagaagaagcgctccagctgctgctccttcatgtgaatcccagggggcagagaggaggctctggaggcacacaggatgcagccttccccctcccaggcctggcttattccaagaggctgagccaatggggagaaagatggaggactcactgcacagccgcttcctagcagggagctatactccaactcctacttgagttcctgcggtctccccgcatccacagggagggtaaaacacttagcttttattttaatagtacataatttaataccaaaaaaggcgcctggatccccaaaaaaccgaggctgggagctagtggcccttttgctttctaggacttggggggccggccctccctcctaagcataacaaaggtggtgttgctccagctcagccccaggggacacagatgcactttgggggtgagggcaggtaatgactccatcgcaccctcagttcagctggacagaggctcaggtgaccccagccttcactgtctcccgctctccaggagcttatcttcgccccatctcccaaataagtgggcccttgtgctgtgaggaagaccaaagcctcagggaagataagagatatggagatgggagggggaggacaaggggcagagagtagggtctagctggctatctctggccttactaacacccccctggaggcatgccccttttctccagcacacaagcacattggggcacctggaaatattggttccaggctcctgttctctggacttcagatcctgggggagcccctcccccccctgaatccctggcttagctaccttcctgcctgtgcacctaaaaacctcaggtcagaactaggaaaagagttttgtttttatttttttgaaatggagtctcgttctgtcgcccaggctgaggtgcagtagtgcaatctccgctcactacaacctccactccctggggctcaagcgatcctcccacctcagccgccgaagtagctgggactataggtgtgtaccatcacacctggctaatttttgtattttttgtagacacagggtttcgccatgttgcccaggctggtcttgaattcctgagctcaagcaacctgccggcctcggcctcccaaagtactgggattacacgcagaaggcaccatgcccaggctagatgtgtcttatcccaatcctttggcaggcatgcagctccacaggcgatttcttcaagcagctgaagtgtttagccctcctgggttaagagccagataaggagaaatccctttcctaggtttggaatgtgttgtgaaaaaaaagagaaatccctggctcctggagctggtgggagacaagattaagcaaacctcccctgacatgtatccctttgaccccaagctctgcctcctccctgaccacccatgccctttcctttaacttctcaaacagataccagggcctaaactgctttacctcccctcctactgagtcaggttaggtggtgggaggtcacccatttccgagttaaaccaatgcaatatgagtaaaacaaagtcatgtgggtatgtctggggtagagagaggggtagcaagttcatgtgtcctccttggtcacatatctcccaaagctccgatccctgccatgggaagtggacaggaaacatgaggtcatgacctgcaggcatctttactgcagctctgccggcctggagggggagagggggaggaagaagtatgcgctgcacatttctgaggctactgcatttgctttcaaggcagaaatcttgctctgagcagtcagcggctccagtttgggcccgataaggaagttctccgtggcctccctcaggcagagcagggaggaggctgacattgccagtctcttctggggcccaaggcaggttgcaggagatccaatcccatagacagctctgggcctcttgcatttgagtttttcagaattaaactgcagtattttggaaagcaaaaaaaaaaaaaaaaaaaaaaaaaaaaaaaaaaaaaaaaaaaaaaa

SEQ ID NO: 554 - DNA, 3435 bp, Homo sapiens
cgtcacccaggccttgtctcccgagtcattggcgtcgtggttcaaaagaaatggaagaaaaggagcgatgtgaccgattgtgttcggtcctcctgctttgaggcctggcatttgcagagggaaacagcaagaaaatcgtggggattttggaggggggtgggagggaagggtggggaaacggaaacaaggtcttacattttatgtgtttttttaaattctgcactttgacagtggtagcaaaataaaagtaatccaaaagttatttttctattgagaagagagaagaggtgggttttatttttttccttttgattccaatcttttctcccagtgacaaagcataaatcatggacaccagagaataaggtggacctcaggaatccggaaaagactgagaagcttacattcttcctctagagggaagagtggggtgtttatagccatctctggaacctaaaacaaaaaacatgagttgtgtgccatggaaaggagacaaggccaaatctgaatcattggagctgccccaggcagcacccccacaaatctaccatgagaaacagcgcagggagctttgtgccctccacgccctcaataacgtcttccaggacagcaatgccttcacccgggatacgctgcaagagattttccagaggttgtctccaaacaccatggtgacacctcacaagaagagcatgctgggaaatggcaactacgatgtgaatgtcattatggcagcacttcagaccaaaggctatgaagctgtttggtgggacaagcgcagggatgtcggtgtcattgccctcactaacgtcatgggcttcatcatgaatctgccctccagcctatgctggggtccactgaaactgcccctcaaaaggcagcactggatctgtgttcgagaggtgggaggggcctactacaacctcgactccaaactcaagatgcccgagtggattggaggcgagagcgagctcaggaagtttctaaaacatcatttgcgaggaaagaactgtgaactcctgctggtggtaccagaagaggtagaggctcatcagagttggaggaccgatgtgtaacagttctgcccaacctccctctcgcctcagccccttcagtcctctgtgacgtgctgtggcctctacagtgggtctgcccttgccacttccccaaacatctcatcaagtttttccccttcagatctgacagtgcaataggacagacgtgtggactgttataagaactactcagtgttttgttcctgggcaaggaaggtaggagttctgtgcacttaaggccagtggtcacaaacccttgttttatttaagagacagaggagaaagtggagcggggagggaatcctagcttattttcccttttctatgaggacttgacacaggttctgctgagttgtcactgctgctccagactcacctagagatgctgcctccactttccatcctgtctgggtctgaaaacagtgggtctgcagatagtgcccacaaaccccatgtgactggtttgaaggacccagagcataaaggtctctcaggaaaccatgtccaaaaccctagcagcggtacagcatgctgtctccaacccttatccccaggtttaagggtggtttatggccatacgtggaggttttttgttgttgtttttgagactgagtttcactcttgttgcccaggctggagtgcaatggcaccatctcggctcactgcaacctccacctcctggttcaagcgattctcaggcctcagcttcccaagtagttgggattacaggcgcctgccaccacacctggctaattttgtatttttagtagagatggggtttctccatgttggtcaggctggtctcaaactcccgacctcaagtgatctgcccgccttggcctcccaaagtgctgggattacaggcgtgagccaccgcacccggcagagttttataatgaaaaattaactaatattctagtatgaagtgaggaggatactgaacaggatgtggctaaagccaacctgggacagccatggggtggcttggtttcttcactccagtgttgtccctaccatttcgcagcattgatttaggaggctctgggacaaaagagaagccaaagagcagttttcccagttcactcactctggcaaaatcaggaaaaaaaagtctgcttttgacatcaaattccactaatttggggcagcgttgggtgaggaaagtattgtgaagacaggcttcttggagtaggggcagccacaattcagtagacactctaggctcggaggctgccactgtagttgccaagctcaggttgggtggttctgtgctgtatggatggaataggacctgggctggtcatcttcatgtcgtttcctctctgtatcaatggaagttcaacccgcccctacctcttcagatagttgtaggccacttttctcttgtaactttggaaaacaaaagaggagaaataagtatcataccatatgcgtgtctccaaagtggatgtggttgcctcaaggcaggtggcaggcaggggtgacctgctggccctcagatcaatggtcgtggcaggtctgagagctgtcccactggccagacttctctccagcagcaaagccagcctggggcttgcatgttgatcctgagcaagcttaacggggtgaagctgggctttctcccccctgtgactggagtgcatgttgacaccagcactttttctgcacatgtatcttcaatccaacaaggccgtttttttaatgctgagtaacaggccaccaagcggctactgcgttatatcttctcagcaactggccgcagtctcttctgcaccattttctacaccagacctgcttggcaccacagggagctcttttcctgccctgcacaatgacattccaaccaccaccagccagacattacagccaaccttgctgattgtcacaagcaggaccttggggccactggcactgtcagatagtaagccatttcttgggtagaggaggaaactcctctccacaaatccacttgggcctgtgcaaatggcacttgaaagagtccccatgcacttggagtccatgagccaatgggatatgcaaagacgcttaaacatttcagggctggtttctctgttcatatccaattctggtgcttaggaacagggacccatgctgatgcccaagggcaaaaagccccacttcctttaaggaagtgaacaggcctgaccctgatgcccaataacgggcaaccctaggctttttgtttttcttgcttttattcctttttgttgttggccttgtgctgcgtttgtttacaaaagatgtattttgtttaaccaaatattaaaaatggaaaactccatatatgtctccttgtctgcctgaattctataattgtgtaaagaaaaataaactttagtatgacgctgttttaaaagga

SEQ ID NO: 555 - DNA, 3669 bp, Homo sapiens
gcgaggccccaagctggcccgggagaggactctgcgggcgaagtggctgcgcaaggagagaacttttcctgcacaaggaacgcctcgtggggagacccaaggcaggagcggtccggagccggctgcggcgtgtgcggccggccttgggacagcgatcgccgcgggtggcaacagagagccccaagcaaaagtgggagcaggagcttggaggtgagcacaggaagccccacttgaggcttttacgcagcctctagtctctgtttcttctggaataggcaagtgtcctttcaactctaagagaccagcagaggccactgtcccttaagactgccggagtcctcaccacttctccaggattccagaggagactgtggcgatggtgaatgaaggtcccaaccaggaagagagcgatgacacccctgtgccggagtccgcactccaagcggaccccagcgtctcggtccatcccagcgtctcggtccatcccagcgtctccatcaaccccagcgtctctgtccaccccagcagttcggcccaccccagtgccttagcccaacccagtggcttggctcaccccagtagctcgggccctgaggacctcagcgtgatcaaggtgagcaggcgccgttgggccgtggtcctggtgtttagctgctactccatgtgcaactcctttcagtggatccagtacggctccatcaataacatcttcatgcacttctacggtgtcagtgcctttgccattgactggctgtccatgtgctacatgctgacttacatccctctgctcctgccagtggcttggctgctggagaagttcggcctgcgcaccattgctctcactggctcggctctcaactgcctgggggcctgggtgaagctgggcagcctgaagccgcatctctttccggtcaccgtggtgggccagctcatctgctctgtggcccaggttttcatcctgggcatgccctcccgcatcgcttccgtctggttcggggctaatgaggtttcaacagcctgctccgtggctgtctttggcaatcagcttggaattgcgattgggttcttggtccctcctgttttggtacccaacattgaagaccgggacgagcttgcctaccacatcagcatcatgttctatataataggaggtgtggccactctcctcctcatccttgtcatcattgtgttcaaggagaaacctaaatatccccccagcagggcccaatccctgagctatgccttgacctctcctgatgcctcatacttaggttccatcgcccggctcttcaaaaatctcaactttgtgctgcttgtcatcacctatggtctgaatgctggtgctttttatgccttgtccactcttctgaatcgcatggtgatctggcactacccgggggaagaagtgaatgctggaagaattggcctgacgatcgtcattgcaggaatgcttggggctgtgatctcaggaatctggctggataggtccaaaacctacaaagagacaaccctggtagtctatatcatgacactggtgggcatggtggtgtacacgtttaccttgaacctgggacacctgtgggtagtgttcatcactgctggcacaatgggcttctttatgactggctatctcccactgggatttgagtttgctgtggagctcacgtacccagaatcagaaggcatctcctccggcctcctcaacatatctgcacaggtatttgggatcatctttaccatctcccagggccagattattgacaactatggaaccaagcctgggaacatcttcctgtgtgtgttccttactcttggagcagccctcactgcattcattaaggcagatctccggagacagaaagcaaacaaagaaactcttgagaacaaactccaagaggaggaggaggagagcaacaccagcaaagtgcccactgctgtgtcagaggatcatctctgagaggaaggtggtgacaactcagggaacacgaacaccccaccttttccttcagcacagctctcaccgccagcacaaagggcttcgctagagatgtttttggagggaatcagtgggactatttgtggcatggatggcctattcctcctagaacccacgtaagagcttggatgatttagttggagaaaattgcacctatcaccaaatgcaaatttgattcccacctccacccccttttaggttatgggagttggtgttgggacagggtggcagagaatattggagtcaatcctagcttggtctcttgccttccctcttttcctccatccatcgtggacaatgcctgcaaaattttcacaggaagaaagcctattcaggatattaacttgaaatttccagtgtcctaagagcctctcatgaagcccagttctaataagtggcaagctgctctgccggggtcatctcctgggtcatcggactgattgctcaagttctgcaggagaggaagcaccattagaacaactccatcagaacagctccaccgggacttgtgggcctaaattttcctggcctaacgggtctgtctccaaaccctctttcctaagagctgagcaaaccaaccataataaacttgacaaaagactttgttgtggccatgacagagataccgactcaggagggctacctacctaggtgtgatcatgctgggggctaccttctgagtatatttgtgaaagcacatatttgggaactctggtagcttgagttgggaatgggaaggttcttttttacagaagtacttccccagggacttctgtgtgtcacagtcacctctgatgcctttatcttgatgttgcattgggaatctcagccatcagcccaagtgcttgttttattccaaggcagggtaatccccgtcaacttactctaacctttgctgaaaactaatcttgattcattctactctgaaaatccaaaggtgcttctgagagataagagggaaggggtagaaggaaaggtgccccttgaaatgggaattgagcctgttagaattaaaagcttatctcacctctgctggggacagtatttgcaccaccaacccctctcctcacctgctttgagcgataatctttatcagatattctaaacttaaagggattccctttaaaccaactcaagctgatctttcctatctagcctgctgtttggctgtactcatgggctttggtaatatctcctaaaaatgaggttttggtaatttttcctatgcattgggcaactgtgatcgtgaccactgtgctgtcttgctccagccactgccctggcctcagcatatcagggcagcctgtgctggctgcaatactgtggtgcttgggccactgcctgagaggagccaggtttgtgtgtgtctgcatgtgtgtgtgtgtgtgtttgtacagattcaagcaatggatgcaaggaacatgctgtatgtaatagaagaaagaagtccacgttttcggcagaagtagtgagtcagtgtggaagagaggtgagggtgtgctttactttttgataaagagaaagatgtttactcataaacccttcaaaaggtattaacaaaatgtttaccaaacctattgctttattttaaaaacataatttgtgttttctatttgtaagatctgacatttcgaggcaataaaaacttctcagaaagtaaaaaaaaaaaaaaa

SEQ ID NO: 556 - DNA, 1707 bp, Homo sapiens; identical to SEQ ID NO: 155

SEQ ID NO: 557 - DNA, 2339 bp, Homo sapiens
gattgttacgcacctgacagctagcggaaggacctttctgtcctggttccctgaagcatcgagagggaaccgcggccggcaggccggaccgctccggagaggaggcagcggcagtttgagcccctgtaaatgttatatgtgtacttttttttactatgtggcgtcgaagcctgtggacattttcgcggtccgggtccctgcggcggacgggtcggatcgtgctcgtggccagggcgcagtcaggtgtcgcgtggtcctgatctaggaagagactgcggccttatcaccgtctcggtgtctgctttcaccttcaactgcccccctcctcacctggaccgctcaccctcctcctcccctctcaccccgccatccccaccagtccccacctgtctctgtagactgcaagactcatcaagtgacttgctgagcaaaccctgccgagaagagattttcttcaatcacatctgaataaatcacttgaagaaagcttatagcttcattgcaccatgtgtggcatttgggcgctgtttggcagtgatgattgcctttctgttcagtgtctgagtgctatgaagattgcacacagaggtccagatgcattccgttttgagaatgtcaatggatacaccaactgctgctttggatttcaccggttggcggtagttgacccgctgtttggaatgcagccaattcgagtgaagaaatatccgtatttgtggctctgttacaatggtgaaatctacaaccataagaagatgcaacagcattttgaatttgaataccagaccaaagtggatggtgagataatccttcatctttatgacaaaggaggaattgagcaaacaatttgtatgttggatggtgtgtttgcatttgttttactggatactgccaataagaaagtgttcctgggtagagatacatatggagtcagacctttgtttaaagcaatgacagaagatggatttttggctgtatgttcagaagctaaaggtcttgttacattgaagcactccgcgactccctttttaaaagtggagccttttcttcctggacactatgaagttttggatttaaagccaaatggcaaagttgcatccgtggaaatggttaaatatcatcactgtcgggatgtacccctgcacgccctctatgacaatgtggagaaactctttccaggttttgagatagaaactgtgaagaacaacctcaggatcctttttaataatgctgtaaagaaacgtttgatgacagacagaaggattggctgccttttatcagggggcttggactccagcttggttgctgccactctgttgaagcagctgaaagaagcccaagtacagtatcctctccagacatttgcaattggcatggaagacagccccgatttactggctgctagaaaggtggcagatcatattggaagtgaacattatgaagtcctttttaactctgaggaaggcattcaggctctggatgaagtcatattttccttggaaacttatgacattacaacagttcgtgcttcagtaggtatgtatttaatttccaagtatattcggaagaacacagatagcgtggtgatcttctctggagaaggatcagatgaacttacgcagggttacatatattttcacaaggctccttctcctgaaaaagccgaggaggagagtgagaggcttctgagggaactctatttgtttgatgttctccgcgcagatcgaactactgctgcccatggtcttgaactgagagtcccatttctagatcatcgattttcttcctattacttgtctctgccaccagaaatgagaattccaaagaatgggatagaaaaacatctcctgagagagacgtttgaggattccaatctgatacccaaagagattctctggcgaccaaaagaagccttcagtgatggaataacttcagttaagaattcctggtttaagattttacaggaatacgttgaacatcaggttgatgatgcaatgatggcaaatgcagcccagaaatttcccttcaatactcctaaaaccaaagaaggatattactaccgtcaagtctttgaacgccattacccaggccgggctgactggctgagccattactggatgcccaagtggatcaatgccactgacccttctgcccgcacgctgacccactacaagtcagctgtcaaagcttaggtggtctttatgctgtaatgtgaaagcaaatatttcttcgtgttggatggggactgtgggtagataggggaacaatgagagtcaactcaggctaacttgggtgtgaaaaaaataaaagtcctaaatctaaaccattgctgtaaaaaa

SEQ ID NO: 558 - DNA, 2436 bp, Homo sapiens
gattctcattggctgaagtcgagggaggtttgtgtcttattatcctccgggtccctcgctggctagtaggagagactggtgcttgccccgcccggtggactaactcgcttaattttaaataaaaagtcgaggacacggcggtcgttttcccgaagacatgggccctcccatgggccatttgctccctggaggccctcgcgtcttgctgagcccggggagttaggatgacgcgagcggtgagggagcccggaacgattccttcgcggaacaattgaggcgaggcctttgggagtactttgtgggacggaccctggcgggccctgccagacgcacagggatggcggcggaggcggccgatttggggctgggggccgccgtccccgtggagctgaggcgggagcgacgcatggtgtgcgtggagtacccgggagtggtgcgtgatgtggctaagatgctgccgactctgggcggcgaggaaggcgtctcccggatctacgcagaccccaccaagaggctggagctgtacttccggcccaaggacccatactgccacccagtgtgcgccaaccgcttcagtaccagcagcctgctgctccgcatcaggaagagaacgaggcggcagaaaggggtgctgggcactgaggcccactccgaggtcacatttgacatggagatccttggcatcatctccaccatttacaaatttcaggggatgtctgacttccagtacttggctgtgcatacggaagcaggcggcaagcatacgtcaatgtatgacaaggtgctcatgctccggcccgagaaggaggcctttttccaccaggagctgccgctctacatccccccacccatcttctcccggctggacgccccggtggactacttctaccgaccagagacccagcaccgggaaggctacaacaatccccccatctcaggtgagaatctgattggcctgagcagagcccggcgcccccacaatgccatctttgtcaactttgaggatgaggaggtgcccaagcagccactggaggctgcagcccagacgtggaggagagtctgcactaaccccgtggaccggaaggtggaggaggagctgaggaagctgtttgacatccgtcccatctggtcccgaaatgctgtcaaggccaacatcagcgtccacccagacaagctcaaggtcttgcttcccttcatagcctattacatgataacaggcccctggcgcagcctatggattcgatttgggtatgacccccgaaaaaacccagatgccaagatttatcaagtcctcgatttccgaatccgttgtggaatgaaacacggttacgcccccagtgacttgccggtcaaagcaaagcgcagcacctacaactacagcctccccatcaccgtcaagaagacatccagccagcttgtcaccatgcatgacctgaagcagggcctgggcccgtcggggacgagtggtgctcggaaaccagcttccagcaagtacaagctcaaggactctgtctacatcttccgggaaggggccttgccaccctatcggcagatgttctaccagttatgcgacttgaatgtggaagagttgcagaagatcattcaccgcaatgacggggcagagaattcctgcacagaacgggatgggtggtgcctccccaagaccagcgacgagctcagggacaccatgtccctcatgatccggcagaccatccgctccaagaggcctgctctcttttccagctcagccaaggctgatggcggaaaagagcagctgacgtacgagtctggggaagacgaggaggatgaggaggaggaggaagaggaggaggaggacttcaagccatccgacggcagtgaaaacgaaatggagacagagattctggactacgtgtgacagggcccaaggctgggcctccctgacccggccagactggtgtctggcctaatgagggagccggggctccccattgccacccacagtgcccggaatggccctaggaggccctctgaggagagctagagtcccagcaaagggtgcagctgaccctagcactggctgtgacatgctgcttggtgctgcctctggtcctgaggggttagggacatccccaaagggtataccctggctctgccacccatgaaccagcccagcatccagccagtgagtgggcacccaatgcctctcaggatgagaccagtaaatgccggaggtggagctgggcagctgtggagccccaggccacaggccagtctcgcttggctctcatgactgtggtggtggagatagcgtggggagcctcgcccatggtctcacgtggcaagaagtgcctttagctctggatcccaaccgtttggcacagctttggccacagccaggcccctctggaattgtccttattaaaccagtttcccgagaaaaaaaaaaaaaaaaaa

SEQ ID NO: 559 - DNA, 1086 bp, Homo sapiens
ggagctggatggtctcgcctctccctccccccaccccgtgccgggtgcgcggcctgggagtcagcggcccgagcgggaagcgccgggcgagcccactgtgcggccgtcgtgggggaagcgaaggttcctgattccacctacctcctaagtgaaggcttccgtccctggagaggaggcggcgccctgtatcggccttcgtcctccgcgggtgtgctagcgttgggacggtcctttgttgccgcgaggggtaggagtgggcgtggcggagccagctccgttcggaacactcccgggccgacccgactcgctcatcctgcaggagctgcggcgccaagatgagtggagaggagaacccagccagcaagcccacgccggtgcaggacgtacagggcgacgggcgctggatgtccctgcaccatcggttcgtggctgacagcaaagataaggaacccgaagtcgtcttcatcggggactccttggtccagctcatgcaccagtgcgagatctggcgcgagctcttctctcctctgcatgcacttaactttggcattggtggtgacggcacacagcatgtactgtggcggctggagaatggggagctggaacacatccggcccaagattgtggtggtctgggtgggcaccaacaaccacggacacacagcagagcaggtgactggtggcatcaaggccattgtgcaactggtgaatgagcgacagccccaggcccgggttgtggtgctgggcctgcttccgcgaggccaacatcccaacccacttcgggagaagaaccgacaggtgaacgagctggtacgggcggcactggctggccaccctcgggcccacttcctagatgccgaccctggctttgtgcactcagatggcaccatcagccatcatgacatgtatgattacctgcatctgagccgcctgggctacacacctgtttgccgggctctgcactccctgcttctgcgtctgctggcccaagaccagggccaaggtgctcccctgctggagcccgcaccctaagcatcctgctgccttcccacaacattaaactctccttcctcagtgaaaaaaaaaa

SEQ ID NO: 560 - DNA, 1999 bp, Homo sapiens
tggagcaccgtgaggaagaagcgaggttctttttaagagttcagctgcgagatatcaaacaaagaattactctgtacaaagccagaacacatatatcaaagtaatcctgaagtatcagaacaaaataataggctgtaacagaggaggaaatgattttgaatagcctctctctgtgttaccataataagctaatcctggccccaatggttcgggtagggactcttccaatgaggctgctggccctggattatggagcggacattgtttactgtgaggagctgatcgacctcaagatgattcagtgcaagagagttgttaatgaggtgctcagcacagtggactttgtcgcccctgatgatcgagttgtcttccgcacctgtgaaagagagcagaacagggtggtcttccagatggggacttcagacgcagagcgagcccttgctgtggccaggcttgtagaaaatgatgtggctggtattgatgtcaacatgggctgtccaaaacaatattccaccaagggaggaatgggagctgccctgctgtcagaccctgacaagattgagaagatcctcagcactcttgttaaagggacacgcagacctgtgacctgcaagattcgcatcctgccatcgctagaagataccctgagccttgtgaagcggatagagaggactggcattgctgccatcgcagttcatgggaggaagcgggaggagcgacctcagcatcctgtcagctgtgaagtcatcaaagccattgctgataccctctccattcctgtcatagccaacggaggatctcatgaccacatccaacagtattcggacatagaggactttcgacaagccacggcagcctcttccgtgatggtggcccgagcagccatgtggaacccatctatcttcctcaaggagggtctgcggcccctggaggaggtcatgcagaaatacatcagatacgcggtgcagtatgacaaccactacaccaacaccaagtactgcttgtgccagatgctacgagaacagctggagtcgccccagggaaggttgctccatgctgcccagtcttcccgggaaatttgtgaggcctttggccttggtgccttctatgaggagaccacacaggagctggatgcccagcaggccaggctctcagccaagacttcagagcagacaggggagccagctgaagatacctctggtgtcattaagatggctgtcaagtttgaccggagagcatacccagcccagatcacccctaagatgtgcctactagagtggtgccggagggagaagttggcacagcctgtgtatgaaacggttcaacgccctctagatcgcctgttctcctctattgtcaccgttgctgaacaaaagtatcagtctaccttgtgggacaagtccaagaaactggcggagcaggctgcagccatcgtctgtctgcggagccagggcctccctgagggtcggctgggtgaggagagcccttccttgcacaagcgaaagagggaggctcctgaccaagaccctgggggccccagagctcaggagctagcacaacctggggatctgtgcaagaagccctttgtggccttgggaagtggtgaagaaagccccctggaaggctggtgactactcttcctgccttagtcacccctccatgggcctggtgctaaggtggctgtggatgccacagcatgaaccagatgccgttgaacagtttgctggtcttgcctggcagaagttagatgtcctggcaggggccatcagcctagagcatggaccaggggccgcccaggggtggatcctggcccctttggtggatctgagtgacagggtcaagttctctttgaaaacaggagcttttcaggtggtaactccccaacctgacattggtactgtgcaataaagacaccccctaccctcaaaaaaaaaaaaaaaaaaaaaaaaaaaaaaaaaaaaaaaaaaaaaaaaaaaaaaaaaaaaaaaaaaaaaaaaaa

SEQ ID NO: 561 - DNA, 1865 bp, Homo sapiens
cgcgagagggactttgtgttccgctgaccctcctcggggcgcttcctcccgtgccgcccttcccctcccccgccgcgtccttgcgaggcgcctcccattcggtgggaccgacccggggggatggagggggcacgcttctacaaccctcctgggaccccgaagagacgcccgcgtgcgacctgagacgccgccctcgccgagggcccatgggcgcgtccccacaggcgggcagtggacgtgagggcggcgagcggcggggccgcggcgtccaggagggccgcgctcgggctcggccccgcgcaggccgcgcgcgcgcgctcccgccgccgcccgggccgcgcccgccccgcctctaggcgccggccccggagcccggtccgcgagcagcggcggctgccggagggacgatgagctgcgcggggcgggcgggccctgcccggctcgccgcgctcgccctgctgacctgcagcctgtggccggcacgggcagacaacgcgagccaggagtactacacggcgctcatcaacgtgacggtgcaggagcccggccgcggcgccccgctcacgtttcgcatcgaccgcgggcgctacgggcttgactcccccaaggccgaggtccgcggccaggtgctggcgccgctgcccctccacggagttgctgatcatctgggctgtgatccacaaacccggttctttgtccctcctaatatcaaacagtggattgccttgctgcagaggggaaactgcacgtttaaagagaaaatatcacgggccgctttccacaatgcagttgctgtagtcatctacaataataaatccaaagaggagccagttaccatgactcatccaggcactggagatattattgctgtcatgataacagaattgaggggtaaggatattttgagttatctggagaaaaacatctctgtacaaatgacaatagctgttggaactcgaatgccaccgaagaacttcagccgtggctctctagtcttcgtgtcaatatcctttattgttttgatgattatttcttcagcatggctcatattctacttcattcagaagatcaggtacacaaatgcacgcgacaggaaccagcgtcgtctcggagatgcagccaagaaagccatcagtaaattgacaaccaggacagtaaagaagggtgacaaggaaactgacccagactttgatcattgtgcagtctgcatagagagctataagcagaatgatgtcgtccgaattctcccctgcaagcatgttttccacaaatcctgcgtggatccctggcttagtgaacattgtacctgtcctatgtgcaaacttaatatattgaaggccctgggaattgtgccgaatttgccatgtactgataacgtagcattcgatatggaaaggctcaccagaacccaagctgttaaccgaagatcagccctcggcgacctcgccggcgacaactcccttggccttgagccacttcgaacttcggggatctcacctcttcctcaggatggggagctcactccgagaacaggagaaatcaacattgcagtaacaaaagaatggtttattattgccagttttggcctcctcagtgccctcacactctgctacatgatcatcagagccacagctagcttgaatgctaatgaggtagaatggttttgaagaagaaaaaacctgctttctgactgattttgccttgaaggaaaaaagaacctatttttgtgcatcatttaccaatcatgccacacaagcatttatttttagtacattttattttttcataaaattgctaatgccaaagctttgtattaaaagaaataaataataaaataaaaagtctgtaaaaaaaaaaaaaaaaaa

SEQ ID NO: 562 - DNA, 4033 bp, Homo sapiens
ggatagtcgccgtcaggcactgaggaggccgagagatgaggccggagcccaccaagttctgggaagttctttctgacacaagtaagataacatctctgccatgcccacaggtgctgagaacaagagaaatcaagtgaaggaaggaggcggagtttccaagacttgggtgtcatcatttctggggacatccttgattggagattgaagtttttgaaccgaaatttagagctgattcagaagagacaaatacagaacgtccaagttagcagtcgtttcccaaatttaggagacaatgatgcaggcccaggaatccctaacactggaggatgtggctgtggacttcacctgggaggagtggcagttcctgagccctgctcagaaggacctgtaccgggacgtgatgttggagaactacagcaacctggtggcagtggggtatcaagccagcaaaccagatgcactctccaaattggaacgaggagaagaaacttgcacaacagaagatgaaatctactctcgaatctgttctgaaatcaggaaaattgatgatcctctgcagcatcacttgcaaaatcaaagtattcagaagagtgtgaaacagtgccatgaacagaatatgtttggaaatattgttaatcagaacaaaggtcatttcctgctgaagcaagattgtgatacgtttgacttacatgaaaaacctttaaaatcaaatttaagttttgaaaaccagaaaaggagctctggcctaaagaactctgctgagtttaatagagatgggaaatccctttttcatgctaaccataaacaattttatactgaaatgaagtttcctgcaattgcaaaacctattaataagtcccagttcattaagcaacagagaactcacaacatagagaatgcccatgtatgcagtgaatgtgggaaagccttcctcaagttgtctcagtttattgatcatcagagagttcacactggagaaaaacctcatgtatgcagtatgtgtgggaaagctttctccagaaaatccagactaatggaccatcagagaactcatacagaactgaaacattatgaatgcactgaatgtgacaaaaccttcctcaagaaatcacagctcaatatacatcagaaaactcatatgggagggaaaccttacacatgtagccaatgtgggaaagccttcatcaagaagtgtcggctcatttatcatcaacgaactcatacaggagagaaaccccatggatgcagtgtatgtgggaaggccttctctacaaagttcagtctcactacacatcagaaaactcatacaggagaaaaaccttatatatgtagtgaatgtggaaaaggcttcattgagaagaggcgtcttactgcacatcatcgaactcatactggtgagaaaccctttatatgcaataaatgtgggaaaggcttcaccttgaagaacagtcttatcacacatcagcaaactcatacaggagagaaattatatacatgtagtgaatgtggaaaaggcttttcaatgaagcactgtctcatggtacatcaacgaactcatactggagagaaaccttataaatgcaatgagtgtggaaagggcttcgctttgaagagcccactcatcagacatcagcgaacacatactggagagaaaccctatgtatgcaccgaatgtcgaaaaggtttcaccatgaagagtgacctcattgtacatcagcgaactcatactgcagagaagccatatatatgcaatgattgtggaaaaggcttcactgtgaagagccgccttattgtgcatcagcgaactcatactggagaaaaaccctatgtatgtggtgagtgtggaaaaggctttccagcaaagatccggctaatgggacatcaacgaactcatacaggagagaaaccttatatttgcaatgagtgtggaaaaggcttcactgagaagagtcatctcaatgtacatcggcgcactcatacaggagagaaaccctatgtatgcagtgaatgtggcaaagacttaactgggaaaagcatgctcattgcacatcagcgaactcatactggggagaaaccttatatatgcaatgaatgtggaaagggcttcaccatgaagagtactctcagtatacatcagcaaactcatactggagagaagccatacaaatgcaatgaatgtgataaaaccttcaggaagaagacatgcctcatacaacatcagcgatttcacacaggaaagacttcctttgcatgtactgaatgtggaaaattctctttgcgcaaaaatgatcttattacacatcagagaattcacacaggagagaaaccgtacaaatgcagtgactgcgggaaagccttcactacaaaatcagggctcaatgttcatcaaagaaaacatacaggagagaggccctatggatgtagtgattgtgggaaagcttttgcgcacttgtctatccttgttaaacacaggagaattcacaggtagtcattttgggaaagcctcttgccagatgtaggcccttaagatatctgcaaagaagagtaatttcatgaatgcagactacatggttgtttatttagtgatcagttacttcatgttttgtgtcagagaaaacatgtacaaaacatttgagaaaatattttaggacattatgtctaaaaattgtatactgagaaaaatcctatgaatgtggcagactataaaagcctttggtgggaagataaaccccctcagaagtgatcatagatcatgaataaactactaattcgtggaaatgtaataattataggaacgtctttgcccaaaaataaaacttcaacagattgagagagttcacactggagaaatactttcctctggcaaacccctgtggcagggttttcagtaaaatgttttgcctcatcgtgtgctaggaaataatgcagaaaaaacttatgaaaacattcaatgtagaagacttttaggaaaatatcagagaatttaatgaaggaaagaagccttggcaaaatgatggatgagagctttctgtcacaattctaaccttaacagataatatgcctcatgtgcatttgggaacaggatagcttgagccatattcctagttgccttgtcactgattttatacattttaaattgtgacttcctctaatcacgaactaaaatttaatattgtatataataccggagtattttatgcctgcctcattttattatatgattagctcctgcatttctttggttctaagtttgtgttatttcagaataactaaagtacttcagaatgaaactggatacagtatattcagttcataagtgtaattgaccatacttgaatatgtttaagtttataagtaacatcaggtgttatgaaattaatataaataagatgtttttgtaagtttttattttgaaataagtttagattcacaaaatcttaccaaaatattccagagttcttgcccttaacccagcttcttccaaagataacaacttacataagcatagttcattaccaaatacaggaaagtgaaattgttacaatactgttaactacagaatttatttggaaatcaccagttttaacatgcatgcatttttgtttgttttttatatgtagctttaagaaatcttaacacatatattgattcatgtcaccaccaccgtaatcgagattcagaatgttgcatcaatgcaaactccctcatgctccttgtttatagtcacaacctctcctcagccctaacccttggcaatcagaaatcttttcatctttagttttgtcattagtagcatgttataaaaatggaatcatacagcatgtacccttttggtattggctatttcaactaaagcagattaacctgaaatccatccaagttgttctgcatatcattgttctgtttttattggccactaataatctatgatacgaatataccactatttgtttattcacccactgaaggacattagttttgttcccggtttttcttactgttacaaataaaaatcctatgaacatttgtacac

SEQ ID NO: 563 - DNA, 6531 bp, Homo sapiens
gcccagccagcttgcgtcaccgcttcagagcggagaagagcgagcaggggagagcgagaccagttttaaggggaggaccggtgcgagtgaggcagccccgaggctctgctcgcccaccacccaatcctcgcctcccttctgctccaccttctctctctgccctcacctctcccccgaaaaccccctatttagccaaaggaaggaggtcaggggaacgctctcccctccccttccaaaaaacaaaaacagaaaaacccttttccaggccggggaaagcaggagggagaggggccgccgggctggccatggagctgctgtgccacgaggtggacccggtccgcagggccgtgcgggaccgcaacctgctccgagacgaccgcgtcctgcagaacctgctcaccatcgaggagcgctaccttccgcagtgctcctacttcaagtgcgtgcagaaggacatccaaccctacatgcgcagaatggtggccacctggatgctggaggtctgtgaggaacagaagtgcgaagaagaggtcttccctctggccatgaattacctggaccgtttcttggctggggtcccgactccgaagtcccatctgcaactcctgggtgctgtctgcatgttcctggcctccaaactcaaagagaccagcccgctgaccgcggagaagctgtgcatttacaccgacaactccatcaagcctcaggagctgctggagtgggaactggtggtgctggggaagttgaagtggaacctggcagctgtcactcctcatgacttcattgagcacatcttgcgcaagctgccccagcagcgggagaagctgtctctgatccgcaagcatgctcagaccttcattgctctgtgtgccaccgactttaagtttgccatgtacccaccgtcgatgatcgcaactggaagtgtgggagcagccatctgtgggctccagcaggatgaggaagtgagctcgctcacttgtgatgccctgactgagctgctggctaagatcaccaacacagacgtggattgtctcaaagcttgccaggagcagattgaggcggtgctcctcaatagcctgcagcagtaccgtcaggaccaacgtgacggatccaagtcggaggatgaactggaccaagccagcacccctacagacgtgcgggatatcgacctgtgaggatgccagttgggccgaaagagagagacgcgtccataatctggtctcttcttctttctggttgtttttgttctttgtgttttagggtgaaacttaaaaaaaaaattctgcccccacctagatcatatttaaagatcttttagaagtgagagaaaaaggtcctacgaaaacggaataataaaaagcatttggtgcctatttgaagtacagcataagggaatcccttgtatatgcgaacagttattgtttgattatgtaaaagtaatagtaaaatgcttacaggaaaacctgcagagtagttagagaatatgtatgcctgcaatatgggaacaaattagaggagacttttttttttcatgttatgagctagcacatacacccccttgtagtataatttcaaggaactgtgtacgccatttatggcatgattagattgcaaagcaatgaactcaagaaggaattgaaataaggagggacatgatggggaaggagtacaaaacaatctctcaacatgattgaaccatttgggatggagaagcacctttgctctcagccacctgttactaagtcaggagtgtagttggatctctacattaatgtcctcttgctgtctacagtagctgctacctaaaaaaagatgttttattttgccagttggacacaggtgattggctcctgggtttcatgttctgtgacatcctgcttcttcttccaaatgcagttcattgcagacaccaccatattgctatctaatggggaaatgtagctatgggccataaccaaaactcacatgaaacggaggcagatggagaccaagggtgggatccagaatggagtcttttctgttattgtatttaaaagggtaatgtggccttggcatttcttcttagaaaaaaactaatttttggtgctgattggcatgtctggttcacagtttagcattgttataaaccattccattcgaaaagcactttgaaaaattgttcccgagcgatagatgggatggtttatgcaagtcatgctgaatactcctcccctcttctcttttgccccctcccttcctgcccccagtctgggttactcttcgcttctggtatctggcgttctttggtacacagttctggtgttcctaccaggactcaagagacaccccttcctgctgacattcccatcacaacattcctcagacaagcctgtaaactaaaatctgttaccattctgatggcacagaaggatcttaattcccatctctatacttctcctttggacatggaaagaaaagttattgctggtgcaaagatagatggctgaacatcagggtgtggcattttgttcccttttccgtttttttttttttattgttgttgttaattttattgcaaagttgtattcagcgtacttgaatttttcttcctctccacttcttagaggcattcagttagcaaagaggttggagcaacaacttttttttttttttttgcacaattgtaattgacaggtaatgaagctatttgttaaaatatttgcctttttaagtaaaaaagaaaaatcagaacagggctatttgaagaattattttatacacagattctgccttgtttcatagtatgagggttgaagacggaaaacaatctaagggtctctcatttttttaattttgttttgttcagtttggtttttttttttttttgcgctgctaagaagctaaagtcatccatccttattcacgttgacagtacctagctgtaatgtttcacagagtgtgctgctattttataaacatttttataatatattattttactgcttaaattccaagtcctgaagtagatggttgagatatgagttcttcgtactggaaaagcccttccgtagtttgttttcttctggtagcatattcatggttgtttttttttttcttttttggttttttggttttttttttttcctctgatcacattcttcaaagacggagtattctttacctcaggtttactggacaaaatcaataactacaaaaggcaatgattcacgcttttgttttcataatacctcacaaccgtacagtttctgcttgggagcccattcgcatgaggaatacagaagcagtgtgagcagggctgactccctctcaggtggaaggcagggcggtctcactcccagggacctttttggtcatggaggccatcgggctcccagttagaccctggtatcctcatcatgatggaaaaaatacattgaaccaagggatcctccctccccttcaaggcagacgttcagtacaaacatttatgcggtaggctcagatgtcgtaatttgcacttaggtaccaggtgtcaggaaacagactaaaaagaattccaccaggctgtttggagatcctcatcttggagctttttcaaaagcggggcttcatctgcaaagggccctttcatcttgaagtttttcccctccgtctttcccctcccctggcatggacaccttgtgtttaggatcatctctgcaggtttcctaggtctgaatctgcgagtagatgaacctgcagcaagcagcgtttatggtgcttccttctccctcctctgtctcaaactgcgcaggcaagcactatgcaagcccaggccctctgctgagcggtactaaacggtcgggttttcaatcacactgaattggcaggataagaaaaataggtcagataagtatgggatgatagttgaagggaggtgaagaggctgcttctctacagaggtgaaattccagatgagtcagtctcttgggaagtgtgtttagaagggttcaggactttgtgagttagcatgaccctaaaattctaggggatttctggtgggacaatgggtggtgaattctgaagttttggagagggaagtggagcagccagcaagtaagctagccagagttttctcaagagccagctttgctcagcacactctcctgggccccaaggagtcccacggaatggggaaagcgggaaccctggagttcttgggaatcttggagcctaaagagaaaccgaggtgcaaattcatttcatggtgactgacccttgagcttaaacagaagcagcaaatgaaagaaccggacaaataaggaagggcacaagcctacccgactctatttacagtctgtaactttccactcttcctgtagtcccgaggcccctgggtccttctagcttttctctttcccatccttggggccttgtgtgatgatgggtgtggggctgccgatgggaaagtcgggggttgttaggcttttctgcctgctcctgcttaaacacaagaaggaatcctggattttgccctctccttagctcttagtctctttggtaggagttttgttccagaggagctctcccccttggatttgaacttgctctttttgttgttgttgttctttctcttctttttcttacctcccactaaaggggttccaaattatcctggtctttttctaccttgttgtgtttctatctcgtctttacttccatctgtttgtttttttctccatcagtgggggccgagttgttcccccagcctgccaaattttgatccttcccctcttttggccaaatcctagggggaagaaatcctagtatgccaaaaatatatgctaagcataattaaactccatgcgggtccataacagccaagaagcctgcaggagaaagccaagggcagttccctccgcagaacaccccatgcgtgctgagaggcgagctccttgaagaaggggctgttcttccaggaggccttattttgaactgcctcaggaccccactggagagcacagcatgccttactactgggtcatccttggtctatgtgctctgtactggaggctctgttctgcctcttatcagccaggtcaggggcacacatggcttaagtgacaaagccagaggagaagacaaccctgacagcatcacgctgcatcccattgctagcaggattggcaactcttcagacggagctgcgcttccctgcagtctagcacctctagggcctctccagactgtgccctgggagctctgggactgaaaggttaagaacataaggcaggatcagatgactctctccaagagggcaggggaattttctctccatgggccacaggggacagggctgggagaagaaatagacttgcaccttatgtcatgtaaataattgattttctagttcaagaagataatattggtagtgtgggaattggaggtaggaaggggaggaagtctgagtaagccagttggcttctaagccaaaaggattcctctttgtttatctctgagacagtccaaccttgagaatagctttaaaagggaaattaatgctgagatgataaagtccccttaagccaacaaaccctctgtagctatagaatgagtgcaggtttctattggtgtggactcagagcaatttacaagagctgttcatgcagccatccatttgtgcaaaatagggtaagaagattcaagaggatatttattacttcctcataccacatggcttttgatgattctggattctaaacaacccagaatggtcatttcaggcacaacgatactacattcgtgtgtgtctgcttttaaacttggctgggctatcagaccctattctcggctcaggttttgagaagccatcagcaaatgtgtacgtgcatgctgtagctgcagcctgcatcccttcgcctgcagcctactttggggaaataaagtgccttactgactgtagccattacagtatccaatgtcttttgacaggtgcctgtccttgaaaaacaaagtttctatttttatttttaattggtttagttcttaactgctggccaactcttacatccccagcaaatcatcgggccattggattttttccattatgttcatcacccttatatcatgtacctcagatctctctctctctcctctctctcagttatgtagtttcttgtcttggacttttttttttcttttctttttctttttttttttgctttaaaacaagtgtgatgccatatcaagtccatgttattctctcacagtgtactctataagaggtgtgggtgtctgtttggtcaggatgttagaaagtgctgataagtagcatgatcagtgtatgcgaaaaggtttttaggaagtatggcaaaaatgttgtattggctatgatggtgacatgatatagtcagctgccttttaagaggtcttatctgttcagtgttaagtgatttaaaaaaataataacctgttttctgactagtttaaagatggatttgaaaatggttttgaatgcaattaggttatgctatttggacaataaactcaccttgacctaaattaaaaaaaaaa

SEQ ID NO: 564 - DNA, 1121 bp, Homo sapiens
gggccgggccgggccgggggcgcgcgctctgcgagctggatgtccaggctgcgggcgctgctgggcctcgggctgctggttgcgggctcgcgcgtgccgcggatcaaaagccagaccatcgcctgtcgctcgggacccacctggtggggaccgcagcggctgaactcgggtggccgctgggactcagaggtcatggcgagcacggtggtgaagtacctgagccaggaggaggcccaggccgtggaccaggagctatttaacgaataccagttcagcgtggaccaacttatggaactggccgggctgagctgtgctacagccatcgccaaggcatatccccccacgtccatgtccaggagcccccctactgtcctggtcatctgtggcccggggaataatggaggagatggtctggtctgtgctcgacacctcaaactctttggctacgagccaaccatctattaccccaaaaggcctaacaagcccctcttcactgcattggtgacccagtgtcagaaaatggacatccctttccttggggaaatgcccgcagagcccatgacgattgatgaactgtatgagctggtggtggatgccatctttggcttcagcttcaagggcgatgttcgggaaccgttccacagcatcctgagtgtcctgaagggactcactgtgcccattgccagcatcgacattccctcaggatgggacgtggagaagggaaatgctggagggatccagccagacttgctcatatccctcacagcccccaaaaaatctgcaacccagtttaccggtcgctaccattacctggggggtcgttttgtgccacctgctctggagaagaagtaccagctgaacctgccaccctaccctgacaccgagtgtgtctatcgtctgcagtgagggaaggtgggtgggtattcttcccaataaagacttagagcccctctcttccagaactgtggattcctgggagctcctctggcaataaaagtcagtgaatggtggaagtcagagaccaaccctggggattgggtgccatctctctaggggtaacacaaagggcaagaggttgctatggtatttggaaacaatgaaaatggactgttagatgccaa

SEQ ID NO: 565 - DNA, 2667 bp, Homo sapiens
ctctccgccccgccccggctcgggcggccggaggacccggagctaaggcgcccgaacccgcggcggcggtggggacgatgtggttctttgcccgggacccggtccgggactttccgttcgagctcatcccggagcccccagagggcggcctgcccgggccctgggccctgcaccgcggccgcaagaaggccacaggcagccccgtgtccatcttcgtctatgatgtgaagcctggcgcggaagagcagacccaggtggccaaagctgccttcaagcgcttcaaaactctacggcaccccaacatcctggcttacatcgatggactggagacagaaaaatgcctccacgtcgtgacagaggctgtgaccccgttgggaatatacctcaaggcgagagtggaggctggtggcctgaaggagctggagatctcctgggggctacaccagatcgtgaaagccctcagcttcctggtcaacgactgcagcctcatccacaacaatgtctgcatggccgccgtgttcgtggaccgagctggcgagtggaagcttgggggcctggactacatgtattcggcccagggcaacggtgggggacctccccgcaaggggatccccgagcttgagcagtatgaccccccggagttggctgacagcagtggcagagtggtcagagagaagtggtcagcagacatgtggcgcttgggctgcctcatttgggaagtcttcaatgggcccctacctcgggcagcagccctacgcaaccctgggaagatccccaaaacgctggtgccccattactgtgagctggtgggagcaaaccccaaggtgcgtcccaacccagcccgcttcctgcagaactgccgggcacctggtggcttcatgagcaaccgctttgtagaaaccaacctcttcctggaggagattcagatcaaagagccagccgagaagcaaaaattcttccaggagctgagcaagagcctggacgcattccctgaggatttctgtcggcacaaggtgctgccccagctgctgaccgccttcgagttcggcaatgctggggccgttgtcctcacgcccctcttcaaggtgggcaagttcctgagcgctgaggagtatcagcagaagatcatccctgtggtggtcaagatgttctcatccactgaccgggccatgcgcatccgcctcctgcagcagatggagcagttcatccagtaccttgacgagccaacagtcaacacccagatcttcccccacgtcgtacatggcttcctggacaccaaccctgccatccgggagcagacggtcaagtccatgctgctcctggccccaaagctgaacgaggccaacctcaatgtggagctgatgaagcactttgcacggctacaggccaaggatgaacagggccccatccgctgcaacaccacagtctgcctgggcaaaatcggctcctacctcagtgctagcaccagacacagggtccttacctctgccttcagccgagccactagggacccgtttgcaccgtcccgggttgcgggtgtcctgggctttgctgccacccacaacctctactcaatgaacgactgtgcccagaagatcctgcctgtgctctgcggtctcactgtagatcctgagaaatccgtgcgagaccaggccttcaaggccattcggagcttcctgtccaaattggagtctgtgtcggaggacccgacccagctggaggaagtggagaaggatgtccatgcagcctccagccctggcatgggaggagccgcagctagctgggcaggctgggccgtgaccggggtctcctcactcacctccaagctgatccgttcgcacccaaccactgccccaacagaaaccaacattccccaaagacccacgcctgaaggagttcctgccccagcccccacccctgttcctgccacccctacaacctcaggccactgggagacgcaggaggaggacaaggacacagcagaggacagcagcactgctgacagatgggacgacgaagactggggcagcctggagcaggaggccgagtctgtgctggcccagcaggacgactggagcaccgggggccaagtgagccgtgctagtcaggtcagcaactccgaccacaaatcctccaaatccccagagtccgactggagcagctgggaagctgagggctcctgggaacagggctggcaggagccaagctcccaggagccacctcctgacggtacacggctggccagcgagtataactggggtggcccagagtccagcgacaagggcgaccccttcgctaccctgtctgcacgtcccagcacccagccgaggccagactcttggggtgaggacaactgggagggcctcgagactgacagtcgacaggtcaaggctgagctggcccggaagaagcgcgaggagcggcggcgggagatggaggccaaacgcgccgagaggaaggtggccaagggccccatgaagctgggagcccggaagctggactgaaccgtggcggtggcccttcccggctgcggagagcccgccccacagatgtatttattgtacaaaccatgtgagcccggccggcccagccaggccatctcacgtgtacataatcagagccacaataaattctatttcacaccccttgaaaaaaaaaaaaaaaaaa

SEQ ID NO: 566 - DNA, 3927 bp, Homo sapiens
ccggagcgcggtcgggacacagcgcctctaggagaaagcctggaaggcgctccgggggtacccagagctcttagcgggccggcagcatgtgcggggcccaagtaaatggaaatgttttctaacatataaaaacctacagaagaagaaaataattttctggatcaaattagaagtctgtattatattgatgtctccagattcaaatatattagaaagcagccgtggagacaaccatcttcattttgggagaaataactaaagcccgcctcaagcattagaactacagacaaaccctgatgcgacctctccagattgtcccaagtcgattgatttcccagctatattgtggcctgaagcctccagcgtccacacgaaaccagatttgcctgaaaatggctcggccaagttcaagtatggcagattttcgaaagttttttgcaaaagcaaagcacatagtcatcatctcaggagctggtgttagtgcagaaagtggtgttccgaccttcagaggagctggaggttattggagaaaatggcaagcccaggacctggcgactcccctggcctttgcccacaacccgtcccgggtgtgggagttctaccactaccggcgggaggtcatggggagcaaggagcccaacgccgggcaccgcgccatagccgagtgtgagacccggctgggcaagcagggccggcgagtcgtggtcatcacccagaacatcgatgagctgcaccgcaaggctggcaccaagaaccttctggagatccatggtagcttatttaaaactcgatgtacctcttgtggagttgtggctgagaattacaagagtccaatttgtccagctttatcaggaaaaggtgctccagaacctggaactcaagatgccagcatcccagttgagaaacttccccggtgtgaagaggcaggctgcgggggcttgctgcgacctcacgtcgtgtggtttggagaaaacctggatcctgccattctggaggaggttgacagagagctcgcccactgtgatttatgtctagtggtgggcacttcctctgtggtgtacccagcagccatgtttgccccccaggtggctgccaggggcgtgccagtggctgaatttaacacggagaccaccccagctacgaacagattcaggtttcatttccagggaccctgtggaacgactcttcctgaagcccttgcctgtcatgaaaatgaaactgtttcttaagtgtcctggggaagaaagaaattacagtatatctaagaactaggccacacgcagaggagaaatggtcttatgggtggtgagctgagtactgaacaatctaaaaatagcctctgattccctcgctggaatccaacctgttgataagtgatgggggtttagaagtagcaaagagcacccacattcaaaagtcacagaactggaaagttaattcatattatttggtttgaactgaaacgtgaggtatctttgatgtgtatggttggttattgggagggaaaaattttgtaaattagattgtctaaaaaaaatagttattctgattatatttttgttatctgggcaaagtagaagtcaaggggtaaaaaccctactattctgatttttgcacaagttttagtggaaaataaaatcacactctacagtaggtaatttattgtataaagacattaccccacgatatggctttattagggactttttttttttttttttgagacagagtttcactcttgttgcccaggctggagtgcagtggtgcgatctcagctcacagcaacctccgcctcccgggttcaagagattctcctgcctcagcctcatgagtagctgggattacaggtatgtaccaccacacccagctaattttgtatttttagtagagacggggtttctccatgttggtcaggctggtcttaaactctcgacctcaggtgatctgcccgcctcggcctcccaaagtgctgagattacgggcatgagccaccgcacccggcttactgggggctttttaaccttgtttggctacattacctcagtgaacaaggggaagctcacaacaggaactcacacaaagaaggaagagaacagtaccaacaaggtagaacatcacgatgagaagaaagaatgatgcaaatatgtggacccccaggataaacacagctgcccaaaatttagctctggcccccttagatgggggaagtcaacagtgaagtgtttctcagcatcataaaggcagaagctgtggttcctgtggggcctgccaaccgttcccagatgctgaactctgctgggagttttttccatgggactttaaaaaatgatgcccttaggttgggccagacctctgttaacttcagtagggatggcaccaggttcaagaggccaaagaagagacctggagctagtgaaggaaacatagggtttatttggggaaccttacagggtggtccagtggccgcgggctggacagaactgcaaccacttataaaaagcatgcagtttacatagcactttcactcagcaccctcccctcagcagcctccacgtggcaaccctcacttcttaagttattgctgtcagatgcatctgccatacagggtcattctcaggggatgcttaagttatttctgtcaggtacatcttccatacactttactaccttggagtaaagtagtaagaatacagctttttccttaacctttaccagctaactcagtgcttaggggccttggaatgcctgctgtccagcaggtgtcacaggcctgactgggaggcatggccattatcaacagtgtatgaaggtcacatatggctccctgaagtgattacatacttggaccacatcacctcagccccttgcaaaattgcatttaatgttacacccttggcttttgtagaaacaggcaacaagacactatcatataaaactttgtactgcattgcaaggcataacctttaataaatcccagtggtcctttgtgtagggaacggggatgctcatagcctatggggcggctggagaaccagtcagggaccctgagggctcgatgtacactttacatgggtgggccaaggagtttacactgagggcactggtaatacctgtaatagtcttatagtacttataaagcagttttgcacataaaataccatcatgcacttataagtttgttcttgggctgctccaagttaactttattcattttcctagtgttagtgtctcagggagtctgattatatttttgatttgtaatttctatctgactaaggcctagagatttcaaaactgttctttgcaattcctctcatactgaacctctggttcagcagctttttttgttgttgttgttttcaagttttatcatttttgttcctatttggttttgtcgtttttaaattgagaattgcttctaaaacagaagacatgaaaagagaattaaaaatacaatatatgtgtaagatagaattattcaacttagcatttattaaacatctaccagatgatagacattagaaataaaatgactagcaagacctggcccttcccctcaggggttcacagaatggctggagcaactgtcatataagctgttatgaagtgcagaaactacacagacatttgtgcgggttcagaccagcgcaattagagatgggcagagtgggatggggtaggggtaaggtgcttgaaatttgcctgggtgggaatttttgaagtataaaaaggacttctacctggggggctgcggcagtagagggaagagcacggtcggtacaaatgcatggcaggtgtgaaacagtttgatttgttcaaagaatgatgaatcacttagtgttgtataatggatgggaggagagaaacacagcgatcacaaagggccatgtttgccaagaaataaaatatacttggaaaaaaaaaaaa

SEQ ID NO: 567 - DNA, 2611 bp, Homo sapiens
aggaacgactgtgctacgttgccagaaggggcgggacctgcaacgtccgacagaacgaggggacgtaacggaggcaggttggagccgctgccgtcgccatgacccgcggtaaccagcgtgagctcgcccgccagaagaatatgaaaaagcagagcgactcggttaagggaaagcgccgagatgacgggctttctgctgccgcccgcaagcagagggactcggagatcatgcagcagaagcagaaaaaggcaaacgagaagaaggaggaacccaagtagctttgtggcttcgtgtccaaccctcttgcccttcgcctgtgtgcctggagccagtcccaccacgctcgcgtttcctcctgtagtgctcacaggtcccagcaccgatggcattccctttgccctgagtctgcagcgggtcccttttgtgcttccttcccctcaggtagcctctctccccctgggccactcccgggggtgagggggttaccccttcccagtgttttttattcctgtggggctcaccccaaagtattaaaagtagctttgtaattccttgagcgcctggtttgactggggacttggggggatggggttggaagaatgactgccctttcccaccaaaaaagggagaactctttagattcagattgtgggtatgtagacttaataagtgaaacatcacagaagaagcctttattatacaatgacaaccaaacaagtactccggatatgcagtagaggaatcctctaagaaccatagagacttcttttctgtgatttttgttccccacccttgaacaccatctctaggatggagttggcctaagagtgaatgctgcaagatctgtgtttatgcctcttttcctcattcttcctcagtttgttcgtctgcttgaaagttggccaaaaaatcctgctgctcaccgacttcccgtggtcagctgctgtcaagcgttcactttctcttctgtcattcctcatggaatgagggtggttttgtcttcccgcttcccttgacctcaaaatcaggattaaaacctggggtagcctctgtgctcctttcttctatgccctggtttgttctgtggttctgggcttcttatatccgtgtgcccagggctgaactccttattttcctttctccaagggcagagccgagtcttcagtccctgttggtctttccccacccccacttccagcccaagagccaggaaagggctggtgccacactgtctgctgggatcagcggtggttctttgagctgctgatttgggtgttaggctcttgagctgggatgcagatgtaacagtagctccagtgagtcagacactctgcccagcacattagactgtgtttgaccacttcttccagttcatagtattgacttcagcccaaacggagataactccctgtgtgtccttgaggtattgagctgggctggacagctccccttgagccaactctaggagtacaatgtcaggggaaccccagtttgtgaaaaggacttagactggaggatatttgttatctggggatatgatgcggtggcggcggcgcctcaagataaggggctggggtttctgggtggggggccaacagagtggtgccagtaacagccccagatagaggagtacgcaggcccagcatgaggcaaccttgacccagaaggtggcccagctacccttgatgaaggtcttttccagttctgctccctcatagctgtgtaaccaaaggctctggttagagaatatgaagggccttagcttttagacctgttctacctcctcaccaaatataatggcagacccatgtgtgtctggaatggccttgaattgctctttccttaaaatagctagctcttcaggagagtatctaaggcccactccatcttacctgaaccagttggtaagggtaaccatgacatagagtgaggcaaggaagaagacgaagtggaaggcagaatagttgtaggaaagatgctggacttggactggaggagctggaggggtttcttggtcagctggcctcgcagccccacccctttgccctggagagaggaaatggctgctgggagcagagctgctgaaacacctcttcccctctcccccaactacctttgttaaggctcttgagggttcttatggcactccacagagatctaccacttcttatggttcctcacttggcactcacctttgtctgcctccactgtttcagggcagcagaaacacagtgagggcttctgcaaaacagaacgcaggttttggaatggtcttaaaagatgtgagggtgttaatctaggaaacttcccccgtgaaaagattggtctagtattaaaaagtggaggcacacctgggttcaaattctagctccagcatataagtggctgtgcagactttggtaagatgtttaatcttttgtgcctcgatttctccatttgtaaaatggagcaaatacctacctcacagggttgttgtgagggttaaattaaatgagattatgtaaaagtatctagcacagttgcctagcacattgtgggtactcaataaaaggtaacagcagctataatctgagcattctgggtagaggttggtaaaaaaaaaaaaaaaaaa

SEQ ID NO: 568 - DNA, 3905 bp, Homo sapiens
cccaaacccagccactcacacatggcgggctcagcagccaccggccccgcccctcctcgtcgccgcagtcgcaactgcgtctgcggccacagggcggacagccacgcctctgcggagggcgaccggaagtgctcacgtcttcaccttccccgccacgccaccgtcctttcaggcccagcgtgcagcaggaaggaggactcttttgccgcggactcaagccggaagccgccttcctagtggagacgcgagtgggggaggagcagtccgaggggaacgtgggttgaacgttgcaactagggtggagatcaagctggaacaggagttccgatcgacccggtaccaagaaggggagtgcccgcggcagggttcattgaaaaaatccttagtgatattgacatgtctcaagtgacataaattagccaatgactcggaatgatggattctccgaagattggaaatggtttgccagtgattggaccagggactgatatagggatatcttcactccacatggtggggtatttgggaaaaaattttgattcagctaaagttccatcagatgagtattgccctgcttgtagagagaagggaaagttaaaagccttaaagacttaccgaattagttttcaagaatctatctttttgtgtgaggatctgcagtgcatctatcctttgggctctaaatcacttaataacctaatttctcctgatttggaagaatgtcacactccacataagcctcagaaaaggaagagcttagaaagcagctataaggattcacttcttttagcaaattccaaaaagactagaaattatattgctattgacggtggaaaagttttgaacagcaaacataatggagaagtatatgacgaaacctcgtcaaacttacctgatagtagtggtcaacagaatccaattaggacagctgattccttggagcggaatgagattttggaagctgatactgttgacatggctactacaaaagatcctgctacagttgatgtctctggaactggcagaccttcccctcaaaatgaaggatgtacatctaaactggaaatgccactggagagcaaatgtacatcatttccccaggctttatgtgtccagtggaaaaatgcttatgctctctgttggttagactgtatcctgtcagctttggtgcactcggaagagttaaagaacaccgtgactggactgtgctcgaaggaggaatctatattctggcggttgcttacaaaatataatcaagcaaatacacttctatataccagtcaattgagtggtgttaaagatggagattgtaaaaaacttacctcagaaatatttgcagagatagagacctgtctgaatgaagttagagatgaaatttttattagccttcagccccagcttagatgcacattaggtgatatggaaagccctgtgtttgcatttcccctgctcttaaaactagaaacccacattgaaaagctcttcctatattctttttcttgggactttgaatgttcgcagtgtggacaccaatatcaaaacaggcatatgaagagtctggtcacctttacaaatgtcatccctgagtggcacccacttaatgctgcccattttggtccatgtaacaattgcaacagtaaatcacaaataagaaaaatggtattagaaaaagtatctcccatattcatgttgcactttgtagaaggcttaccacagaatgacttgcagcactatgcatttcattttgaaggctgtctttatcagataacttctgtaattcagtatcgagcaaataatcattttataacatggattttagatgctgatggaagttggctggaatgtgatgacttaaaaggcccatgttctgaaaggcacaagaaatttgaagttcctgcttcagagatacatattgttatttgggaaagaaaaatatcccaagtgacagataaagaagctgcctgccttccacttaaaaagactaatgaccaacacgctctcagtaatgagaaaccagtatctttaacatcgtgttctgtgggtgatgctgcctcagctgaaacagcctcagtaactcaccctaaagatatatcagttgcccctcgtactctttcacaggacacagctgtaactcatggagatcatttactttcaggtccaaaaggtttggttgacaatattttacctctgacacttgaagaaactatccagaaaacagcctcagtttcacagttaaattctgaagctttcctgttagaaaataaacctgtagcagaaaatacaggaattctcaaaaccaatactttgctatcacaagaatcactaatggcttcttcagtatcagctccatgtaatgaaaagcttattcaagaccaatttgtggacataagttttccatcccaagttgtaaatacaaacatgcagtcagtacagctgaatacagaagatactgtaaatactaaatctgtgaataatactgatgctactggtcttatacagggagtgaagtcagtagaaattgagaaggacgctcagttaaaacaattccttacaccaaaaactgaacaattaaaaccagaacgtgtcacatctcaggtatctaatttgaagaaaaaagaaactacagcagattctcaaaccacaacatctaagtcattacagaatcagtctctgaaagaaaatcagaagaagccatttgtgggaagttgggttaaaggcttaataagcaggggtgcttcttttatgccactctgtgtttcagctcataatagaaacactataactgatttacaaccttcagttaaaggggtaaataattttggtggctttaaaactaaaggtataaaccagaaggccagccacgtatccaagaaagctcgtaagagtgcaagtaagcctcctcccatcagtaagccaccagcaggccctccatcgtctaatggcacagctgcccacccacatgctcatgctgcttcagaagttttggaaaagtctggaagcacctcatgtggagctcaactcaaccacagttcttatgggaatggtatttcttcagcaaaccatgaagacttggtggaaggtcagattcataaacttcgtctaaaacttcgtaaaaagctaaaggcagaaaagaagaaattagctgctcttatgtcttccccgcaaagcagaacagttcgaagtgaaaatctagaacaggtgccccaggatgggtctccaaatgattgtgaatcaatagaggacttgttaaatgagctaccatatccaattgatattgccagtgagtctgcatgcaccactgttcctggtgtttccctgtacagtagtcaaactcatgaagaaattttagcggaattattgtctcctacacctgtttcaacagagctgtcagaaaatggggaaggtgactttaggtatttgggaatgggagatagtcatatcccaccaccagtaccaagtgaattcaatgatgtttcccagaacacacatctgagacaggaccataattattgtagccccaccaagaaaaatccatgtgaagttcagccagactctctgacaaataatgcctgcgttagaacattaaacttggagagtccgatgaagactgatattttcgatgagtttttttcctcctcagcattaaatgctttagcaaatgacacattagacctacctcatttcgatgaatatctgtttgagaattattgaattaatgcttgttaacttttttcatataatatttattattattagaagaacttacaatgtgttcaggtagtgtttatacactggacttgtgtaattacttgtgtaataaccatgaacaaaatgcaaggtttaacctttggttctgcccatgaagcatgtaatctttcttacacattaaaatcactgaatgtgta

SEQ ID NO: 569 - DNA, 6134 bp, Homo sapiens
gacccggtagtcgaccgtggaccgcgctgcgagcctcggagacgccgtagaaggagacctgcttccgggactggaccaggcgcctgcgactcttctcagacgccgacgtgcacgagtgactactattaattctatttaaaatgggtgtaaagaagaagaaagaaatgcaagttgctgcgctgaccatttgccatcaggaccttgaaactttgaaatcttttgctgatgtggaagggaaaaatctagcttctttgctgttacattgtgtgcaactcacggatggagtgtcacaaatccattatattaaacagattgtgcctctgctggagaaagcagataaaaatggcatgtgtgatcccactattcaaagttgtttggatatcttagcaggcatttatctttctttgagtctaaagaatcccttgaagaaagtattggcaagctcactaaatagcctgcctgatttttttctacctgaggctatgcaccgttttacttctcgtcttcaggaagaattgaatactactgacttatactcttacaggaaagttactgacaatatttcttcctgtatggagaactttaacttgggtagagcaagtgttaataatctgcttaaaaatgtgcttcattttctgcagaagagtttaattgaaatcctggaagaaaatagaaaatgtgctggaaatcatattattcaaacacagttgatgaatgacttactggtaggcattagagtttcaatgatgttagtacagaaagtacaagatttccagggaaatctttggaagacttccgattctcccatatggcaaaatatgtgtggattgctgagtatttttaccaaggttttaagcgatgatgatctgttacagactgtacagagcacatctggattagctattattctttttattaagactatgtttcacccgtctgaaaagattcctcatttgattagcagtgtgctgcttcgttcagtggactgcaccagtgtccccgagtggtttatgagcagctgcaggagcctctgttgtggtgacatctctcagtcagctgtcttattcctctgtcaggggacacttgccatgttggactggcagaacggaagcatgggtcggagtggggaggccctgctcttggatactgcacatgttttgttcaccttgagttcacagattaaagagccaacgctggaaatgtttctgtctagaatcttagcatcctggactaattcagccatacaagtccttgaatcaagttccccgagcctaacggacagcctgaatgggaattcaagtatagttgggagacttttggaatatgtctatacccattgggaacatccattggatgctctgagacaccaaaccaaaatcatgttcaaaaaccttctccaaatgcaccggctcactgtggaaggtgcagatttcgtccctgatcctttctttgtggaattgactgagagtcttttacgattggaatggcatattaaaggaaagtacacgtgccttggttgtttggtagagtgcataggagttgaacatattttggctatagataaaactattccatctcaaatcttagaggtgatgggagaccagtcattggtaccttatgcaagtgacctcttggaaaccatgtttagaaatcataagagtcatttgaaatcccagactgctgagagttcttggattgaccagtggcatgagacttgggtttctcctctcctttttatattgtgtgaaggaaacttggatcaaaaatcttacgtgattgattattacttgccaaaattattaagttacagccctgaaagcttacagtacatggtaaagattcttcagacttctattgatgctaaaactggacaagagcaatctttcccatccttagggtcttgtaatagcaggggggctctgggagctttgatggcatgtctgcgaatagctagagctcatggacatcttcagtctgcaactgatacctgggagaacctcgtgtctgatgcaagaataaagcaaggcttaattcatcagcattgccaagtaaggatagatacattaggcttgctttgtgaaagtaatcggagcacagaaattgtttccatggaagaaatgcagtggattcagttctttattacatacaatcttaacagccagtctccaggagtgcggcaacagatctgttctcttcttaaaaagttgttttgtaggatacaggaaagttctcaggtactttataaattggagcagagtaaatccaaacgtgaaccagagaatgagttaaccaaacagcacccttctgtttctttacagcagtataagaatttcatgtcatccatttgtaacagtctttttgaagcattgtttcctggatcttcctactcgactagattttcagctttaaccattttaggttcaatagctgaagtttttcatgtcccagaaggcagaatttatacagtatatcagctgagtcatgatattgatgttggtcgtttccaaacactaatggaatgttttaccagcacttttgaagacgtgaaaattttagcatttgatcttctgatgaagttatcaaaaacagctgtacattttcaggattcggggaaactgcaaggcttatttcaggcagcattggagctcagcacaagcaccaaaccatacgactgtgtgacagcttcctacctgctgaacttcttaatctggcaggatgctctaccgtcatccttgtctgcctacttaactcagcaagttgcatgtgataatggagataggcctgctgctgtggtggaaaggaacacattaatggttatcaaatgcttgatggaaaatcttgaggaagaagtatctcaggctgaaaattctctgcttcaggcagcagcagcatttccaatgtatgggcgagtccactgtataacaggagctttgcagaagttatctctaaacagcctgcagttggtgagcgagtggagacctgtggtagagaagctccttttgatgtcctacaggctttccactgtggtgtctccagtcattcagagctcatcccctgaaggcctcatcccaatggacactgattcagagtcagcaagccgcttacagatgattctgaatgagattcagcctcgagatactaatgattattttaaccaagccaaaatattgaaagaacatgatagctttgatatgaaggacttgaatgctagtgtggtgaatattgatacttctacagaaatcaaaggtaaagaagtaaaaacatgtgatgtaactgcgcagatggtgctggtatgttgttggagaagtatgaaggaagttgctttacttttaggcatgttgtgccagcttctgcccatgcagcctgtgccagaatcttctgatggattattgacggtggagcaggtaaaagaaataggagattactttaaacaacaccttttgcagtccaggcacagaggagcatttgaattggcttatactggttttgtgaaactcactgaagtactaaacaggtgcccaaatgtgagtctgcaaaagctgccagaacagtggctatggagtgttttagaggaaattaaatgcagtgatccttcatctaaactctgtgctacaaggcgcagtgctggaattcctttctacatacaggcactgttggcatctgaaccaaagaaaggcagaatggatttgttgaaaataacaatgaaagagttaatctctttggctgggcctacagatgacatacagagtacagtcccccaggttcatgctttaaatatccttagagcattgttcagagatacgcgcctgggagaaaatattattccttatgttgctgatggagctaaggctgcaattctgggttttacatcaccggtctgggcagtgcgaaattcatccacacttctctttagtgccttgatcacaagaatttttggagttaaaagggcaaaggatgaacattccaaaacaaatagaatgacagggagagagtttttctctcgtttcccagaactctatccttttcttctcaaacagttggaaactgtagccaatacagtagacagtgatatgggagaaccaaatcgtcatccaagcatgtttctcttacttttggtgttggagagactctacgcttccccgatggatggtacttcttctgctctcagcatgggaccttttgttcccttcattatgaggtgtggtcactcacctgtctaccactcccgtgaaatggcagctcgtgccttggtcccatttgttatgatagatcacattcctaataccattcgaactctgttgtccacactccccagctgcactgaccagtgtttccggcaaaaccacattcatgggacacttctccaggtttttcatttgttgcaagcctactcagactccaaacacggaacgaattcagacttccagcacgagctgactgacatcactgtttgtaccaaagccaaactctggctggccaagaggcaaaatccatgtttggtgaccagagctgtatatattgatattctcttcctattgacttgctgcctcaacagatctgcaaaggacaaccagccagttctggagagtcttggcttctgggaggaagtcagagggattatctcaggatcagagctgataacgggattcccttgggccttcaaggtgccaggcctgccccagtacctccagagcctcaccagactagccattgctgcagtgtgggccgcggcagccaagagtggagagcgggagacgaatgtccccatctctttctctcagctgttagaatctgccttccctgaagtgcgctcactaacactggaagccctcttggaaaagttcttagcagcagcctctggacttggagagaagggcgtgccacccttgctgtgcaacatgggagagaagttcttattgttggccatgaaggaaaatcacccagaatgcttctgcaagatactgaaaattctccactgcatggaccctggtgagtggcttccccagacggagcactgtgtccatctgaccccaaaggagttcttgatctggacgatggatattgcttccaatgaaagatctgaaattcagagtgtagctctgagacttgcttccaaagtcatttcccaccacatgcagacatgtgtggagaacagggaattgatagctgctgagctgaagcagtgggttcagctggtcatcttgtcatgtgaagaccatcttcctacagagtctaggctggccgtcgttgaagtcctcaccagtactacaccacttttcctcaccaacccccatcctattcttgagttgcaggatacacttgctctctggaagtgtgtccttacccttctgcagagtgaggagcaagctgttagagatgcagccacggaaaccgtgacaactgccatgtcacaagaaaatacctgccagtcaacagagtttgccttctgccaggtggatgcctccatcgctctggccctggccctggccgtcctgtgtgatctgctccagcagtgggaccagttggcccctggactgcccatcctgctgggatggctgttgggagagagtgatgacctcgtggcctgtgtggagagcatgcatcaggtggaagaagactacctgtttgaaaaagcagaagtcaacttttgggccgagaccctgatctttgtgaaatacctctgcaagcacctcttctgtctcctctcaaagtccggctggcgtcccccaagccctgagatgctctgtcaccttcaaaggatggtgtcagagcagtgccacctcctgtctcagttcttcagagagcttccaccagctgctgagtttgtgaagacagtggagttcacaagactacgcattcaagaggaaaggactttggcttgcttgaggctgctggcctttttggaaggaaaggaaggggaagacaccctagttctcagtgtttgggactcttatgcagaatcgaggcagttaactcttccaagaacagaagcggcatgttgaagaaaatctgggggattgggatgggggtatgtgtggatttttcctccactaaatctgcaggaaacatgttgaacataaattcaaaaattttatcccattcatgcctcccctaaaaaaaaaaaaaaaaaaaaa

SEQ ID NO: 570 - DNA, 3433 bp, Homo sapiens
cggctcagagctccggaccgcgggcggaggggaggggcagggggcggtgccacggcctgccagcccgcccgcccgcccgccagccagccctccccgcggccggctcggctccttggcgctgcctggggtcctttccgcccggtccccgcttgccagcccccgctgctctgtgccctgtccggccaggcctggagccgacaccaccgccatcatgccggccgtgtccaagggcgatgggatgcgggggctcgcggtgttcatctccgacatccggaactgtaagagcaaagaggcggaaattaagagaatcaacaaggaactggccaacatccgctccaagttcaaaggagacaaagccttggatggctacagtaagaaaaaatatgtgtgtaaactgcttttcatcttcctgcttggccatgacattgactttgggcacatggaggctgtgaatctgttgagttccaataaatacacagagaagcaaataggttacctgttcatttctgtgctggtgaactcgaactcggagctgatccgcctcatcaacaacgccatcaagaatgacctggccagccgcaaccccaccttcatgtgcctggccctgcactgcatcgccaacgtgggcagccgggagatgggcgaggcctttgccgctgacatcccccgcatcctggtggccggggacagcatggacagtgtcaagcagagtgcggccctgtgcctccttcgactgtacaaggcctcgcctgacctggtgcccatgggcgagtggacggcgcgtgtggtacacctgctcaatgaccagcacatgggtgtggtcacggccgccgtcagcctcatcacctgtctctgcaagaagaacccagatgacttcaagacgtgcgtctctctggctgtgtcgcgcctgagccggatcgtctcctctgcctccaccgacctccaggactacacctactacttcgtcccagcaccctggctctcggtgaagctcctgcggctgctgcagtgctacccgcctccagaggatgcggctgtgaaggggcggctggtggaatgtctggagactgtgctcaacaaggcccaggagccccccaaatccaagaaggtgcagcattccaacgccaagaacgccatcctcttcgagaccatcagcctcatcatccactatgacagtgagcccaacctcctggttcgggcctgcaaccagctgggccagttcctgcagcaccgggagaccaacctgcgctacctggccctggagagcatgtgcacgctggccagctccgagttctcccatgaagccgtcaagacgcacattgacaccgtcatcaatgccctcaagacggagcgggacgtcagcgtgcggcagcgggcggctgacctcctctacgccatgtgtgaccggagcaatgccaagcagatcgtgtcggagatgctgcggtacctggagacggcagactacgccatccgcgaggagatcgtcctgaaggtggccatcctggccgagaagtacgccgtggactacagctggtacgtggacaccatcctcaacctcatccgcattgcgggcgactacgtgagtgaggaggtgtggtaccgtgtgctacagatcgtcaccaaccgtgatgacgtccagggctatgccgccaagaccgtctttgaggcgctccaggcccctgcctgtcacgagaacatggtgaaggttggcggctacatccttggggagtttgggaacctgattgctggggacccccgctccagccccccagtgcagttctccctgctccactccaagttccatctgtgcagcgtggccacgcgggcgctgctgctgtccacctacatcaagttcatcaacctcttccccgagaccaaggccaccatccagggcgtcctgcgggccggctcccagctgcgcaatgctgacgtggagctgcagcagcgagccgtggagtacctcaccctcagctcagtggccagcaccgacgtcctggccacggtgctggaggagatgccgcccttccccgagcgcgagtcgtccatcctggccaagctgaaacgcaagaaggggccaggggccggcagcgccctggacgatggccggagggaccccagcagcaacgacatcaacgggggcatggagcccacccccagcactgtgtcgacgccctcgccctccgccgacctcctggggctgcgggcagcccctcccccggcagcacccccggcttctgcaggagcagggaaccttctggtggacgtcttcgatggcccggccgcccagcccagcctggggcccacccccgaggaggccttcctcagcccaggtcctgaggacatcggccctcccattccggaagccgatgagttgctgaataagtttgtgtgtaagaacaacggggtcctgttcgagaaccagctgctgcagatcggagtcaagtcagagttccgacagaacctgggccgcatgtatctcttctatggcaacaagacctcggtgcagttccagaatttctcacccactgtggttcacccgggagacctccagactcagctggctgtgcagaccaagcgcgtggcggcgcaggtggacggcggcgcgcaggtgcagcaggtgctcaatatcgagtgcctgcgggacttcctgacgcccccgctgctgtccgtgcgcttccggtacggtggcgccccccaggccctcaccctgaagctcccagtgaccatcaacaagttcttccagcccaccgagatggcggcccaggatttcttccagcgctggaagcagctgagcctccctcaacaggaggcgcagaaaatcttcaaagccaaccaccccatggacgcagaagttactaaggccaagcttctggggtttggctctgctctcctggacaatgtggaccccaaccctgagaacttcgtgggggcggggatcatccagactaaagccctgcaggtgggctgtctgcttcggctggagcccaatgcccaggcccagatgtaccggctgaccctgcgcaccagcaaggagcccgtctcccgtcacctgtgtgagctgctggcacagcagttctgagccctggactctgccccgggggatgtggccggcactgggcagccccttggactgaggcagttttggtggatgggggacctccactggtgacagagaagacaccagggtttgggggatgcctgggactttcctccggccttttgtatttttatttttgttcatctgctgctgtttacattctggggggttagggggagtccccctccctccctttcccccccaagcacagaggggagaggggccagggaagtggatgtctcctcccctcccaccccaccctgttgtagcccctcctaccccctccccatccaggggctgtgtattattgtgagcgaataaacagagagacgctaa

SEQ ID NO: 571 - DNA, 6303 bp, Homo sapiens
ctcccggctccgtagtaagcatggcggcggcggcgttcgtggtccctcgggtgaaacagaaagcgggagctacgcggagagggagcgaagagcggggctgaggcggcggcgtcactgccaggaaacaaccccaacagtcagcgcgccggcggccgcggcggccctgagagctgactctgcagctgaggtagagagacaacgatcaggaaccctaagaagaggcgccagaggagccgccttctgcctcagaacggcgtgactcggagaattggagcgttattcagtatattaatgtcttattgataatggcagaacatccaccactactggatacaactcagatcttaagtagtgatatttctcttttgtctgcccctattgtaagtgcagatggaacacaacaggttattctggtacaagttaacccaggagaagcatttacaataagaagagaagatggacagtttcagtgcattacaggtcctgctcaggttccaatgatgtccccaaatggttctgtgcctcctatctatgtgcctcctggatatgccccacaggttattgaagacaatggtgttcgaagagttgtcgtggtccctcaggcaccagagtttcaccctggtagtcacacagttctccaccgttctccacatcctcctctacctggtttcattcctgtcccaactatgatgccgcctccaccacgtcatatgtactcacccgtgactggagctggagacatgacaacacagtatatgccacagtatcagtcttcacaagtctatggagatgtagatgctcactctacacatggaaggtccaactttagagatgaacgatctagtaaaacatatgaacgtttgcagaaaaaattgaaggatcgccaaggaacacagaaagataaaatgagcagtccaccatcatcaccccagaaatgcccttctcccattaatgaacataatggacttataaaaggacaaattgctggtggtataaacacaggatcagcaaaaatcaagtctgggaaggggaaaggtggtacacaagttgatacagaaattgaagaaaaagatgaagaaactaaagcatttgaagcacttctttccaacattgtcaaaccagtggcctccgacatccaggcaaggacagtagtacttacctggtcaccaccttccagcctcattaatggtgaaacagatgaaagtagtgtaccagagctctatggttatgaagttctgatctcaagtactggaaaagatgggaaatacaaaagtgtatatgtaggagaagaaacaaatatcactttaaatgatctcaagccagccatggattaccatgcaaaagtccaggcagaatataattctataaagggaactccttcagaggctgaaatctttaccaccttgagctgtgaacctgatatacctaatccaccaaggatagccaatcggaccaaaaattcactcactttgcaatggaaggcacctagtgacaatggttctaaaatccaaaactttgtattagaatgggatgaaggaaaaggaaatggagaattttgtcagtgttacatgggctcacagaaacaatttaaaattactaaactttcaccagcaatgggctgtaaattcagactatcggccagaaatgactatggtacaagtggttttagtgaagaagtcttatattacacctcaggctgtgctccttctatgccagcaagtcctgtattaaccaaggctggaattacttggttatccttacaatggagtaagccctcaggaacaccatcagatgaaggaatttcttacattttagagatggaggaagaaacttcaggatatggttttaagcctaaatatgatggagaagatcttgcttacacagtgaaaaatctcagacgtagtactaagtataaatttaaggttattgcttacaactcagaaggtaaaagtaatccaagtgaagtagtagaatttactacttgccctgataaaccaggcatacctgtaaagccttcagtgaaaggaaagatacattcacacagttttaaaataacctgggatccaccaaaagacaatggcggagcaaccatcaataaatatgtagtggagatggcagaaggttctaacggaaacaaatgggaaatgatatacagtggtgctaccagggaacatctttgtgatcgactgaatccaggctgtttctatcgtttacgagtttactgcatcagtgatggaggacagagtgcggtctctgaatctttacttgtgcagactccagctgtgcctcctggcccatgcctccctcccagattacagggtagacccaaagcaaaagaaatacagttacgatggggaccccctctggttgatggtggatcacccatttcctgttacagtgtggaaatgtctcctatagaaaaagatgaacctagagaagtttaccaaggttctgaagtagaatgtacagtgagcagccttcttcctggaaagacatacagcttcagactacgtgcagctaacaaaatggggtttggaccattttcagaaaaatgtgatattactacagcccctgggccaccagatcagtgcaagccccctcaagtgacatgtagatctgcaacttgtgcacaagtgaattgggaggttcctttgagtaatggaacagatgtcactgaatatcgactggagtggggaggagttgaaggaagtatgcagatatgttactgtgggcctggtctcagttatgaaataaaaggactttcaccagcaactacctattattgcagggtccaggctctgagtgttgtgggtgcaggccctttcagtgaagtagtagcctgtgtgactccaccatcagttcctggcattgtgacctgtcttcaagaaataagcgatgatgagatagaaaatccccattattcaccttctacatgccttgcaataagctgggaaaagccttgtgatcatggttcggaaatccttgcctacagcatagactttggagataaacaatccctaacagtgggaaaggttacaagctatattatcaacaatttgcaaccagatacaacatacagaatacgaattcaagccttgaatagccttggagctggtcctttcagccatatgataaaattaaaaactaagcctctccctcctgatccacctcgtctggaatgtgttgcctttagccaccagaaccttaagctgaaatggggagaaggaactccaaagacattgtcaaccgattctattcagtaccaccttcagatggaggataagaatggacggtttgtatccctatacagaggaccatgtcatacatacaaagtacaaagacttaatgagtcaacatcctataaattctgtattcaagcttgtaatgaagctggggaaggtcccctctcccaagaatatattttcactactccaaaatctgtcccagctgccttgaaagcccccaaaatagagaaagtaaatgatcacatttgtgaaattacatgggagtgtttacagccaatgaaaggtgatccagttatttacagtcttcaagttatgttgggaaaagattcagaattcaaacagatttacaagggtcccgactcttccttccggtattccagccttcagctgaactgtgaatatcgcttccgtgtatgtgccattcgccagtgccaagactctctgggacaccaggacctcgtaggtccctacagcaccacagtgctcttcatctctcagaggactgaaccaccagccagcaccaacagagacactgtggaaagcacaaggacccgacgggcactgagtgacgagcagtgtgctgccgtcatccttgtgctgtttgctttcttttccattttgattgcctttatcattcagtactttgtaatcaagtgaaaatataactttattttttaactctattacattttattttgtcatgtactaaaattatttctgtattgcttttataaaaaacagtggcatttagcactggcattgagactatagcacatcatttttgccattttcagtgcttatattgttaggtagaggctggcactttattagaatgcaagccacaaaaatatcaattttgttttttttgttagggtgggtcttctttttttctttccctctctctttttttaacaaatgccttcttatagaaaaactttctaagaggcaacaatttagaatggatattttgacgaatcggcatgagtgtaacagtgataacctgatctgtttgttttaaagattattaccaagtgaaaaattcagaatgaatagaatttacactaacatgctatataaaatgttaaagtctgatgctgtgaaagcaatctagtgctatatttctacctcctcatttgtcttaattatttggtaagtgggattatgatgagtaactggaggggcttagaaacaaaaactggatgaaagagtatgcatgaagaaaagcttctttgataaatgtggagttcttcattataaatatatattcatgaattcacagataagtacttaaagaacagacagtttacttggcctaaaaatattttgatgtttactcaaaaagtacctcttcaggtcttgagaacatggaaaagaattgagtgcttttaaatactttttagaaagtaatcataaaagtaaattgaatttcaaacctatttggcttctgttttgtgaacctttgaactatatgtatgtgtataagggtatacacatacatatatggcatataacaagtgtacacatatacacataacaagtgtagaagtatatattacatacatacactcactctgtctggtataggctaattttgaagaactcccataagtttctgctgcttctcccataactgctgccaccaccatcagaattcataatcaaacctaacctttttgtttggggcaccaaatctgaagacaaaattaatttgcaccagtaaacttcaagctgctttctttcttgaaaactaaacgtttaacgtataatgtctgtttggatactgttccaaattgttgattgcatgtggttaatgttgcattagagcactttgcaattgcataattcattaatgttttgtgagcttgcatttgtgagttattggatgatcagactgaattttgtcaagtatcacattgtacatcttgcctagatgtcgatgactgcaagtaataatacagtttataatgaaactatctacaattcttgttttagcacatctgttatccgtaaaacacctgtaactagcttttttaatttattatttgaattttaggatagcgaatcactaatttttagttgctgaggttggcattttagtgattattaagcacttctgtcagtctttgaaaaaagaacgtattttttgtgctttgaagatctctgaagaatttcttttataatagaatgggcatgtattgtaacagttttatgtcaaatgatctgtgctgtagaaaaacattaacccttgttcaaaaaagaaatggataaacttggcctttctaagtggtaagaatgacctgtcactataatatactgtatgtttacattttatttaaatttaatctcttatgtatagggtgataaccttccccagaaacaacagtgattgcgattgttttctagaaacttctttaaagtgccacatttggcagtacaaatgagtctgagtgtaatagcccagagatttatatatagttgaatgtctaaaatggtaaaatgtgccactgtgtcaagttacagtggcttatgtttttcatagtaattcaaatgaacttcctatttttgatagtaaatgtcatttaatagtatacttgccatttgagcctcactgcaaaattagtgcagaggagaaaacaatttttaatgtaatcttgattttacctcatatactgtacattccaaaaactctaaactttttaaagattatagatacactaccaaacatatcaccttaaaattgtataaggctgaatgaacttcatacaaatgaaaaaaatctcataaaaatacataaactatgtagcaaaagtatctgtaaaatccatggaaaataaaagttgtatcattctttttgagatacgtttattgtattcatatatattcattatttgctacctgtttaagaaagtgaaatgttatggtctcccctcttccaatgagcttaaaacatttttcccaacagtatataaatcttcaacatgagaggatgtatatttattatataaagcccagtaaagaataaaattagaagttttatcctaaaaaaaaaaaaaaaaaa

SEQ ID NO: 572 - DNA, 4187 bp, Homo sapiens
ggcggcgcaggggcggggctttacggacgcaagcacgtcgaagcgctgctcctggagccgcggagggtgcgggtttggctgcggtggtttctgtggcggttgctgtggcggagtttggaggttggagagaaatccaggtactcactagactggtaccttctgccaccatgggggagcttttccggagtgaagaaatgacactggcccagctttttctacagtcagaggctgcttattgttgtgtcagtgaattaggagaacttggaaaggttcagtttcgtgacttaaatccagatgtgaatgttttccaacggaaatttgtgaatgaagttagaagatgtgaagaaatggatcgaaagcttcgatttgttgagaaagagataagaaaagctaacattccgattatggacaccggtgaaaacccagaggttcccttcccccgggacatgattgacttagaggccaattttgagaagattgaaaatgaactgaaggaaatcaacacaaaccaggaagctctgaagagaaacttcctggaactgaccgaattaaaatttatacttcgcaaaactcagcaattttttgatgagatggcggatccagacttgttggaagagtcctcatccctcttggagccaagtgagatgggaagaggcactcctttaagacttggcttcgtggctggtgtcattaaccgggagcgcatccctacttttgagcgcatgctttggcgggtatgccggggaaatgtgttcctgcgacaggctgaaatcgagaaccccctggaggatcctgtgactggcgactacgtgcacaagtctgtgtttatcattttcttccaaggcgatcagctgaaaaacagagtcaagaaaatctgtgaagggttccgagcctcactctatccctgtcctgagacaccacaggagaggaaggaaatggcttctggagtgaataccaggattgatgatctccaaatggttctgaatcaaacggaggatcaccgccagagggttctgcaggcagctgctaagaacatccgtgtctggttcatcaaagtgcggaagatgaaggccatctatcacaccctgaacctgtgcaacatagatgtgactcagaaatgcttgattgcagaggtctggtgccctgtcaccgaccttgactccatccagtttgcactcagaaggggcacggaacacagtggttccactgtaccttccattttgaacaggatgcagacaaaccagactcccccaacctataacaaaaccaacaagtttacctatggctttcagaacatagtagatgcttatggaattggaacttaccgagagataaatccagctccgtatactattatcacgttcccttttctatttgctgtgatgtttggagacttcggtcatggcattttaatgaccctttttgctgtgtggatggtactgagggagagccggatcctttcccagaagaatgagaatgagatgtttagcactgtgttcagtggtcgatacattattttattgatgggtgtgttctccatgtacactggcctcatctacaatgattgcttttccaagtctcttaatatctttgggtcatcctggagtgtacggccgatgtttacttataattggactgaagagacgcttcgggggaaccctgttctacagctgaacccagccctccctggagtgtttggtggaccatacccttttggcattgatccaatttggaacattgctaccaataaactgacgttcttgaactcctttaagatgaagatgtctgttatccttggtatcatccatatgctgtttggagtcagcctgagtctgttcaaccatatctatttcaagaagcccctgaatatctactttggatttattcctgaaataatcttcatgacctctttgtttggctatttggttatccttattttttacaagtggacggcctatgatgctcatacctctgagaatgcaccaagccttctgatccatttcataaacatgttcctcttttcctacccagagtctggttattcaatgttgtattctggacagaaaggaattcagtgtttcctggtagtggttgcactactgtgtgtaccttggatgctgctgtttaaaccattggtccttcgccgtcagtatttgaggagaaagcatttgggaactctcaactttggtgggatcagggtgggcaacggaccgacagaggaggatgctgagattattcagcatgaccagctctccacccactcagaggacgcagacgagtttgactttggggacaccatggtccaccaggccatccacaccatcgagtactgcctgggctgcatctccaacactgcctcctacttgcggctctgggccctcagcctcgctcatgcgcagctgtctgaggtgctttggaccatggtgatccacatcggcctgagcgtgaagagcttggcgggaggtttggtgctgttcttcttcttcactgcctttgccaccctgaccgtggccatcctcctgatcatggagggcctctcggcctttctccacgcactgcgcttacactgggttgagttccagaataaattctacagcgggaccggtttcaagttcttacccttctccttcgagcatattcgggaagggaagtttgaagagtgagtccctgtgagggccgtgtgccccatgctaccctccccgcctccctccacagtgatcagctgtgcctctctgcctgttggttgtgatctgtgggcaccagctcattcgtgtcaccctgtctgtgagtcatttagatagaatagtcctccttgggtctcccaccacccctagctttgtgtgtagtgtagtgattttctggctgtcactcatactcactgggcaccagccttgccctcttagcctccatccatccagacagcccttcccacctcctggtggtgagccagtctgcattcccacgccatcccaaagccctttcatcttccccgtgcattgtagatggaaggagcacccatgccattcacatctagactttgagttccctgcatctgccaccgtagtttctagcaggagtagtggggggagtaatacagattcttccctagaaggggacactggtaacatgtcccactcttggattagcaggggtgggtccaggaagatgatatttgcgtcttttgcccacccccctggcattcagctggacccaactaggccatcatgagtggcttctccctgtcatccccaggggtcataggatatctacaccgcctttctgaccccaccctgcactcccatcctttcctctctccccgttcatgccctgcactacatagcacagccgggatgcttggaacagaggccttggctgctccgcagtgcacagggcttccctctctcggggttggcttcttcccaggccttgcatgggccctgcccacaagcacaccctcaggccgagggtgcagactgatgctcttccctgatggagaccctgagatcttccccacccccaatcatgatgtcttcagtgtgggactggggtcctcttggttctgcctgcagcctgcctggctccgcccctagtgccccctcctcaccacactggccccaggtctcaggaggggtgtcctgggcagggaaggtcagtgtcactgatggtttgctgtttggaagccattggcagggctgccgtgcatgtggctgtgagggctgcacagtcctgccaaggggcttcctccttgtcaccccgaaccttgtaatcgtgtgctggcgtggcagccctggctaagttaatccccaccgctttcagtggtagaaagaattccctgagtgggccaggctggtgccctcctcctaccctggcttttctgagtgagctgcctggagccctcatcccctctcccaggctgggctggccctgggcggggccactgtgtgctggcccactgtgacctgacccgaccttgtgcagcccccctgccctggtgtcctgggttttcgtgatgatctttgctctgtttccagtggggtttgaagcagagttcagggaaccctgcccaaggtcctcctgttcagacattcctatgttgaataaagtatgtttgacttccccggaaaaaaaaaaaaaaaaaaaaaaaaaaaaaaaaaaaaaaaaaaaaaaaaaaaaaaaaaaaaaaaaaa

SEQ ID NO: 573 - DNA, 1977 bp, Homo sapiens
gcccttcgggacgagctggaggcagagcgtgagtacaaagtgatcggcctcggccgcacgtagtagcccccctactccccggccaagtcagggcctccctcttcccgcggagtcgcaaccacgggtagctcgtgtaggtaacggcaggtccaggcctccgcatgagcggagggccccccgcgcgaccttgaatggcccgggcgcgcgcggtcgtgtgggagttgtagtcctccgtccccgtccgcgcggactccgtttcccgtggtgccccgggcggcccgcttccggcgcagttagttacgagtcggcgcacgcggcctcggtccggttgactttgcggagccatggagggcggcttcggctccgatttcgggggctccggcagcgggaagctggacccagggctcataatggagcaggtgaaagtgcagatcgccgtggccaacgcgcaggagctgctgcagaggatgacggacaagtgtttccggaagtgtatagggaaacctgggggctccctggacaactccgagcagaagtgcatcgccatgtgcatggaccgctacatggacgcctggaacaccgtgtctcgcgcctacaactcgcggctgcagcgggaacgagccaacatgtgaccggcgagcgcgggccaccccaccctgttcatttccataaacgtgctttgagaggcggggtccgcatgtacgtactgcctgcccggggcttaggagggtggcaccggtgctgggacacacgggactgtgtcctcgccaccccccgccctgccccctgccagccagtgcagcttggatctcgggggtgtggggccctgtgccttcctgaagtgctggcagcccagtggcacctccttcaggcctttggggtattcccctagtgtgcccaagtcagcctcatattctgggcggacagcttgtctggacttcggagttgggggtggtcagacaccacaggagctgtcacctcctgcggatgggcaaataaattggtggaggacggagagaaacctctttatttccctcctgaggggtctctgggaagaggtgacgcgtgtccctggaaccccagctcggagggtctcagcctcccctgggttgggagaagtccatctttccccttagtgccaccgggctgctgagtcacgaggaatgtgttgctgctgccacccctgccccaaaggctaagggggacagccttccccttgtcagggcttgctttgaccctgcttcgttccaccccgggtcctggtggagcaccaggcaggtggtcctcgctgtgacactgaggtgctgagccagtgagctagggtggaggggctgtgtttattggaacaaagggtggtaccaaaatgcatccccatgacccacagcccccccacacccgtccttgggtagggtacggtggggtggggtgttgggtggcctgctgctcctgttgctttcacgtagagtctcggcctgggcagtcacgtggtggtcactcctggatgtgctgtcctatccagcctctcacagctgccacccgggtatagacacctgggaagtggggccggccacagccatagccccagctagtgaccccagttagcacccaccgtccagagggctccctgcaggccaggggtcccccagcgtcaccctgttggggagagaagaaagggggttcagaggccggtacctcccctacagcagcccttgggtcattggcccctctaggagtgaccctagtgacttcccctgggagccgcattttcactatctggaaaatgggctcaatgcaaaggtggcagacatttatggacacccgccacgtggtcccggagtggaacggtgcctcccactgcagcctctgcctgctctgccgccgaggcccggggatgggatgcggtgggttgcccaataaacggctgtggagtggaaattcctccagagccaaaaaggcaaaaaaaaaaaaaaaaaaaaa

SEQ ID NO: 574 - DNA, 4031 bp, Homo sapiens
agagctccagggagggacctgggtagaaggagaagccggaaacagcgggctggggcagccactgcttacactgaagagggaggacgggagaggagtgtgtgtgtgtgtgtgtgtgtgtgtgtgtatgtatgtgtgtgctttatcttatttttctttttggtggtggtggtggaaggggggaggtgctagcagggccagccttgaactcgctggacagagctacagacctatggggcctggaagtgcccgctgagaaagggagaagacagcagaggggttgccgaggcaacctccaagtcccagatcatgtctctgtggggtctggtctccaagatgcccccagaaaaagtgcagcggctctatgtcgactttccccaacacctgcggcatcttctgggtgactggctggagagccagccctgggagttcctggtcggctccgacgccttctgctgcaacttggctagtgccctactttcagacactgtccagcaccttcaggcctcggtgggagagcagggggaggggagcaccatcttgcaacacatcagcacccttgagagcatatatcagagggaccccctgaagctggtggccactttcagacaaatacttcaaggagagaaaaaagctgttatggaacagttccgccacttgccaatgcctttccactggaagcaggaagaactcaagtttaagacaggcttgcggaggctgcagcaccgagtaggggagatccaccttctccgagaagccctgcagaagggggctgaggctggccaagtgtctctgcacagcttgatagaaactcctgctaatgggactgggccaagtgaggccctggccatgctactgcaggagaccactggagagctagaggcagccaaagccctagtgctgaagaggatccagatttggaaacggcagcagcagctggcagggaatggcgcaccgtttgaggagagcctggccccactccaggagaggtgtgaaagcctggtggacatttattcccagctacagcaggaggtaggggcggctggtggggagcttgagcccaagacccgggcatcgctgactggccggctggatgaagtcctgagaaccctcgtcaccagttgcttcctggtggagaagcagcccccccaggtactgaagactcagaccaagttccaggctggagttcgattcctgttgggcttgaggttcctgggggccccagccaagcctccgctggtcagggccgacatggtgacagagaagcaggcgcgggagctgagtgtgcctcagggtcctggggctggagcagaaagcactggagaaatcatcaacaacactgtgcccttggagaacagcattcctgggaactgctgctctgccctgttcaagaacctgcttctcaagaagatcaagcggtgtgagcggaagggcactgagtctgtcacagaggagaagtgcgctgtgctcttctctgccagcttcacacttggccccggcaaactccccatccagctccaggccctgtctctgcccctggtggtcatcgtccatggcaaccaagacaacaatgccaaagccactatcctgtgggacaatgccttctctgagatggaccgcgtgccctttgtggtggctgagcgggtgccctgggagaagatgtgtgaaactctgaacctgaagttcatggctgaggtggggaccaaccgggggctgctcccagagcacttcctcttcctggcccagaagatcttcaatgacaacagcctcagtatggaggccttccagcaccgttctgtgtcctggtcgcagttcaacaaggagatcctgctgggccgtggcttcaccttttggcagtggtttgatggtgtcctggacctcaccaaacgctgtctccggagctactggtctgaccggctgatcattggcttcatcagcaaacagtacgttactagccttcttctcaatgagcccgacggaacctttctcctccgcttcagcgactcagagattgggggcatcaccattgcccatgtcatccggggccaggatggctctccacagatagagaacatccagccattctctgccaaagacctgtccattcgctcactgggggaccgaatccgggatcttgctcagctcaaaaatctctatcccaagaagcccaaggatgaggctttccggagccactacaagcctgaacagatgggtaaggatggcaggggttatgtcccagctaccatcaagatgaccgtggaaagggaccaaccacttcctaccccagagctccagatgcctaccatggtgccttcttatgaccttggaatggcccctgattcctccatgagcatgcagcttggcccagatatggtgccccaggtgtacccaccacactctcactccatccccccgtatcaaggcctctccccagaagaatcagtcaacgtgttgtcagccttccaggagcctcacctgcagatgccccccagcctgggccagatgagcctgccctttgaccagcctcacccccagggcctgctgccgtgccagcctcaggagcatgctgtgtccagccctgaccccctgctctgctcagatgtgaccatggtggaagacagctgcctgagccagccagtgacagcgtttcctcagggcacttggattggtgaagacatattccctcctctgctgcctcccactgaacaggacctcactaagcttctcctggaggggcaaggggagtcggggggagggtccttgggggcacagcccctcctgcagccctcccactatgggcaatctgggatctcaatgtcccacatggacctaagggccaaccccagttggtgatcccagctggagggagaacccaaagagacagctcttctactacccccacagacctgctctggacacttgctcatgccctgccaagcagcagatggggagggtgccctcctatccccacctactcctgggtcaggaggaaaagactaacaggagaatgcacagtgggtggagccaatccactccttcctttctatcattcccctgcccacctccttccagcactgactggaagggaagttcaggctctgagacacaccccaacatgcctgcacctgcagcgcgcacacgcacgcacacacacatacagagctctctgagggtgatggggctgagcaggaggggggctgggtaagagcacaggttagggcatggaaggcttctccgcccattctgacccagggcctaggacggataggcaggaacatacagacacatttacactagaggccagggatagaggatattgggtctcagccctaggggaatgggaagcagctcaagggaccctgggtgggagcataggaggggtctggacatgtggttactagtacaggttttgccctgattaaaaaatctcccaaagccccaaattcctgttagccaggtggaggcttctgatacgtgtatgagactatgcaaaagtacaagggctgagattcttcgtgtatagctgtgtgaacgtgtatgtacctaggatatgttaaatgtatagctggcaccttagttgcatgaccacatagaacatgtgtctatctgcttttgcctacgtgacaacacaaatttgggagggtgagacactgcacagaagacagcagcaagtgtgctggcctctctgacatatgctaacccccaaatactctgaatttggagtctgactgtgcccaagtgggtccaagtggctgtgacatctacgtatggctccacacctccaatgctgcctgggagccagggtgagagtctgggtccaggcctggccatgtggccctccagtgtatgagagggccctgcctgctgcatcttttctgttgccccatccaccgccagcttcccttcactcccctatcccattctccctctcaaggcaggggtcatagatcctaagccataaaataaattttattccaaaataacaaaataaataatctactgtacacaatctgaaaagaaaaaaaaaaaaaaaa

SEQ ID NO: 575 - DNA, 9855 bp, Homo sapiens
cgcactcctgggcccgcccagccgccatcttggtctaggagggagcgcgccgcacgcgtgagtaaacagccggagctgggaaagtcgagctctggcagcgtctgggtgctgaggggcagaggcggagagaaccctgtcctgatcttcctagggtggccgacatgacggccaggggtcagagccccctcgcgccgctgttggagactttggaagacccttctgcctcccatggagggcagactgacgcttacctgactctgaccagtcgtatgactggagaagaaggaaaagaagtaattacagaaattgagaaaaaacttcctcggctgtacaaagttttaaagactcacatttccagtcaaaactcggagctgagtagtgctgctctacaagccctggggttttgcttatataatcccaaaattacctcagaattatcagaggcaaatgctctagaattgctttcaaaattgaatgataccattaagaattcagacaaaaatgtacgtactagagcactttgggtgatatctaagcagacatttccctctgaagtggttggcaaaatggtatccagtataattgattcattagaaatactgtttaacaaaggagagacgcattctgctgttgttgattttgaagcattaaatgttatcgtaaggctaattgaacaagccccaattcaaatgggagaagaggcagtgaggtgggcaaaactggtcatacctttagtggttcattcagcacaaaaggtacatttgcggggagcaactgctctggagatgggaatgccattattgcttcagaaacagcaagaaatagcatctattacggagcagcttatgactactaaattaatctcagaacttcagaagctatttatgagtaaaaatgagacttacgtgttaaaattatggcctttgtttgtcaaactacttggaaggaccttgcatcgaagtgggagtttcatcaattctctcttgcaactagaagaacttggatttcgtagtggagcacccatgattaaaaagatagcttttattgcttggaagagtttaatagataattttgctttaaatccagatatactatgtagtgcaaaaagactcaagttgttaatgcagcctttgagttccatccatgtgagaacagaaactctagcattaacaaaactagaagtctggtggtatttactgatgagacttggacctcatcttcctgctaattttgaacaggtttgtgtgcctctgattcaaagtacaataagcattgattctaatgcctcacctcagggcaattcgtgtcatgtagctacatctccaggtttaaatcctatgactcctgtacacaaaggtgcttcctccccgtacggagccccgggaactccccgaatgaacctgagttcgaatttaggtggaatggccacaatcccatccattcaacttttgggacttgaaatgttgcttcatttcttgttgggtccagaagccttgagttttgctaagcaaaataaacttgtgctgagcttagagccattggaacatccgttaatcagcagcccttcctttttttccaaacatgcaaatacacttatcactgctgttcatgatagctttgttgcagttggaaaagatgcccccgatgtggttgtcagtgctatctggaaggagctaattagcttggtgaagtcagttactgaatcaggtaacaaaaaagagaaaccaggttctgaagttttgactctcttattaaagtctttggaaagcatagtaaagtctgaagtatttcctgtatcaaaaacgctggtcctcatggaaattacaattaaaggacttcctcagaaagtattaggttcaccagcatatcaggttgctaatatggatattcttaatggaactccagctttgttcttaattcaattaattttcaacaatttcttggaatgtggtgtatcagatgaaaggttctttctcagtttggaatcacttgtaggctgtgttctttctggtccaacttcaccactagctttcagtgactcagttttaaatgttattaatcaaaatgcaaagcagttggaaaataaggagcatctctggaaaatgtggagtgttatagtcaccccattaactgaattgattaatcagaccaatgaagtaaatcaaggtgatgccttagaacataattttagtgccatctatggtgcattgactttaccagtaaaccacattttttcagaacagagatttccagtggccaccatgaagactttgcttagaacttggtcagaattatatagagcatttgctcgttgtgctgctttggtggcaacagcagaagagaacttgtgctgtgaggaactttcttccaagataatgtccagtttggaagatgaaggcttttctaatttgttgttcgtggatagaattatttatattattactgtaatggttgattgcattgacttctcaccatataatattaaatatcagcccaaagttaaatcaccacagagaccttcagattggtccaaaaagaagaatgagcccctagggaaattgacttctttatttaaacttattgtgaaagtgatctattctttccacacactgagcttcaaggaagcacattctgataccctcttcactattggcaactcaatcaccggcattatttccagtgtacttgggcatatttctttgccttctatgatccgaaaaatatttgcaactttaacaagacctctggcattattttatgaaaactcaaagcttgatgaagttcctaaagtatatagttgtctgaacaacaagttagaaaagctactgggagaaattattgcttgtctgcaattcagctacaccggaacttatgatagtgaacttcttgaacaactctccccactattatgcataatatttctgcacaagaataaacagattcgaaaacagagtgctcagttctggaatgccacttttgccaaagtgatgatgttggtttatcctgaagagttaaaaccagtactaacacaagccaaacaaaaatttctgctcctgttgcctggtttggaaactgttgaaatgatggaggaatccagtggaccatattctgatggaacagaaaattcacaactaaatgtgaagataagtggcatggagagaaaatcaaatggaaaaagagattcatttttggcacaaacaaagaataaaaaagaaaatatgaaaccagcagccaaactgaaacttgaatcttcgtctttaaaagtaaagggtgaaattcttttggaagaggaaaagtctactgactttgtgtttatacctccagaaggaaaagatgcaaaggaaagaatattaactgatcatcaaaaagaagttctcaaaacaaagcggtgtgatattcctgccatgtataataatctggatgtttcccaagataccttatttactcagtatagtcaggaagagcctatggaaattcctactttaaccagaaaaccaaaggaggattctaagatgatgattacggaggagcaaatggacagtgacattgtcattcctcaagatgtcacggaagactgtggtatggctgaacatcttgaaaagtcctccctttcgaataatgagtgtggttctcttgacaaaaccagtccagaaatgtcaaacagtaataatgatgaaagaaaaaaagctttaatttcatcaaggaaaacatcaactgaatgtgcatctagtacagaaaattctttcgttgtcagcagtagttcagtttctaataccactgttgctggaactcccccataccctacaagtcggaggcaaacctttattactttggagaagtttgatggttcagaaaatagaccttttagtccatcccccttgaataatatttcatcaactgttacagtgaaaaataaccaggaaaccatgattaaaacagattttctaccaaaagcaaagcaaagagaagggactttttcaaaatctgattctgaaaaaatagtgaatggaactaagagatcaagccggagagctggtaaagctgaacaaacagggaataaaaggtctaagcccttaatgagatctgagccggagaaaaatactgaggaatctgttgaaggcattgtagtcttagaaaataacccacctggtttgcttaatcaaacagaatgtgtgtcagataatcaggttcatctttctgaatctacaatggagcatgacaatacaaagcttaaagcagcaacagtggaaaatgctgtattattggaaactaatactgtagaggagaaaaatgtagaaattaatttggaatccaaagagaatacacccccagtagtaatatcagcagatcaaatggtaaatgaggatagtcaggttcagataactccaaatcagaaaacccttagacggtcttcaaggcgacgttcagaagtagtagagtctaccactgaaagccaagataaggaaaatagtcatcaaaaaaaggaacgacgtaaggaagaagaaaaacctcttcagaagagtccattgcatataaaagatgatgtgttacctaaacaaaaactgattgctgaacaaactctacaggagaatttaattgagaaaggaagtaatttacatgagaagactcttggggaaactagtgctaatgcagaaactgaacaaaataaaaaaaaggcagaccctgagaacattaagtctgagggggatggtacccaggacattgtagataagtcctctgagaaactagtcagaggccgaacacggtatcaaactagaagagcatctcagggtttgctttccagcattgaaaactcagaatctgatagttcggaggcaaaagaagaaggttctaggaagaagagatctggaaaatggaaaaacaaaagcaatgaaagtgttgacattcaagatcaagaagagaaagtggtgaaacaggaatgtataaaagctgaaaatcagtcacatgattataaagcaacttctgaagaagatgtaagcataaaatctccgatttgcgaaaaacaagatgaaagtaatactgtaatatgtcaggattctacagtaacttcagatttgttgcaagttcctgatgatttaccaaatgtgtgtgaggaaaaaaatgaaactagcaaatatgcagaatattcctttacaagtctacctgtgccagaatcaaatctaaggactagaaatgccattaagagattacataagcgagactcttttgataattgtagtttgggagaatcctcaaaaatagggatatcagatatttcttcgctttcagaaaaaacttttcaaacacttgaatgccaacacaagagaagtaggagggtgaggagatctaaaggttgtgattgctgtggggaaaaatcacaacctcaggaaaagtcactcattgggttaaagaatacagaaaataatgacgtagagattagtgaaacaaaaaaggcagatgtgcaagcacctgtaagcccatcagaaacttctcaagctaatccatattctgaaggacaatttttagatgaacatcatagtgtgaattttcatttgggtctcaaagaggataatgatactattaatgattcattaattgtttctgaaaccaaatcaaaagaaaacactatgcaagaatctcttccttctggaatagtaaactttagagaggaaatttgtgatatggattctagtgaagcaatgtctcttgaaagccaggagtcacctaatgaaaattttaaaactgttggcccgtgtttaggagactcgaaaaatgtttcacaggaatctttggagacaaaagaagaaaaaccagaagaaaccccaaaaatggaactgagtctagagaatgttactgttgaaggaaatgcatgtaaagtaacagaatccaatctagagaaagcaaaaactatggaattgaatgtaggaaatgaagctagctttcatggacaagagagaaccaaaactggtatttctgaagaagcagcaatagaagaaaataaaagaaatgatgactctgaagcagacacagctaaactgaatgccaaagaagtagcaactgaggaatttaattcagatattagtctttctgataatactacacctgtaaaattgaatgctcaaactgagatttctgaacaaacagcagctggggaactagatggaggaaatgatgtatctgatctacactcatctgaagaaacgaataccaaaatgaaaaataatgaagaaatgatgatcggcgaggcaatggctgaaactggccatgatggtgaaacagagaatgagggcataactaccaaaacctcaaagcctgatgaagctgaaacaaacatgttgactgcagaaatggacaactttgtttgtgacacagttgaaatgagcactgaagaaggaatcattgacgctaataaaactgaaacaaatactgagtatagtaaatctgaagaaaaattagataacaatcaaatggtaatggaaagtgatattttacaggaagatcaccatacttcacagaaagtggaggaaccatcacagtgtctggcatctggaacagctatctctgagctaataatagaagacaataatgcatctcctcaaaaactaagggaacttgatccttcacttgtgtcagcaaatgacagtcctagtggcatgcagacacgctgtgtctggtctcctttggcttctccgtctacgagcattttaaagagaggactaaaaagatcccaagaagatgaaatctcatcacctgttaataaggttcgccgtgtctcctttgcagatccaatataccaagcaggattggcagatgacattgatagacggtgctctattgttaggtcccattcttccaatagttctcccataggaaaaagtgttaaaacttctcctactacacaatctaagcataataccacttcagccaaaggatttctgtccccaggatcacgtagccctaaatttaagagctcaaagaagtgtttaatttcagaaatggccaaagaatccataccatgcccaacagaaagtgtttacccaccattggtgaactgtgtggcaccagttgacatcattttacctcagattacatcaaacatgtgggcaagaggcctgggacaactcattagagctaagaatataaaaactattggtgatttgagtactcttacagcatctgaaataaaaactcttcctatccgttctccaaaagtgtccaatgtaaaaaaggctctcagaatatatcatgagcagcaggtgaagactcgtggactagaagagattccagtttttgatatttctgaaaaaacagtaaatggaatagaaaataaatctttgtcacctgatgaagaaagacttgtctcagatataattgatcctgttgctttagaaattccattatccaaaaaccttctggcacagattagtgctcttgctcttcagctggattcagaagatcttcataattattcaggaagccaactatttgaaatgcacgagaaactaagttgtatggcaaactctgtaataaaaaatctacagtcacgttggagatcaccatcccatgaaaattctatttagtattttcagagaaaattgaaggtttttttaaacatcactggatttcttgattgaggaaacaagttctgaaataatagcacaatttcaaagaagagactctttgcaaagttgataacatttcaaaccctgaaggacagtgacttattatgtaagttcaattttgtaagttcattatgtaagatccttttttttttcataatatgtattcttggctgctatgcgtggtttttcaggaaatttaattatcttactgagatgtgaaagcaaaactagtaacagaacttacattttatttcatgctttcttaaacccgtgcatattctggtgaaacatgtaaaatactttaagtaaaattgaacatttttatttgaatttttgctgaactgataaaggtgtttatatttttgtttgttggtttgtttaattcatgtttgttgggactgaggtttaggaagtttgttactggttaaaaacctcaaatgaaatgcgaaagaatttgaatttttcctgcatatgtcaactttggacagctttcaagaaaaatgagaaaagtttcaacttctggcggttaaaatattaatgcagaatttactaagattttattcatttgcattagcaaatattcatgcagcagcagttgactgaaaatttattcttatgagacgtatagtattcatttttaaatgcatgattgtacattatgtatagacgacaatgtttttaatttataaatttcattctttgttaattgcatgggtttttctgcagcttattgtgaataccttggttctgttcaatagaaacattttgtatatattaaatactgaaatatcagtatcgacggtggaagtgcttcatgggcttgctgcacatatttgtaggatactgtatctgcaaatgcaacaacaaatagttttgtacttggttaacagtcttagttaaaacatgagtttattttctaaaagtatccagaataagtaaaattatagaaataagaaaatgttacacaactttgctgttcatacccttaccttcttactacttttggtttggaggagggtatcaccactagaaagtgtgcctccttaagatttcttaaaggaaagttagtttcagtatttcacagcaagttggactacaaaatctagagttgatctgctttttaaaccttcatttaaaagcaaacttggaagaaatttgaaactgatgtttttaatatatgtctgtgttgcctaggttttctttttttaaagaggtatgtaattaaaacctttgtaaaatttgccaactaatattagtgcctgacttcccatatttgtttcatctttttaactgacagtatatctcacttcttctttgaatagaatgagtgagtgatctcagttttcacattttattcagaagctaatccctacttagcaaggcacacattctacagcaagtcatagaaagtttaatccttgtgcctccttagctctcgtatattcagggatctctataaaagttggtgtcttttttcatcatcataaattcatcataatcacagatatttttgggtctaagatattcatataccaaggatggttttgtaaagaattctgggatcattgaattaaggattgtggcttgaagtaactaaagaaaaatactaatttccttaaaaggaattataattatgatttacattttacatcattaatttcccaaattatatttaaccgtaaggaggtgcacatgagtttttagcaaacaggtatgaataagcagctatgtatatgtgtttggggcagaggggagcagattactttaacacacttcagaattaaaatcagttcgtttcatgactctgtgccttaacgtttgtgtgaactaaacttgctgattgaatgaaattcttgggaagccgaacagtaatagcagaaaatgtgaccaaatgagtatcatgtacttaaatcactgaattttatataagcacaagtattaattttaaaaacattatagtttaataaagctgcatttaaaaatatttgggagcaaagacaagcatgctaaatcttcattttgctatggctataagcatatatttttggcaacttatttgcaatattcttgccttaaagtttcctgcaaatttcccccttagtaattcccgaatagcaaaacattaatattccatgattagctctactgtgttgtctcactattaaaatggaattcgttttttcagatcttttctaatggttaataaaacaaatgtcagatcataataacactc

SEQ ID NO: 576 - DNA, 1774 bp, Homo sapiens
agtactgaaattaagcagcatccaacacaggcctactcttacgacatgtgactttactgttttccgtttttgttgaaagagtcattaacagttaggagttgatggcagtttcaataacaggtcattgccgagaaaaggatagcactataatatgcagaaatctacaaattctgatacttccgtggaaacactgaattctacccgccaaggcacaggagctgtgcaaatgagaatcaaaaatgccaacagccaccatgacaggctcagccaaagtaaatccatgatcctcaccgatgtcgggaaggtcactgaacctatatccagacacagaaggaatcattcacagcatatcttgaaagatgtcattcctccattggaacaactgatggttgaaaaagaaggttatctgcaaaaagctaaaattgcagatggaggaaagaaactaaggaaaaactggtctacttcctggattgttctttctagtcgaagaattgaattttacaaagaatccaagcaacaggctctgtccaatatgaaaactgggcacaaaccagaaagtgtggatttgtgtggagcacacattgaatgggccaaggaaaaatcgagcagaaagaatgtctttcagatcacaacagtatcaggaaatgagttccttctacagtcagatattgacttcatcatattggattggttccacgctatcaaaaatgcaattgacagattgccaaaggattcaagttgtccatcaagaaacctggaattattcaaaatccaaagatcctctagcactgaattgctaagtcactacgacagtgatataaaagaacagaaaccagagcacagaaaatctttaatgttcagactgcatcacagtgcttccgatacaagcgacaaaaatcgagttaaaagcagattaaagaagtttattacccgaagaccttccctgaaaactctgcaagaaaaaggacttattaaagatcaaatttttggctctcatctgcacaaagtgtgtgaacgtgaaaattccacagttccgtggtttgtaaagcaatgcattgaagctgttgagaaaagaggtctagatgttgatggaatatatcgagttagtggcaatctggcaacaatacagaagttaagatttattgtcaaccaagaagagaagctgaatttggacgacagccagtgggaggacatccacgttgtcaccggagcactgaagatgtttttccgggagctgcctgagccgctcttcccttacagtttctttgagcagtttgtggaagcgatcaaaaagcaagacaacaacacaagaattgaagctgtaaaatctcttgtacaaaaactccctccgccaaatcgtgacaccatgaaagtcctctttggacatctaactaagatagtggccaaagcctccaagaacctcatgtccacgcaaagcttggggattgtatttggacctacccttctgcgagctgaaaatgaaacaggaaacatggcgatccacatggtctaccagaaccagatagctgagctcatgctgagtgagtacagtaagatcttcggctcagaggaagactgacagacaagacaagctactgaatacgttcacatctgtcttgatgcctaatatttttacatttctgtaaacatatttctgaaatattttttgcctttcaagcgacagatgcctcattttgtgaaaacttaatgatgattttgtgtttaagttccaaacatttgaataaaataattgacaataaaaaaaaaaaaaaaa

SEQ ID NO: 577 - DNA, 1884 bp, Homo sapiens
ggctgcgcctgcgtggttcgtcctcacgtggccgtcaagccctctagtgccttagattccagcgagctacgcaagcaatcctggcccagccgagcttgcttccccaaatcccgtaatccttgaccttattcccccaaagaagcggcctcccgggaaggagcgccctggcggagaagactcgaacggctcccacagccgggcgttgggggaaagaatctccggcctgtgaaactgtgaggggattcggccaagacgtcctcttccctctgcctcccacccaggccactcttcacctccaccatgagcctggacatccagagcctggacatccagtgtgaggagctgagcgacgctagatgggccgagctcctccctctgctccagcagtgccaagtggtcaggctggacgactgtggcctcacggaagcacggtgcaaggacatcagctctgcacttcgagtcaaccctgcactggcagagctcaacctgcgcagcaacgagctgggcgatgtcggcgtgcattgcgtgctccagggcctgcagaccccctcctgcaagatccagaagctgagcctccagaactgctgcctgacgggggccggctgcggggtcctgtccagcacactacgcaccctgcccaccctgcaggagctgcacctcagcgacaacctcttgggggatgcgggcctgcagctgctctgcgaaggactcctggacccccagtgccgcctggaaaagctgcagctggagtattgcagcctctcggctgccagctgcgagcccctggcctccgtgctcagggccaagccggacttcaaggagctcacggttagcaacaacgacatcaatgaggctggcgtccgtgtgctgtgccagggcctgaaggactccccctgccagctggaggcgctcaagctggagagctgcggtgtgacatcagacaactgccgggacctgtgcggcattgtggcctccaaggcctcgctgcgggagctggccctgggcagcaacaagctgggtgatgtgggcatggcggagctgtgcccagggctgctccaccccagctccaggctcaggaccctgtggatctgggagtgtggcatcactgccaagggctgcggggatctgtgccgtgtcctcagggccaaggagagcctgaaggagctcagcctggccggcaacgagctgggggatgagggtgcccgactgctgtgtgagaccctgctggaacctggctgccagctggagtcgctgtgggtgaagtcctgcagcttcacagccgcctgctgctcccacttcagctcagtgctggcccagaacaggtttctcctggagctacagataagcaacaacaggctggaggatgcgggcgtgcgggagctgtgccagggcctgggccagcctggctctgtgctgcgggtgctctggttggccgactgcgatgtgagtgacagcagctgcagcagcctcgccgcaaccctgttggccaaccacagcctgcgtgagctggacctcagcaacaactgcctgggggacgccggcatcctgcagctggtggagagcgtccggcagccgggctgcctcctggagcagctggtcctgtacgacatttactggtctgaggagatggaggaccggctgcaggccctggagaaggacaagccatccctgagggtcatctcctgaggctcttcctgctgctgctctccctggacgaccggcctcgaggcaaccctggggcccaccagcccctgccatgctctcaccctgcatatcctaggtttgaagagaaacgctcagatccgcttatttctgccagtatattttggacactttataatcattaaagcactttcttggcaggaaaaaaaaaaaaaaaaaaaa

SEQ ID NO: 578 - DNA, 8704 bp, Homo sapiens
gcgcgaccgaagcggataagggacgcggcggcggttggctgtgtctgttgagagagtacaggacagcccggactgcgagaggcggcggcggaggcagtagttgcaccggcagaggcggccgctggcagcggttgaggcggcggtccaacgcgtgctctctgggcggggtgcggcgggggatgtgcctgctcaggccgggcggagtctctctgacagggcgggggatgcgccgcggccgctcgcccggaccctgaggctgctgggcccaccctcccggaaccgtccgaccctcggtggcctcggcctcttctgccatctccggtcctaccctggggcggagggtggaaggcagcttccgtcgaagaggagggggctgcggtggccaccgcggcggagcccgagttattttaccaagaaaatggtttgcacgactttgaacatatactatccatgctgatgggacaggatccaatatgaatataaatgatggaggaagacgacgctttgaagataatgaacatacattacggatatatcctggggctatttcagaagggacaatctactgtccgattcctgccagaaaaaactccacagctgctgaggtgattgagtctcttataaacaaacttcatcttgacaaaacaaaatgttatgttctagcagaggtaaaggaatttggtggagaagaatggattctcaatccaacagattgtccagttcagcgaatgatgctgtggccccgaatggctctggaaaatcgcttaagtggagaggactaccgcttccttctgagagagaaaaaccttgatggatcaatccattatggtagcctgcagtcatggctacgggtaacagaagaacgtcgcaggatgatggaacggggttttcttccacagcctcaacagaaagactttgatgatttatgtagtttacctgatttgaatgagaaaactctcttagaaaacctacgaaatcgctttaagcatgaaaaaatttatacctatgttggcagtattctaatagttattaacccattcaagtttcttcctatttataaccccaaatatgtcaaaatgtatgataaccaccaactgggaaaacttgagccccacatttatgctgtggctgatgtagcttatcatgccatgcttcagcgcaaaaagaatcagtgcatcgtgatttcaggagagagtggttctgggaagactcaaagcacaaactttcttattcaccaccttactgctctcagtcagaaaggatttgccagtggagtagaacagattattcttggagctggaccagtacttgaggcctttggaaatgcaaagacagctcataataacaattcaagtcgttttgggaagtttattcaagtaaattaccaggaaacaggcactgtacttggtgcctatgttgaaaaatatctactggagaagtccagactcgtttatcaggagcataatgaacggaactatcatgtattctattacctcctggcaggagcaagtgaagatgagagatcagcattccatcttaagcaaccagaggaatatcattatctcaatcagataacaaagaaacccctcagacagagctgggatgattattgctatgactctgagccggattgcttcacggtggaaggagaagatttgagacatgactttgagcgcctacaacttgccatggaaatggtaggatttcttcccaagacacgaagacagattttctctcttctctcagccatactacatttgggtaatatctgttacaaaaagaagacataccgggatgactccattgatatctgtaatcctgaagttctgcctattgtctcagaattattagaggttaaagaagagatgctatttgaagcattagttacaaggaagacggtgacagtgggagaaaagcttattttgccatacaagttggcagaggctgtgacagtgaggaactccatggctaagtctctgtatagtgccctgtttgactggatagtttttcgaattaatcatgcacttctgaatagtaaagatttagagcataataccaagacattgtctattggtgttcttgatatttttgggtttgaagattatgaaaataacagctttgaacagttctgtattaattttgctaatgaacgtttacagcactactttaatcagcatatctttaaattggaacaagaggaatatagaactgaaggtatcagctggcacaacatagattacattgataatacctgctgcataaatcttattagcaaaaaaccaacaggactgcttcatcttttggatgaagaaagcaactttccacaggctacaaatcaaacattgctagacaagtttaagcatcaacatgaagataattcttacatcgaatttccagccgtgatggagcctgctttcattataaaacattatgctggaaaagtaaaatatggggtaaaggatttccgggaaaaaaatacagatcatatgcgcccagacattgtagctcttctgagaagcagcaagaatgcatttatctctgggatgattggaattgatcctgtagctgttttccgatgggcaattctccgagcttttttcagagccatggttgctttcagggaagctgggaaaagaaacattcacagaaaaactggacatgatgatacagcgccatgtgcaattttgaaaagtatggatagttttagctttctccaacacccagtccaccagaggagcttagagattctgcagagatgcaaggaagagaagtacagtataacccggaaaaatcccagaacacctctttctgatctccagggcatgaatgctctaaatgaaaaaaaccaacatgatacatttgatattgcctggaatggcagaactgggattcgccagagcagactatcaagtggcacctccttgcttgataaagatggaatatttgctaattcaactagcagcaaactcctggagagagcccatggaattctcacgagaaacaaaaatttcaaatccaagcctgcccttccaaagcacttgctagaagtaaattctttaaagcacctgacaagactgacactacaagatcgcattaccaagtctcttcttcatttacacaagaagaaaaaacctcccagcatcagtgcccagtttcaggcatcattaagcaagctaatggaaacacttggtcaagcagaaccatattttgtaaaatgcattcgctctaatgctgaaaagctgcccttaaggttcagtgatgtcttggtacttagacagcttcgatacaccgggatgctggaaacagttcgaattcgccaatcaggatacagctccaaatattctttccaggattttgtgagccacttccatgtacttcttccccgaaatattattccatccaaatttaacattcaggatttcttcaggaaaataaatcttaatccagataattatcaagttggaaaaaccatggtctttctaaaggagcaggaacgacagcacttacaagatctgcttcaccaagaggtgctccgcagaatcatattgttgcagcgatggttcagggtcttgctgtgtaggcagcatttcctccatctgagacaagcatctgttattatccagagattctggaggaattacctaaatcagaagcaagtcagagatgcagctgtgcagaaggatgcttttgttatggctagtgcagctgctcttctccaagcttcctggcgtgctcacttagagaggcagcggtacttggagttacgggctgcagccatcgttatccagcagaaatggagagattactataggcgcaggcacatggctgctatttgcatacaagcaagatggaaagcctacagggaaagtaaaaggtaccaagaacaaaggaaaaaaattatccttttgcaatcaacatgtagaggattcagagcaagacaaagatttaaagctttaaaagaacaaaggctaagagaaacaaagccagaagttggattggtgaatattaagggatatggatctctggaaattcagggttcagacccttcaggatgggaggattgttcttttgacaacagaataaaagccatagaggaatgtaaatctgtaatagagagtaatcgaattagccgtgaaagttcagtggactgcttgaaggagtcaccaaacaagcagcaggagagagcccaaagccagagtggtgtggacttgcaggaagatgtgcttgtaagagagagacccagatccttggaggatctccatcagaaaaaagtaggccgggctaagagagaaagtaggagaatgagagaactagagcaagctatatttagcttagaattgctgaaagttcgttctcttggtggtatttctccttcagaggatcgcagatggtctacagaattggtgcctgaaggccttcagtctccacggggtacacctgatagtgagagctctcaaggaagcttggaacttctgagctatgaggaaagccaaaagagcaaactagagtctgtcatttcagatgaaggagacttgcagtttccatcacctaagatatccagcagtccaaaatttgattcacgggacaatgccctcagtgcctcaaatgagactagcagtgcagagcatttgaaggatggaactatgaaggaaatggtggtctgcagttctgagtctattacctgtaaaccacagctgaaagactccttcatttcaaatagtctacctacttttttttatatcccccaacaagacccactgaaaacaaattcccaactagacacaagtatccaaagaaacaaactattggaaaatgaagacacagcgggggaagctcttactttggatatcaacagggaaactagaaggtatcactgctcaggaaaagatcagattgttccttctttgaatacagagtcttctaatcctgtgcttaagaagttagaaaagctaaacactgagaaggaagaaaggcaaaaacagttgcagcaacagaatgaaaaagagatgatggaacagattcgccagcaaacagatattttagagaaggagcgcaaagccttcaagacaattgaaaagccaagaattggagagtgtttggtggcaccatcttcctatcagtcaaagcaaagagtagagaggccatcctctctcctcagcttaaatacctcaaataagggagaacttaatgtactggggtccctatcattaaaagatgcagctcttgcccaaaaagacagttcctctgctcacttacccccaaaggaccgacctgtcaccgtgttctttgaaagaaaaggaagtccatgccaatctagtactgtcaaggaattatccaagacagacagaatgggcacccagctgaatgtagcctgtaaactctcaaataatcgcatttcaaaaagagaacactttaggccaactcagtcttacagccacaattctgatgacctttccagagagggaaatgctaggcccattttcttcactccaaaggacaatatgagtattccccttgtcagcaaagaagccttaaacagtaaaaatcctcaactccataaagaagatgaaccagcatggaaacctgtgaagttagctgggccaggccaaagagagacatcacagcgattttcgtcagttgatgaacaagcaaaacttcataagactatgtctcaaggagagattaccaagttggcagtgagacagaaggcttcagattcagatataagacctcagagagctaagatgagattctgggccaaagggaaacaaggggagaagaagactaccagagtgaaacctactacccagtcagaggtttcgccactctttgcaggcacagatgtgattccagctcatcagtttccagatgaattagctgcatatcacccaacacctcctttgagcccagaactgcccggcagttgccggaaggaattcaaagagaacaaagaaccttctccaaaggctaagcgcaagcgaagtgtgaagattagcaacgtggctttggattctatgcattggcaaaatgactctgtccagatcatagcaagtgtcagtgatttaaaaagcatggatgaatttcttctgaaaaaggtgaatgacctagataatgaagacagcaagaaggatacactagtggatgttgtatttaaaaaagccctgaaggaatttcggcagaatatcttcagcttttattcatctgcattggcgatggatgatgggaaaagcatacggtataaagacctctatgcactatttgaacagattctggaaaagacgatgaggcttgagcagcgtgattcactgggtgaatctccagtgagagtttgggtcaacacttttaaagtgtttttagatgaatatatgaatgaattcaagacttcagattgcacagccacaaaggtgccaaaaacagaaagaaagaaaagaaggaaaaaggaaactgatttggtggaagaacacaatggtcacatctttaaagccacccaatatagcatccctacatactgtgaatactgttcttctttgatatggataatggaccgagcctctgtttgcaaattatgcaagtatgcttgccataagaagtgctgtctgaaaaccacagccaagtgctctaaaaagtatgatccagagctgtcatctcgacaatttggggttgaactgtcccgtttgaccagtgaagaccgaactgttcctttagtagtggaaaagctcataaactacattgaaatgcatggactgtatacagaaggtatttatcgaaagtctggttcgactaataaaatcaaggagcttcggcagggtctagatacagatgctgagagtgtaaatctagatgactataacatacacgtcattgcaagtgtattcaaacaatggcttcgagatttgcccaatcctctcatgacctttgaactctatgaggaatttcttcgagctatgggccttcaggagaggaaggagacaatccgtggtgtatactctgtgattgatcaactctcccgaactcatctcaatacactggaacgcctcatctttcatctagtcaggattgctctgcaggaagacactaatcgaatgtctgctaatgctttggccattgtgtttgcgccctgcattctccgctgccctgacaccactgacccactacaaagtgtacaggacatcagtaagactaccacttgtgtggaactgattgttgtggaacaaatgaataaatacaaggctcgtctcaaagatatcagtagcttggaatttgctgagaataaggcaaagaccaggttgtcactgattcgtagatcaatgggaaaggggcgtattcgtcgaggaaactatccaggtccatcgtctcctgttgtagttcggttgccttctgtgtctgatgtctcagaggagaccttgactagtgaggcagccatggagactgacatcacagaacagcagcaagcagctatgcagcaggaggagagagtactgactgagcagattgagaacctacagaaggagaaggaggagctaacatttgagatgcttgtactggaaccccgtgcctctgatgatgaaacccttgagtctgaggcctccattgggactgctgatagctcagagaatttgaatatggagtctgaatatgctatctctgagaaatcagaaagaagcttagcccttagctccctgaagacagctggcaagtctgaaccttccagcaagttgcgaaagcaacttaaaaagcagcaagactctttagatgtcgtggactcttcggtctcctctttatgtctgtctaacacggcatcatctcatgggaccagaaaactatttcagatttattccaaatctccattctaccgagctgcctcaggtaatgaggccctgggaatggaaggaccattgggccagaccaaattcctggaagacaagcctcagttcatcagcagaggaaccttcaacccggaaaagggcaaacaaaaattaaagaatgtgaaaaactcacctcagaaaaccaaagagaccccagaggggacagtcatgtctggccgcagaaaaactgtggacccagactgcacctccaaccaacagctagcactctttggaaataatgaatttatggtctgaaccggcagatgtgtgtccctccgtggctacagagtggtaaacaaatctcacctttggggctgcgtttcatcacctcgtccacaatagtcaatcctaattgtggtcctgcctcttttctaagcatatggctaagactgtatgtgctgaattcctgggcctcctgcagaagcagaaagcctgctggggatggtgccagctgtgccttggctgttgtatttgaattgagatttttactatacaaagccacctagggcctggggatttgggtcagttgtagttgcctctcccccaccctcttttcccttcccaaaggtgggtgttgaactaggggggatattgctgtcctgagggaccctctcatttctgacatttgaagaaaacgtataaatctttcttaaccgtgaaagcaaaagcctttgggtttattttgggatagttaggagctagggtagaatataatttttttccaaaaacttacttacaaacaaaaagcctaatccctctattttaagatttctgaaaaaacactccatgttatattctggggaaagcaaaaacaaaaaaaaaaaaaaaaaaaaaaaaaa

SEQ ID NO: 579 - DNA, 4742 bp, Homo sapiens
ttttctgcccttctttgctttggtggcttccttgtggttcctcagtggtgcctgcaacccctggttcacctccttccaggttctggctccttccagccatggctctcagagtccttctgttaacagccttgaccttatgtcatgggttcaacttggacactgaaaacgcaatgaccttccaagagaacgcaaggggcttcgggcagagcgtggtccagcttcagggatccagggtggtggttggagccccccaggagatagtggctgccaaccaaaggggcagcctctaccagtgcgactacagcacaggctcatgcgagcccatccgcctgcaggtccccgtggaggccgtgaacatgtccctgggcctgtccctggcagccaccaccagcccccctcagctgctggcctgtggtcccaccgtgcaccagacttgcagtgagaacacgtatgtgaaagggctctgcttcctgtttggatccaacctacggcagcagccccagaagttcccagaggccctccgagggtgtcctcaagaggatagtgacattgccttcttgattgatggctctggtagcatcatcccacatgactttcggcggatgaaggagtttgtctcaactgtgatggagcaattaaaaaagtccaaaaccttgttctctttgatgcagtactctgaagaattccggattcactttaccttcaaagagttccagaacaaccctaacccaagatcactggtgaagccaataacgcagctgcttgggcggacacacacggccacgggcatccgcaaagtggtacgagagctgtttaacatcaccaacggagcccgaaagaatgcctttaagatcctagttgtcatcacggatggagaaaagtttggcgatcccttgggatatgaggatgtcatccctgaggcagacagagagggagtcattcgctacgtcattggggtgggagatgccttccgcagtgagaaatcccgccaagagcttaataccatcgcatccaagccgcctcgtgatcacgtgttccaggtgaataactttgaggctctgaagaccattcagaaccagcttcgggagaagatctttgcgatcgagggtactcagacaggaagtagcagctcctttgagcatgagatgtctcaggaaggcttcagcgctgccatcacctctaatggccccttgctgagcactgtggggagctatgactgggctggtggagtctttctatatacatcaaaggagaaaagcaccttcatcaacatgaccagagtggattcagacatgaatgatgcttacttgggttatgctgccgccatcatcttacggaaccgggtgcaaagcctggttctgggggcacctcgatatcagcacatcggcctggtagcgatgttcaggcagaacactggcatgtgggagtccaacgctaatgtcaagggcacccagatcggcgcctacttcggggcctccctctgctccgtggacgtggacagcaacggcagcaccgacctggtcctcatcggggccccccattactacgagcagacccgagggggccaggtgtccgtgtgccccttgcccagggggagggctcggtggcagtgtgatgctgttctctacggggagcagggccaaccctggggccgctttggggcagccctaacagtgctgggggacgtaaatggggacaagctgacggacgtggccattggggccccaggagaggaggacaaccggggtgctgtttacctgtttcacggaacctcaggatctggcatcagcccctcccatagccagcggatagcaggctccaagctctctcccaggctccagtattttggtcagtcactgagtgggggccaggacctcacaatggatggactggtagacctgactgtaggagcccaggggcacgtgctgctgctcaggtcccagccagtactgagagtcaaggcaatcatggagttcaatcccagggaagtggcaaggaatgtatttgagtgtaatgatcaggtggtgaaaggcaaggaagccggagaggtcagagtctgcctccatgtccagaagagcacacgggatcggctaagagaaggacagatccagagtgttgtgacttatgacctggctctggactccggccgcccacattcccgcgccgtcttcaatgagacaaagaacagcacacgcagacagacacaggtcttggggctgacccagacttgtgagaccctgaaactacagttgccgaattgcatcgaggacccagtgagccccattgtgctgcgcctgaacttctctctggtgggaacgccattgtctgctttcgggaacctccggccagtgctggcggaggatgctcagagactcttcacagccttgtttccctttgagaagaattgtggcaatgacaacatctgccaggatgacctcagcatcaccttcagtttcatgagcctggactgcctcgtggtgggtgggccccgggagttcaacgtgacagtgactgtgagaaatgatggtgaggactcctacaggacacaggtcaccttcttcttcccgcttgacctgtcctaccggaaggtgtccacgctccagaaccagcgctcacagcgatcctggcgcctggcctgtgagtctgcctcctccaccgaagtgtctggggccttgaagagcaccagctgcagcataaaccaccccatcttcccggaaaactcagaggtcacctttaatatcacgtttgatgtagactctaaggcttcccttggaaacaaactgctcctcaaggccaatgtgaccagtgagaacaacatgcccagaaccaacaaaaccgaattccaactggagctgccggtgaaatatgctgtctacatggtggtcaccagccatggggtctccactaaatatctcaacttcacggcctcagagaataccagtcgggtcatgcagcatcaatatcaggtcagcaacctggggcagaggagcctccccatcagcctggtgttcttggtgcccgtccggctgaaccagactgtcatatgggaccgcccccaggtcaccttctccgagaacctctcgagtacgtgccacaccaaggagcgcttgccctctcactccgactttctggctgagcttcggaaggcccccgtggtgaactgctccatcgctgtctgccagagaatccagtgtgacatcccgttctttggcatccaggaagaattcaatgctaccctcaaaggcaacctctcgtttgactggtacatcaagacctcgcataaccacctcctgatcgtgagcacagctgagatcttgtttaacgattccgtgttcaccctgctgccgggacagggggcgtttgtgaggtcccagacggagaccaaagtggagccgttcgaggtccccaaccccctgccgctcatcgtgggcagctctgtcgggggactgctgctcctggccctcatcaccgccgcgctgtacaagctcggcttcttcaagcggcaatacaaggacatgatgagtgaagggggtcccccgggggccgaaccccagtagcggctccttcccgacagagctgcctctcggtggccagcaggactctgcccagaccacacgtagcccccaggctgctggacacgtcggacagcgaagtatccccgacaggacgggcttgggcttccatttgtgtgtgtgcaagtgtgtatgtgcgtgtgtgcaagtgtctgtgtgcaagtgtgtgcacatgtgtgcgtgtgcgtgcatgtgcacttgcacgcccatgtgtgagtgtgtgcaagtatgtgagtgtgtccaagtgtgtgtgcgtgtgtccatgtgtgtgcaagtgtgtgcatgtgtgcgagtgtgtgcatgtgtgtgctcaggggcgtgtggctcacgtgtgtgactcagatgtctctggcgtgtgggtaggtgacggcagcgtagcctctccggcagaagggaactgcctgggctcccttgtgcgtgggtgaagccgctgctgggttttcctccgggagaggggacggtcaatcctgtgggtgaagacagagggaaacacagcagcttctctccactgaaagaagtgggacttcccgtcgcctgcgagcctgcggcctgctggagcctgcgcagcttggatggagactccatgagaagccgtgggtggaaccaggaacctcctccacaccagcgctgatgcccaataaagatgcccactgaggaatgatgaagcttcctttctggattcatttattatttcaatgtgactttaattttttggatggataagcttgtctatggtacaaaaatcacaaggcattcaagtgtacagtgaaaagtctccctttccagatattcaagtcacctccttaaaggtagtcaagattgtgttttgaggtttccttcagacagattccaggcgatgtgcaagtgtatgcacgtgtgcacacacaccacacatacacacacacaagcttttttacacaaatggtagcatactttatattggtctgtatcttgctttttttcaccaatatttctcagacatcggttcatattaagacataaattactttttcattcttttataccgctgcatagtattccattgtgtgagtgtaccataatgtatttaaccagtcttcttttgatatactattttcattctcttgttattgcatcaatgctgagttaataaatcaaatatatgtcatttttgcatatatgtaaggataa

SEQ ID NO: 580 - DNA, 1201 bp, Homo sapiens
ccagatttggctttatatagcggacccgtaaggccgaccggcctctaccggcgggatttgatggcgtgatgtctcacagaaagttctccgctcccagacatgggtccctcggcttcctgcctcggaagcgcagcagcaggcatcgtgggaaggtgaagagcttccctaaggatgacccgtccaagccggtccacctcacagccttcctgggatacaaggctggcatgactcacatcgtgcgggaagtcgacaggccgggatccaaggtgaacaagaaggaggtggtggaggctgtgaccattgtagagacaccacccatggtggttgtgggcattgtgggctacgtggaaacccctcgaggcctccggaccttcaagactgtctttgctgagcacatcagtgatgaatgcaagaggcgtttctataagaattggcataaatctaagaagaaggcccacctgatggagatccaggtgaacggaggcactgtggccgagaagctggactgggcccgcgagaggcttgagcagcaggtacctgtgaaccaagtgtttgggcaggatgagatgatcgacgtcatcggggtgaccaagggcaaaggctacaaaggggtcaccagtcgttggcacaccaagaagctgccccgcaagacccaccgaggcctgcgcaaggtggcctgtattggggcatggcatcctgctcgtgtagccttctctgtggcacgcgctgggcagaaaggctaccatcaccgcactgagatcaacaagaagatttataagattggccagggctaccttatcaaggacggcaagctgatcaagaacaatgcctccactgactatgacctatctgacaagagcatcaaccctctgggtggctttgtccactatggtgaagtgaccaatgactttgtcatgctgaaaggctgtgtggtgggaaccaagaagcgggtgctcaccctccgcaagtccttgctggtgcagacgaagcggcgggctctggagaagattgaccttaagttcattgacaccacctccaagtttggccatggccgcttccagaccatggaggagaagaaagcattcatgggaccactgaagaaagaccgaattgcaaaggaagaaggagcttaatgccaggaacagattttgcagttggtggggtctcaataaaagttattttccactgacaaaaaaaaaaa

SEQ ID NO: 581 - DNA, 2105 bp, Homo sapiens
attctgcttctttgcctctggttacgcaggctgttttcaaaagaaaacaagagaagttgtaagactgactttcccaagaactatacactcatttataccaggaaacagacaagagaacaagaggctgccgaagacaaaacttctctgcaagcacctgtgcacagcaatgtgcgtgggcatctgtgagaagaagagaatctgtgaagtttgagcaagcggccttcccaagatgtaccgaatatctcaactgatgtcaacaccagtagcaagttcttccaggttggaaagagaatatgctggagagctgtctcccacgtgcattttcccaagtttcacctgtgattccctggatggttaccattcttttgaatgcggctccatagatcccctgacaggctcccactatacctgtcgccgaagtcccagactcctcaccaatggctactatatttggactgaagacagcttcctgtgcgacaaagatggcaacataactctgaacccatcccagaccagcgttatgtataaggagaacttagttagtacctccaaatcttggctgcatggaagtatctttggtgacatcaactcttctccaagtgaagacaactggttgaaggggaccaggaggttggacacagaccattgcaatggaaatgcagatgatttagactgttcttctctgactgatgactgggagtcagggaagatgaatgcagagtctgtgatcacctcctcttccagccacatcatatctcagcctcctggaggaaactcccatagcttgtctcttcagtcccagttgacagcttctgaacgtttccaagagaatagttcggatcattcagaaaccaggttgttgcaagaggtcttctttcaggcaatcctgcttgctgtgtgcttaatcatttctgcatgtgcaagatggtttatgggagaaatattagccagtgtcttcacatgctcattgatgataactgtagcttatgtgaaatcattgtttctcagccttgccagctatttcaaaaccactgcctgtgctcggtttgtcaaaatttgacaaccatttaggaatgccttcgatgaatgtcctccatctgaatatctggaaattgtccaacttgcagtctacttggaatcaagtgttttattggaagggagtaagcgagtaatggagaaaaagccattttagtttgactatgtgattttaaaatgatctcagtttttccatcaaaattataatatgctcatgaaaataatattaatttgccttccctttgcaaacaccggcagttgaaaggaaaaggacggggaatgtgatggaaaagagaccgcctggaataaatgtccccctatgattctttaaggcagtggttctcgagcttgaattttcattaggaaattctgtgaggagcttgtaaccagatttctgggtctgccacatgcacctatctcttgctgaattgctttaatagaataatgagagcaagtttgtctaactaataccaacctgacaacttgaataacaataaatgcaatttgtacataaaatataatgctgcaaaagtttgtcattcacctcagtggagtgacttgatattaggtggtaaccgtagatgatggttaatatgaaaatggacaggaaagaagcattttctgaaagttatattcttttgaaccacgttctaaaccaagtttttaatcttcttggggctcgtaattacctttcactttaatgtcacttaaagatataacacagaaaaatgccttgagggcaaaatataggcaaaacaccaatgcgctttcaaatgcatgaaaatggtgcagttgtacccttgagccttgactcaagggctgtagatgttccctttccaccccccacacttggtgcgtgttcacaaagcaaatatggcctgtaattcaaatttgttctatgtgatactctctgagtaaaaactcatacatgcagaaaattgtctttgctcgaaatgataatgccaaaatataactttatatataatttgcatttagtacatttttggttaaaaaataaactaataaataagtgaagtcatcagcaaaaaaaaaaaaaaaaaaaaaaaaaa

SEQ ID NO: 582 - DNA, 4295 bp, Homo sapiens
gaggaggttcctgtagggcggcacaaccagggagggcgtggaagctctgcatcccttctcccataccttgctctacacatctcttcatctgtatcctctgcagcatccttgatgataaaccagtaaatatgagttttgatcatcctgagaaaaatgggccttggcctgcagacccaataaaccttccctcccatggataatagtgctaattcctgaggacctgaagggcctgccgcccctgggggattagccagaagcaggcttgttttcctgctcagaacaaagtgacttccctgaacacatcttcattatgattcacaccaacctgaagaaaaagttcagctgctgcgtcctggtctttcttctgtttgcagtcatctgtgtgtggaaggaaaagaagaaagggagttactatgattcctttaaattgcaaaccaaggaattccaggtgttaaagagtctggggaaattggccatggggtctgattcccagtctgtatcctcaagcagcacccaggacccccacaggggccgccagaccctcggcagtctcagaggcctagccaaggccaaaccagaggcctccttccaggtgtggaacaaggacagctcttccaaaaaccttatccctaggctgcaaaagatctggaagaattacctaagcatgaacaagtacaaagtgtcctacaaggggccaggaccaggcatcaagttcagtgcagaggccctgcgctgccacctccgggaccatgtgaatgtatccatggtagaggtcacagattttcccttcaatacctctgaatgggagggttatctgcccaaggagagcattaggaccaaggctgggccttggggcaggtgtgctgttgtgtcgtcagcgggatctctgaagtcctcccaactaggcagagaaatcgatgatcatgacgcagtcctgaggtttaatggggcacccacagccaacttccaacaagatgtgggcacaaaaactaccattcgcctgatgaactctcagttggttaccacagagaagcgcttcctcaaagacagtttgtacaatgaaggaatcctaattgtatgggacccatctgtataccactcagatatcccaaagtggtaccagaatccggattataatttctttaacaactacaagacttatcgtaagctgcaccccaatcagcccttttacatcctcaagccccagatgccttgggagctatgggacattcttcaagaaatctccccagaagagattcagccaaaccccccatcctctgggatgcttggtatcatcatcatgatgacgctgtgtgaccaggtggatatttatgagttcctcccatccaagcgcaagactgacgtgtgctactactaccagaagttcttcgatagtgcctgcacgatgggtgcctaccacccgctgctctatgagaagaatttggtgaagcatctcaaccagggcacagatgaggacatctacctgcttggaaaagccacactgcctggcttccggaccattcactgctaagcacaggctcctcactcttctccatcaggcattaaatgaatggtctcttggccaccccagcctgggaagaacattttcctgaacaattccagcctgctccttttactctaggggcctctgtcagcaagaccatggggacttcaagagcctgtggtcaggaaatcaggtccagccttccctgtagccagacagtttatgagcccagagcctcctgccacacacatgcacacatatctagcattctttccagacagcatcctccccgccttccaccttggtagatgcaaggtctatctctcccatcagggctgccaaagctgggctttgtttttcccagcagaatgatgccattctcacaaaccaatgctctatattgcttgaagtctgcatctaaatattgatttcacgttttaaagaaattctcttaaattacaattgtgcccaatgcagggtggctctggggggcaagtaggtggtacaggggattggaaacatgctccgcgcctccagagaaaagttgctcccgaggtccatgcccctggaacgtgttcctatcactctggctggttgggctggtccttagactgggtgcttatgattaaagggtcttggttagcccactttccctctccatgtggagatggaaggtagagaaggatacagtgtctatcctcaagttgctacggttcagtgagagaggcagacatctgaacaggcaggtaggattcagtgtgctcagtgcactggggatttggagagagatgggcttgctctctctgtgcacccaggagggccacgcacttaaaactgtgtttgtggatcagagaaggctttatagcacagggggcattcagatgagtcttagaggaagagaagaaacatggcaagcagattacatctgagccgtttgaattgtgtttttctttcttcccatgtttattttctaagatctacctgaacttagagactcaagatatttttttaggaaacctcctacccatgtctgaggtagcaagtgcagcctcacgacagataccaggcaatccagagccacaaaacgtgattcctccaggctctgcctggcctgaccctgtcctgtcagctgggtttacataccagtcccattcttccttttcaatacctacccccaaatcttctcctaaccaccatctgttttttttttttaaagcattttttgctttaaaagcatcctgaccccaatttctttgagctcacgggccttttgctgaaggtctctcagggtgtagtggtgtggctctctggacttaacgtcactctcagaggtcagaaccttggagatcagaactgattctcaccaggtgtgagaggtgtggtagcagattgcaatgctctgcacctcttccttgcaagtgagcaacttcaggctctctgggcagaggctggcccactgtagtttgcagacatgctctccagatggttttactaagtcccctctccctgatagggaatcctgctggaccagcgcagccctggtgtggagaggttaaaagacttgcacaggatcaccaagtcatgctgtagagccaggattcctagacccagggctctgcactctcaaggctggccccatgtgctcaaggggatctaatgtttgggctccaaactaaccatctcggagctgggctcctcatttactgccaaaccctcagcttatgtagctagaaagggccctggagtgagaaagcctggattttcaaattgatgctcccctactgactagctgtgccactctgggcaaatgctcttccttgagcctgtttccacacctgtaaagtggggatgatgatcctatctcactgcttttgtgaggattacaggaaagcacctgtcctggctctgtacctggcacgtagtaggtgctcagttcatgctggtttccttcctgcctttagtagggacctgctctgtgctcacacctcggctgcatgcaccctgctgtgacggaggctagtgtggaagaggtcctgtcctcagggaattaactgtcttattgggagacaacaactgtcctccttggaacacccaagaaaccatgcaaagcagtggacaacacagaacacgccctcctcctcgctgcctgcagctccaatctgattctgcttgggaatgggcggagcacgtgggctgcttaactgctgtataggacaagccccttacccctctctgggcccatgaattcctggcttggtttatgttctgatttgacacactgattttaatcttcgaatcatgacactgagtgcagaggaggtggcattccgacagcaggacatacatgttggtgtgaagactgggacgacactgggtagaatctagtttttaattattattaatataaaggatcaaattaatttaaatatgattctgaagtctacagaacttttagttctgtgctgtctatgtggacactttggtaaaatgcaaattatgatatggacgttatcattggtctggtgagatgtttcatatttgtgacagttaatttaaaaattatgagttaatgctgcctgtgtctatggggttctgtcttctttgatagccatctattcatctggatcatgggaccctctctaatccttccaccaatcaaataagctattgctattggtttggagttgagatatcagtctcggaaacttctgaaaaatgctaataattacccaaggattatgtcaaattttaaaataaatgtgtgtgtgtttctttaaaaaaaaaaaaaaaa

SEQ ID NO: 583 - DNA, 8741 bp, Homo sapiens
tggccacaggagagcacacccctgatgaccctctgctcagaggcaaaaggaggcaagacctccaagagatgctgagagaagtgggcctggatgttgagtactggttacccaagctgcaggaacacctgggtgtgacctgtgcccaggccttacaacacctagacaaaaacaacctcaagaagctgaaatcccagacacaacatccatgggagaaagctgcttaatctgtcacactcaaaaagtctttcagcgttacaggagtctcaggtggagagggcaaagagaaagcagaagcaggcagaacaggcactgcaggagctgagggacttgctgacagaagggaagcagagacaggaagaggcagtgaggacaagagaagcagagctgaggcaagcaatggacatccctgaagagtactggccatcccctgaagagcctctaagggaactcatggaaaacctgcagagacaactcaacctcatgaagtggacactgtgccacaggcaaaaccttccagatagagatgtggtgagatgggcatctggagggctggccctccagggaatttacaaagccagccaccaaaggggcctgacagagaagagagaggagttgctcagtgtccccaaagagttcttacttttgggtcctcagcaaggaacacaaatgaaaacaaaggaattcacatctcctcaggctgaattcatgtttacccagatggtagagaagctgggctttcgtttaactacttcagccaaggacggaaattgggggtttagtctagaagctggtttggatcacagcaaacatccagaatccaaggaaacccaacaatcaagttctgagaattcttatttctgctcaaccaagttcagctatatccccctggcctcctgccactttcccattgatcagctccagttatccaagcctgctgtccaggaattgaaatgcattgaagagcttctgagtcagacaacaaacccagacaggttctccttgctgaggcacaggatcataaacttcttccacaggtttggctctcatgttaaccaaggccctctgcacctgggaggaatctactggtggaaagccatttcagagggttattgcacggagcagttggcagaagtgaggcagcagtctgcagaggccctggacattttcataagggacagctacagtggctttggagtgaaagttgctgcaggtgtgaatgtttcagactctcattcgaagacagccactcagaccaaaacttcccaaaacctccaaaccaaggtccaattatctgtggcccaaacaggtggcccaccagaagcagatggccttgtccagtggaaagctggcctcattgccagcaatcaaacctggtgtgtcattgaccgcgggcttcagttggtgccagtttgggacattatcctctctagccacagaagcaattttaaggatcctcttcaggtggctaacttcctgaaagacagctacactgctctgactagcatcactgcccagatccagaatggggaagagttactgagtgctgggaaggaggccagggtttttctagaggatgtaaaatcttgggaggtatctgatcctgaagagcaacttaaaaaactgataaatttcatgaaaatgttgagtcaaaaactaaaaagttatgacacttggattaatatatgtctcacagattagagtctgcagaattttctagtaaacaccatcaacttttgcaaaaagtcttccatttataaaactaaatgtattaaatctcatttgcgcagccttctggatcctcacatctacagagtgacaaactttcctcaggctcacttcatcatgcagtggatcttccagtcagattcagagcaggagcaggtgaatatttcccaattttctcaattaattgagatcttaaaagaaacccagaataacctcatggaagtaaaggtcaaatctgagtccccagaaacagtggaggaagctcaaagaaagtccacttatgaggtcagcttggctctcagctgcttcttgaattatctccaaaaaacagagcagacagacacacaactcttgctactttccattgcagctgctgcaggatatcatgtgatcaacaatacttttcagagtctcttggggtgtgatgagttaagcttcctactggatgaaatgcaaaccgcccaaaataaataccaggagcttaagaatatttgcagctatagggctcaggcattcctggttctcacaggtctgacagccacagttggagacacagctatttcttcagaagagaaaacacaacgcatgtcattaatgagacatcacatgggacaatcattgtccaaagaagttgcacatgtcctcaccaaacctggagcagatcacgattgggaaaacctagagaaagacttgagattgctcattaatggggattatgaagaagtcaccatctcttctttgcaaatggaagaggtgagcaagcaaagtctcttctatggaaagaaacagccccatgaaccacatgacaatgaaaataacaaatgggagatgataaaaaatggagccttcctagacttactccagcatctaggtctagaacattactaccccaaaaaattgagcaaagctaatttccatctcatctataagacgtctgtgtataacacccagcccagctctgaacaggagcttcccttctatttcctgcagaaactactgatgatggattatgagctgagatacctagtcttcaaagatgatagaaacacagaacaccaagtacatccaaatgcttcagatcaggaagatgaggcttttgacccatatgaaaacttttttgaagacagtgatagtcccactaaatcttcatccactgagcctagcccccacattcacccagtggatattcagatgacaatttttcactgtgcagataattttgccagacaatatattttggccaaactttccacttgtcagtttgccctcccccttttggtgcctaatccctgtacttctcagattgaattctctctctggtctctccgtcaaattacaagaagttggcaggaagcaaggaaatcaccaaaagggaagaactattataagaatcagcagatgtgctgtgtctctacctcaattgtgtccttcgtaagagttggaaatggcctctctgcttctaaatctcagattatgaactgtcttctcagtaaacggaaacatgatgtgttttttcaccgacactgcacaggaagcaggaaagactgcctcttgatggggggcatggtagagatctgttggttctgtccaggaggggaagatgaggacagatttgacaactgtgtgaccttcaccaatcttcatggagatgcaaaagaacatgagcagcagctcagcttcctgaaggaggtgtctactgtcattgtggtcctcatgtcagcctccgatgacaatgaaggaaaccgaaaaattgtccgtaacttgtggcagtcatcaaggccattgatctgcttgctcgatgacaaagaagcaaccatgaccaatatttctggccaaagaatgagaatgggtatcaagaatagaaatgaggcagaattaacagaggaactcacaactacaatcagacatttgctagaactctcagatactgctctcagcttggaggactgttcccagattgctcaccagcaaggatttcttatcgatgaagaccagagagactgcaaggaagccaaagaaaaggcacaggctctaatggccttcctggggaaaatgaaattatctcagattaaggaaaaattactaccccttcagggacaactgtggcaccactggtgtaagaaggacaaagaactctatcatcttagagaaaagggaaatcagagcattgaacaacacaagagtgagattgagacagataaacaaataatacggcatgaacagttggccagagcccttcctctcaatgatttaatgcaatctgtccttcagtttctccaagagcattcagaaattcacaccaaactgtacttcttgcagtggctgagtgtatttttggacaaactgactgcaggacacttggaagaactgcatgagaagcaaaaatattggtggtcactggttcaaacagtaaagcaaaaggcacctaatagtcactccctgatatgcctgcaaagtgagatagaagccatttccacagagattagtgactgtactttgggaattgagcaacttatcagagaagttggtcagatttatgaagctctggaagaagcttcctccataaaaaagatttttttctcgcttccccaaattgccgcagacctgatgatatctggtgttcccattgagctgatggatggggatgcagcatatgtacctctaacatgggtggcagctgtttttgacaaggtctctgagaaacttggagacaaacggctatttgttctttctatccttggcttgcagagctcagggaaatccaccgtgctgaatgccctttttgggcttcagttcactgttagtgcaggcaaatgtacccaaggggcctatatgcagctcctcaaggtggaggagacattcacggaggaacttggctttgactttgtgcttgctgtggacacagaaggacttcgggcaccagaacacagcaacaaatccaaggatagggacaatgagttggtaacttttgtcattggacttgcaaacttgactctgatcaatatttttggggagaatccatcagagatgcaagatatcctacaaatagttgtccaagcctttctgagaatgaaacaagtaaaaatctttccaagttgcctctttgtccatcagaatgtgggggaagctacagctacggaccaaactatggatggacgaagacggctagagcagaaactagatgaaatggcagcaatagctgctgaacaagaacagtgcttagacgtaacctgcttcagtgatgtcattaggtttgatgtcaatactcacgtctactactttgctcacctctgggatggcaaccccccaatggcccctcccaatcctcgctacagccacaatgtacagcaactgaaaagtagaattcttatgactgccacacaggaatccaggggaaacatcatgaagatatcagatgtaaaatcccgagttcaagatttgtggagaggcctgatgaacgagaactttattttcagtttcaggaacacccaagaagtcatggccatgaacaaactggaaaccatgtataaccactggacctgggagctgaggagtcacgtgctgggcttgcagaaccagctgatcaaccagattcagaatggaaaaatccagacacttgaagcaagcacatttgaggttctagttacagaaaaatatgaagttgtcaagcaagaacttgaaaaatattttaatgaaggcccatgtagcaaaatactgattcaatgtaaagcaaactttgaaaataagctaatagtccttaaagaaaaacttatttcagatagcaaaagacaagccaatgaactcattagttttaaaaaccaaagtcaagaaaggctgaataagaaaaagacagattatgaaaaagaattattggaaaaaagccggaagttggctttaactgtaaagggcaaagaattgagtgaggaagagttacatgagaaattcaatcaactttggaaaaagtgggtgtgtgatgtatccacaactctcccgcaagttacagagcctgacattgatttggattctgaaaacatcctttgggagtatttcaaaaacaagacgaatgtcgtgggtctactgacaaattctgcagagaagtttcaaatcaattatgataaacatatcaaggtgaataagaaatataaccatatcccaatgacattaacagtctttgagaaagagttcattaatatgactactgactacattgtttcaagatttaataaaattattaacaacatgtggaaacaacagtgtggttacaatccaaattatttccatgagattctaaagacaatagaagaagaagtgaaatctgcctctactcagaagagatacacatttacaaatacatttatcattgacttatgtgtgtgtttatttcaaagagcaagagagaattttaaggaaatgcacagggcattcaagagagcaaatgatcctgtaaactacctagaaagtaagaaagatgatttcttcacgagttttaagatctcctgtcaaggagcaacctccatcaaaacatttgttgatgttctgtggtataagctcactcctgcagtctccactactatatgggaggacatgacctttaaaattgcgggggacatgcgagctacctgccctgcgttcaatggaaacaggactaacctggagaaacacattctcttctctctggcagaagaagaaaactttgataattactgggaataccttcataattcaaaatcgttttttaggagttacatcaaaaatcatattaaaagatattgttcagacaatggaggtgaaaaaatgaagactttttttgaaaaaagcttaattgatatcaagaataccatcctctctgccatccatgaatccacatcagtagctaaagataaaagcagcactgcttctgagtggttggatttattctgtgattgcctggggtgcaacttgatctttccacgaagggacttgataagcattgaacaccaggagataaaacatactgaatttcttaaagaagccatgagtgcagctttggatctcacaatgaagaaaatagaacagaattattcaagtaagcctatagaagcaatggtttctaaaattgagaaaatgctctctgaacatctctgtggctgctggaaacagtgtcccagctgtggagcaatttgtacaaacacaattcctacacatgaaggagaccatagtgttcccttccaccgtcctcaggctgtcaatggggaggaatggtatgaaacagatgattttgtcattgattgctgtactagtttggttgcaagtgattgtttgttggttttgagggatggcaggaatttcccatttaagaactatcgacaagcaggaggggattatgccatgtggagcatcaccccagatacctccatccagctatactggaaatggtttgtctctcacttcagatcaaatctagaagaaaaatatcagaaaaaatttgcaggtaaaggtaaaatccccaatgcatgggccaaaatcacaaagcaagatgtgcttgaagacttgaaaaaacagtaatactcagtgaccacaaaagagccccagtgtctgaagaaaagaggcagtgtacctgaacaatccaaaaacaactactcattacaattagaaccttcatcatttccatgtttaaaatgaaatgtgtaaaaatcaatcaattaacacattaagagatgaaaatttccagtaaaaggacttcatttctctctgcctcaattcctctagtttaaaaacaacttactaaaatctgttaatatatgatgaaatcaaataacattcattttagaaacctattttgtattttaaactattattctagatattgcttttttattttaaaatatttaagtatcagagaaagtcattttaacagagaaaaatcaaaatcatttcaggctgcaacaaatttctatagaataactgtatcagtatttcaaccaatatacatgtcttgactgaaagctataaactggctcactgcaacgtccacctcccgggttcaagtgattctcctgcctcagcctcctgagtagctggaactacaggcacacaccatcactcctatttttttttgtattcttagtagagacagggtttcactgtgttggccaggctggtcctgacctcaagtgatccacccatctcggcctcccaaagtgctgggattacaggcatgagccactgagcccagccagacttttcaatgtttaagtggatttttttcaccctctaaagttttaaggaaaagttattaatctttaaatgtaaaaacattcatgagtcccaagcatagcaatatttaggcatattctgttctaggaaagaataaagcagagacttgaccaagatagggatgtcatcaattcaggaaacattatcaagcaaatatggaaagtagaaatcaaataactgtttttctcattaactttcaccctgttcttccctggtatgttggcaattccctgcgcatgctaagaaaaaaaaaaaaacagtcacaaagctttgttattcaaagcttggtgttatgtacaagtctgagaattggcttttggaaaaaaatttatgatgaccaaataaaatgtaccattttaatgaagtctgtggacaaggttcaattagattggttattttaaaatgattcattgattattttaaactgattacttaaagaaaaatatcaaaaagtatacagttttaaggccgggcatggtggctcatgcctgtaatcccagccccctgggagacagggcaggcagatcacctgatgtcaggagtttgggaccagcctggccaacatgatgaaactccatctctactaaaaatacaaaacttagccaagcatggtggcaggcacctgtaatcccagctacttgggagcctgaagcaggagaatggcttgaacctgggaggcagagtttgcagtgagctgagaacaagccactgcactccagcctgggtgacagagcgagactccgtgttgaaaaaaaaaaaaa

SEQ ID NO: 584 - DNA, 4961 bp, Homo sapiens
acaaagagaaggcgcccgggcggccgcggtcccgcccactgacgcgtccccggggtgccgctataacccgccgctcgcagggctgctccacagccgcgcgacgccgccgccttagaacgcctttccagtactgctagcagcagcccgaccacgcgttaccgcacgctcgcgcctttcccttgacacggcggacgccggaggattggggcggcaatttgtcttttccttttttattaaaattatttttcctgcctgttgttggatttggggaaattttttgtttgttttttatgatttgtatttgactgagagaaacccactgaagacgtctgcgtgagaatagagaccaccgaggccgactcgcgggccgctgcacccaccgccaaggacaaaaggagcccagcgctactagctgcacccgattcctcccagtgcttagcatgaagaaggccgaaatgggacgattcagtatttccccggatgaagacagcagcagctacagttccaacagcgacttcaactactcctaccccaccaagcaagctgctctgaaaagccattatgcagatgtagatcctgaaaaccagaactttttacttgaatcgaatttggggaagaagaagtatgaaacagaatttcatccaggtactacttcctttggaatgtcagtatttaatctgagcaatgcgattgtgggcagtggaatccttgggctttcttatgccatggctaatactggaattgctctttttataattctcttgacatttgtgtcaatattttccctgtattctgttcatctccttttgaagactgccaatgaaggagggtctttattatatgaacaattgggatataaggcatttggattagttggaaagcttgcagcatctggatcaattacaatgcagaacattggagctatgtcaagctacctcttcatagtgaaatatgagttgcctttggtgatccaggcattaacgaacattgaagataaaactggattgtggtatctgaacgggaactatttggttctgttggtgtcattggtggtcattcttcctttgtcgctgtttagaaatttaggatatttgggatataccagtggcctttccttgttgtgtatggtgttctttctgattgtggtcatttgcaagaaatttcaggttccgtgtcctgtggaagctgctttgataattaacgaaacaataaacaccaccttaacacagccaacagctcttgtacctgctttgtcacataacgtgactgaaaatgactcttgcagacctcactattttattttcaactcacagactgtctatgctgtgccaattctgatcttttcatttgtctgtcatcctgctgttcttcccatctatgaagaactgaaagaccgcagccgtagaagaatgatgaatgtgtccaagatttcattttttgctatgtttctcatgtatctgcttgccgccctctttggatacctaacattttacgaacatgttgagtcagaattgcttcatacctactcttctatcttgggaactgatattcttcttctcattgtccgtctggctgtgttaatggctgtgaccctgacagtaccagtagttattttcccaatccggagttctgtaactcacttgttgtgtgcatcaaaagatttcagttggtggcgtcatagtctcattacagtgtctatcttggcatttaccaatttacttgtcatctttgtcccaactattagggatatctttggttttattggtgcatctgcagcttctatgttgatttttattcttccttctgccttctatatcaagttggtgaagaaagaacctatgaaatctgtacaaaagattggggctttgttcttcctgttaagtggtgtactggtgatgaccggaagcatggccttgattgttttggattgggtacacaatgcacctggaggtggccattaattggcaccactcaaactcaaactcagtccatctgatgccagtgttgagtaaactcaactactatgaaatttcacctaatgttttcagtttcacttccttttgaagtgcagattcctcgctggttcttctgagtgcagaataagtgaacttttttgttttgttttgtttttttaagaaacttatctgtatgttagaaatggatatgaacaacaaaaccacgagtctcgggttaagggaagtgacaattttattccattccagagaatggacaaactcttaacttttatcaagccacatgcttggctgtgtcattgtttaacttggatattttatgattttacttgaatgtgcctaatggaaccatttgatgtgagaaacaattctttttaatttacagcaaaatattgaataaccattgacaaaaacactattattttttgtaccaaaaatacttaaagacctcagaagcactcttttacttttaagaaattgcttttttgaactttattcagaagcagttatcaataaattccataaaataatgtcattggtatttaaaaatgaatattaatataatgaaatggtttgcctttttgtaggcataataagccaaatacttttttacccaaaataatttttagagaaaatgatgtaatgaaaaattgtaccatgaattaggagcatagttttttccatttaaacgtcaccattacttaaaagatgattgattattgctataccaaatcagatgaactctgttcatcacttttcttctctgtccccaaacaatttggttcattcagactgaaatgtttgtgtcttcaacttattagaatggaagataatgcagatatttctgtgggaaataaaataactaattttgaggtaccaaatagtgcaattgggtaaaacagggtttattcagttgcatctgtctccagtgttgtattgacagctctgggtctttttttgggccagcccttttttgacattgcttccagcagtggaaaatgggcatttgatggcaataggccaaaattattgtgtccagagagtacactttttcaaaatgctcacctactggaagtgtgaattacttgacaatgtatggcttagttgtgttcatgttttgtctacagtagaggtctaatccacaggttacacctatgtttgatatgatataagttctctttgcgtaggccactgggtttctcatgcagtaagctttataaaaactcatttgcactggactgtcatctcattcttgtacaacgtagaattacttgtttacatccaacaaatggttagctagggaaaacagtgcaaactgagtgttagtagtcattttggtccaactgcatgtcaacccttccatttcaatcccagttagaaatgaaaataattactttgaaacttggctttaagagcacatttatcgtacgtcacagtgtatggtgaatatattattaaataatgtggtacttcgctcatcaggcataatgtctaaaatctaatatacataattccattaagtggttgaaggaagcaaataatggaattgtcaattggtcatctggctgtaaggtttgcccttgaactaaaaatgttgtttggggcaagggccagaaatgtggagacatggtttttgttacgcattcttgtattatatgtgactaaatttacaaacaagatacatgtgtaattaaagacccttatggaactggaagacgtcttgtagtgctacattgggtgaaaccgttggtccatttttgtctgtttctatgaagataaaataattgggggccatctagaaatagaaaggcagtgggaagacagattctacggcactgctttcatttaattgggctttaggcactccattcgaatgcagaacctcacctctagttgagaccaagaattggcaaatttgcatgagctcctggaaagagttgctgactttgtatctaagacctgccagggaataccaagagttgtttctacagacttttttttttttttttgtatgggagaagatactgtggcaaccaggaaggaatggaaaaaaaattcttttctctacagcaaattaatgtgaggaagctcctccaatcctctggctatttaaggttcaaaatcaagtgcctagggaaaattccaatggatgattttctgggagctatcttgtctaccttgaggttcctgaacaatgaattcccattaatgagcagtcttcagtattaaaaccactgtcttgtcacctcattttgcattactgtcttccgtggatgtttcagttacaactgtaatgttatttatagaacaacattaatccattaaagctaacctatttttcaatatttatgataatctatgtacatatattgtctgtccatatgtatttgtaaataggttgtatataatgtcaggtttgggtcttgggttcaagtgtatatattcctgtaagtttcttaactgcattttgatgaattcacattatgtaactataagaattgtcccaaaagtacctgtacagaaaattgaatattgaaaaattgacaaattgtgtacaaacactaaaaaaaacttgtttaaattgtatttgcaataaacaacatcaaattttttcatgaaatcttggtacaaattcagatctcttatttaaaatttaaataaggaatacattttcaaaatgcagtaatcaaaatgtgatctagtgtaatgaaataaaatgtgatctagtgtaatggaagacctttgagaacctgggtgtattaactttgtgtatatagtgtaaatatccccactgtactgttagaggccaacaattctagtatggcttgttggcaaagagtgctacaccgtttcaatgaaacaatgtatgtttgttttaactgaactaaaataaatacatgcttaatcctgaaaaaaaaaaaaaaaaaaaaaaaaaaaaaaaaaaaaaaaaaaaaaaaaaaaaaaaaaaaaaaaaaaaaaaaaaaaaaa

SEQ ID NO: 585 - DNA, 5239 bp, Homo sapiens; identical to SEQ ID NO: 447

SEQ ID NO: 586 - DNA, 2196 bp, Homo sapiens
ctcttaccgcccttttccggggcaagggaagctagtagcggagccggaagtgaggcaccctcgggctcgagacagcggcgacgtttaaagctgagcgacccagtgccactggagacggtcagcttctccactcaggctcctccagcccgagccagaagaccccctcccccagaattctgggggccgatggaagggagccgagtcagatcgcgaggtacccagagccgacagaccggagcgacagggagttgccagaagccccgcccctaggagtgatcggaaagcctcacccatccgggtgaggaacccggagggaccgcctccgggcggagcccgccgaccatggctacgcccctggtggcgggtcccgcagctctacgcttcgccgccgcggctagctggcaggttgtgcgcggacgctgcgtggaacattttccgcgagtactggagtttctgcgatctctgcgcgctgttgcccctggcttggttcgctaccggcaccacgaacgcctttgtatgggcctaaaggccaaggtggtggtggagctgatcctgcagggccggccttgggcccaagtcctgaaagccctgaatcaccactttccagaatctggacctatagtgcgggatcccaaggctacaaagcaggatctgaggaagattttggaggcacaggaaactttttaccagcaggtgaagcagctgtcagaggctcctgtggatttggcctcgaagctgcaggaacttgaacaagagtatggggaaccctttctggctgccatggaaaagctgctttttgagtacttgtgtcagctggagaaagcactgcctacaccgcaggcacagcagcttcaggatgtgctgagttggatgcagcctggagtctctatcacctcttctcttgcctggagacaatatggtgtggacatggggtggctgcttccagagtgctctgttactgactcagtgaacctggctgagcccatggaacagaatcctcctcagcaacaaagactagcactccacaatcccctgccaaaagccaagcctggcacacatcttcctcagggaccatcttcaaggacgcacccagaacctctagctggccgacacttcaatctggcccctctaggccgacgaagagttcagtcccaatgggcctccactaggggaggccataaggagcgccccacagtcatgctgtttccctttaggaatctcggctcaccaacccaggtcatatctaagcctgagagcaaggaagaacatgcgatatacacagcagacctagccatgggcacaagagcagcctccactgggaagtctaagagtccatgccagaccctggggggaagggctctgaaggagaacccagttgacttgcctgccacagagcaaaaggagtgagtggaacagagttgcttcttactaggagcacattctttgcctgccttcccttcatcctatcctctttgcttgctctcacctcaggaattgcttggattgctacatggaccccctgagactatcattattacctcctagggccaggaagccaggtaggtagtctgagtcaggattggatcaacagcctcctctcttggggactctcaagagcctgtgttcatctagaagtagtagtttgattctggtttccctcctacagtgtgtcctccgtctctgtgcagctccgtcattaccataggggacttggttttagactctgatgaggaagaaaatggccagggggaaggaaaggtgagtgggaaggagcagaaagctgggaaaggggatgggtagaacaagactgagaaatccacatgcttcagaattcagagggttcagggaatggtttcggatagtaggctctccctgctcccttctctacaggaatctctggaaaactatcagaagacaaagtttgacaccttgatacccactctctgtgaatacctacccccttctggccacggtgccatacctgtttcttcctgtgactgtagagacagttctagacctttgtgatagaactaaaatgctctctgtactctagtctcctgcctcctcagctctgcaagtagtttagtaggaatgaagtggaagtccaggcttggattgcctaactacactgctaaaaatatttgtaatccttaataattaaactttggatttgttaaaaaaaaaaaaaaaaaaaaa

SEQ ID NO: 587 - DNA, 10759 bp, Homo sapiens
gcggggggaggggaggggaggggagggggcgcggggccgcggcagcggagctcgcatcctcggcggggcggctgtgcaggaggcggcgcccgggcgtcagcggacggaccgatcgacggccaagggcgcgcggaccgacggcggctgcccggaggggatcgcgggcctcggagacagcgactgcggacgatgcgcggccccaggccccgcgcgagcgggcgctgcccggggggctgaccgcggccggacggcgccccagcaccgggcgagggagcccgcgtcgcgcggaggtcagggagcctgagctggagccagggccccagtgggacctgacccaaagtctgaggtcaagctgggcccagagcctggcctggagctggagcccaaggcacagctggactacccttgtcatgcagaaggagctgggcattgtgccttcctgccctggcatgaagagccccaggccccacctcctgctaccattgctgctgctgctgctgctgctgctgggggctggggtgccaggtgcctggggtcaggctgggagcctggacttgcagattgatgaggagcagccagcgggtacactgattggcgacatcagtgcggggcttccggcaggcacggcagctcctctcatgtacttcatctctgcccaagagggcagcggcgtgggcacagacctggccattgacgaacacagtggggtcgtccgtacagcccgtgtcttggaccgtgagcagcgggaccgctaccgcttcactgcagtcactcctgatggtgccaccgtagaagttacagtgcgagtggctgacatcaacgaccatgctccagccttcccacaggctcgggctgccctgcaggtacctgagcatacagcttttggcacccgctacccactggagcctgctcgtgatgcagatgctgggcgtctgggaacccagggctatgcgctatctggtgatggggctggagagaccttccggctggagacacgccccggtccagatgggactccagtacctgagctggtagttactggggaactggaccgagagaaccgctcacactatatgctacagctggaggcctatgatggtggttcacccccccggagggcccaggccctgctggacgtgacactgctggacatcaatgaccatgccccggctttcaatcagagccgctaccatgctgtggtgtctgagagcctggcccctggcagtcctgtcttgcaggtgttcgcatctgatgccgatgctggtgtcaatggggctgtgacttacgagatcaaccggaggcagagcgagggtgatggacccttctccatcgacgcacacacggggctgctgcagttagagcggccactggactttgagcagcggcgggtccatgaactggtggtgcaagcacgagatggtggggctcaccctgagctgggctcggcctttgtgactgtgcatgtgcgagatgccaatgacaatcagccctccatgactgtcatctttctcagtgcagatggctccccccaagtgtctgaggccgccccacctggacagctcgttgctcgcatctctgtgtcagacccagatgatggtgactttgcccatgtcaatgtgtccctggaaggtggagagggccactttgccctaagcacccaagacagcgtcatctatctggtgtgtgtggctcggcggctggatcgagaggagagggatgcctataacttgagggttacagccacagactcaggctcacctccactgcgggctgaggctgcctttgtgctgcacgtcactgatgtcaacgacaatgcacctgcctttgaccgccagctctaccgacctgagcccctgcctgaggttgcgctgcctggcagctttgtagtgcgggtgactgctcgggatcctgaccaaggcaccaatggtcaggtcacttatagcctagcccctggcgcccacacccactggttctccattgaccccacctcaggcattatcactacggctgcctcactggactatgagttggaacctcagccacagctgattgtggtggccacagatggtggcctgccccctctagcctcctctgccacagttagcgtggccctgcaagatgtgaatgataatgagccccaattccagaggactttctacaatgcctcactgcctgagggcacccagcctggaacttgcttcctgcaggtgacagccacagacgcggatagtggcccatttggcctcctctcctattccttgggtgctggacttgggtcctccggatctcccccattccgcattgatgcccatagcggtgatgtgtgcacaacccggaccctggaccgtgaccaggggccctcaagctttgacttcacagtgacagctgtggatgggggaggcctcaagtccatggtatatgtgaaggtgtttctgtcagacgagaatgacaaccctcctcagttttatccacgggagtatgctgccagtataagtgcccagagtccaccaggcacagctgtgctgaggttgcgtgcccatgaccctgaccagggatcccatgggcgactctcctaccatatcctggctggcaacagccccccactttttaccttggatgagcaatcagggctgttgacagtagcctggcccttggccagacgggccaattctgtggtgcagctggagatcggggctgaggacggaggtggcctacaggcagaacccagtgcccgagtggacatcagcattgtgcctggaacccccacaccacccatatttgagcaactacagtatgttttttctgtgccagaggatgtggcaccaggcaccagtgtgggcatagtccaggcacacaacccaccaggtcgcttggcacctgtgaccctttccctatcaggtggggatccccgaggactcttctccctagatgcggtatcaggactgttgcaaacacttcgccctctggaccgggagctactgggaccagtgttggagctggaggtgcgagcaggcagtggagtgcccccagctttcgctgtagctcgggtgcgtgtgctgctggatgatgtgaatgacaactcccctgcctttcctgcacctgaagacacggtattgctaccaccaaacactgccccagggactcccatctatacactgcgggctcttgaccccgactcaggtgttaacagtcgagtcacctttaccctgcttgctgggggtggtggagccttcaccgtggaccccaccacaggccatgtacggcttatgaggcctctggggccctcaggagggccagcccatgagctggagctggaggcccgggatgggggctccccaccacgcaccagccactttcgactacgggtggtggtacaggatgtgggaacccgtgggctggctccccgattcaacagccctacctaccgtgtggacctgccctcaggcaccactgctggaactcaggtcctgcaagtgcaggcccaagcaccagatgggggccctatcacctatcaccttgcagcagagggagcaagtagcccctttggcctggagccacagagtgggtggctatgggtgcgggcagcactagaccgtgaggcccaggaattgtacatactgaaggtaatggcagtgtctgggtccaaagctgagttggggcagcagacaggcacagccaccgtgagggtcagcatcctcaaccagaatgaacacagtccccgcttgtctgaggatcccaccttcctggctgtggctgagaaccagcccccagggaccagcgtgggccgagtctttgccactgaccgagactcaggacccaatggacgtctgacctacagcctgcaacagctgtctgaagacagcaaggccttccgcatccacccccagactggagaagtgaccacactccaaaccctggaccgtgagcagcagagcagctatcagctcctggtgcaggtgcaggatggagggagcccaccccgcagcaccacaggcactgtgcatgttgcagtgcttgacctcaacgacaacagccccacgttcctgcaggcttcaggagctgctggtgggggcctccctatacaggtaccagaccgcgtgcctccaggaacactggtgacgactctgcaggcgaaggatccagatgagggggagaatgggaccatcttgtacacgctaactggtcctggctcagagcttttctctctgcaccctcactcaggggagctgctcactgcagctcccctgatccgagcagagcggccccactatgtgctgacactgagtgctcatgaccaaggcagccctcctcgaagtgccagcctccagctgctggtgcaggtgcttccctcagctcgcttggccgagccgcccccagatctcgcagagcgggacccagcggcaccagtgcctgtcgtgctgacggtgacagcagctgagggactgcggcccggctctctgttgggctcggtggcagcgccagagcccgcgggtgtgggtgcactcacctacacactggtgggcggtgccgatcccgagggcaccttcgcgctggatgcggcctcagggcgcttgtacctggcgcggcccctggacttcgaagctggcccgccgtggcgcgcgctcacggtacgcgctgaggggccgggaggcgcgggcgcgcggctgctgcgagtgcaggtgcaagtgcaggacgagaatgagcatgcgcccgcctttgcgcgcgacccgctggcgctggcgctgccagagaacccggagcccggcgcagcgctgtacactttccgcgcgtcggacgccgacggccccggccccaatagcgacgtgcgctaccgcctgctgcgccaggagccgcccgtgccggcgcttcgcctggacgcgcgcaccggggcgctcagcgctccgcgcggcctggaccgagagaccactcccgcgctgctgctgctggtggaagccaccgaccggcccgccaacgccagccgccgtcgtgcagcgcgcgtttcagcgcgcgtcttcgtcacggatgagaatgacaacgcgcctgtcttcgcctcgccgtcacgcgtgcgcctcccagaggaccagccgcctgggcccgcggccctgcacgtggtagcccgggacccggatctgggcgaggctgcacgcgtgtcctatcggctggcatctggcggggacggccacttccggctgcactcaagcactggagcgctgtccgtggtgcggccgttggaccgcgaacaacgagctgagcacgtactgacagtggtggcctcagaccacggctccccgccgcgctcggccacgcaggtcctgaccgtcagtgtcgctgacgtcaacgacgaggcgcctactttccagcagcaggagtacagcgtcctcttgcgtgagaacaaccctcctggcacatctctgctcaccctgcgagcaaccgaccccgacgtgggggccaacgggcaagtgacttatggaggcgtctctagcgaaagcttttctctggatcctgacactggtgttctcacgactcttcgggccctggatcgagaggaacaggaggagatcaacctgacagtgtatgcccaggacaggggctcacctcctcagttaacgcatgtcactgttcgagtggctgtggaggatgagaatgaccatgcaccaacctttgggagtgcccatctctctctggaggtgcctgagggccaggacccccagacccttaccatgcttcgggcctctgatccagatgtgggagccaatgggcagttgcagtaccgcatcctagatggggacccatcaggagcctttgtcctagaccttgcttctggagagtttggcaccatgcggccactagacagagaagtggagccagctttccagctgaggatagaggcccgggatggaggccagccagctctcagtgccacgctgcttttgacagtgacagtgctggatgccaatgaccatgctccagcctttcctgtgcctgcctactcggtggaggtgccggaggatgtgcctgcagggaccctgctgctgcagctacaggctcatgaccctgatgctggagctaatggccatgtgacctactacctgggcgccggtacagcaggagccttcctgctggagcccagctctggagaactgcgcacagctgcagccttggacagagaacagtgtcccagctacaccttttctgtgagtgcagtggatggtgcagctgctgggcccctaagcaccacagtgtctgtcaccatcacggtgcgcgatgtcaatgaccatgcacccaccttccccaccagtcctctgcgcctacgtctgccccgcccaggccccagcttcagtaccccaaccctggctctggccacactgagagctgaagatcgtgatgctggtgccaatgcttccattctgtaccggctggcaggcacaccacctcctggcactactgtggactcttacactggtgaaatccgcgtggcccgctctcctgtagctctaggcccccgagatcgtgtcctcttcattgtggccactgatcttggccgtccagctcgctctgccactggtgtgatcattgttggactgcagggggaagctgagcgtggaccccgctttccccgggctagcagtgaggctacgattcgtgagaatgcgcccccagggactcctattgtctcccccagggccgtccatgcaggaggcacaaatggacccatcacctacagcattctcagtgggaatgagaaagggacattctccatccagcctagtacaggtgccatcacagttcgctcagcagaggggctagacttcgaggtgagtccacggctgcgactggtgctgcaggcagagagtggaggagcctttgccttcactgtgctgaccctgaccctgcaagatgccaacgacaatgctccccgtttcctgcggccccattatgtggccttccttcctgagtcccggcccttggaggggcccctgctgcaggtggaggcggatgacctggatcaaggctctggaggacagatttcctacagtctggctgcatcccagccggcacgtggattgttccacgtagacccaaccacaggcactatcactaccacagccatcctggaccgtgagatctgggctgaaacacggttggtgctgatggccacagacagagggagcccagccctggtgggctcagctaccttgacggtgatggtcatcgacaccaatgacaatcgccccaccatcccccaaccctgggagctccgagtgtcagaagatgcgttattgggctcagagattgcacaggtaacagggaatgatgtggactcaggacccgtgctgtggtatgtgctaagcccatctgggccccaggatcccttcagtgttggccgctatggaggccgtgtctccctcacggggcccctggactttgagcagtgtgaccgctaccagctgcagctgctggcacatgatgggcctcatgagggccgtgccaacctcacagtgcttgtggaggatgtcaatgacaatgcacctgccttctcacagagcctctaccaggtaatgctgcttgagcacacacccccaggcagtgccattctctccgtctctgccactgatcgggactcaggtgccaacggtcacatttcctaccacctggcttcccctgccgatggcttcagtgttgaccccaacaatgggaccctgttcacaatagtgggaacagtggccttgggccatgacgggtcaggagcagtggatgtggtgctggaagcacgagaccacggggctccaggccgggcagcacgagccacagtgcacgtgcagctgcaggaccagaacgaccacgccccgagcttcacattgtcacactaccgtgtggctgtgactgaagacctgccccctggctccactctgctcaccctggaggctacagatgctgatggaagccgcagccatgccgctgtggactacagcatcatcagtggcaactggggccgagtcttccagctggaacccaggctggctgaggctggggagagtgctggaccaggcccccgggcactgggctgcctggtgttgcttgaacctctagactttgaaagcctgacacagtacaatctaacagtggctgcagctgaccgtgggcagccaccccaaagctcagtcgtgccagtcactgtcactgtactagatgtcaatgacaacccacctgtctttacccgagcatcctaccgtgtgacagtacctgaggacacacctgttggagctgagctgctgcatgtagaggcctctgacgctgaccctggccctcatggcctcgtgcgtttcactgtcagctcaggcgacccatcagggctctttgagctggatgagagctcaggcaccttgcgactggcccatgccctggactgtgagacccaggctcgacatcagcttgtagtacaggctgctgaccctgctggtgcacactttgctttggcaccagtgacaattgaggtccaggatgtgaatgatcatggcccagccttcccactgaacttactcagcaccagcgtggccgagaatcagcctccaggcactctcgtgaccactctgcatgcaatcgacggggatgctggggcttttgggaggctccgttacagcctgttggaggctgggccaggacctgagggccgtgaggcatttgcactgaacagctcaacaggggagttgcgtgcgcgagtgccctttgactatgagcacacagaaagcttccggctgctggtgggtgctgctgatgctgggaatctctcagcctctgtcactgtgtcggtgctagtgactggagaggatgagtatgaccctgtatttctggcaccagctttccacttccaagtgcccgaaggtgcccggcgtggccacagcttgggtcacgtgcaggccacagatgaggatgggggtgccgatggcctggttctgtattcccttgccacctcttccccctattttggtattaaccagactacaggagccctgtacctgcgggtggacagtcgggcaccaggcagcggaacagccacctctgggggtgggggccggacccggcgggaagcaccacgggagctgaggctggaggtgatagcacgggggcctctgcctggttcccggagtgccacagtgcctgtgaccgtggatatcacccacaccgcactgggcctggcacctgacctcaacctgctattagtaggggccgtggcagcctccttgggagttgtggtggtgcttgcactggcagccctggtcctaggacttgttcgggcccgtagccgcaaggctgaggcagcccctggcccaatgtcacaggcagcacccctagccagtgactcactgcagaaactgggccgggagccacctagtccaccaccctctgagcacctctatcaccagactcttcccagctatggtgggccaggagctggaggaccctacccccgtggtggctccttggacccttcacattcaagtggccgaggatcagcagaggctgcagaggatgatgagatccgcatgatcaatgagttcccccgtgtggccagtgtggcctcctctctggctgcccgtggccctgactcaggcatccagcaggatgcagatggtctgagtgacacatcctgcgaaccacctgcccctgacacctggtataagggccgaaaggcagggctgctgctgccaggtgcaggagccactctctacagagaggaggggcccccagccactgccacagccttcctggggggctgtggcctgagccctgcacccactggggactatggcttcccagcagatggcaagccatgtgtggcaggtgcgctgacagccattgtggccggcgaggaggagctccgtggcagctataactgggactacctgctgagctggtgccctcagttccaaccactggccagtgtcttcacagagatcgctcggctcaaggatgaagctcggccatgtcccccagctccccgtatcgacccaccacccctcatcactgccgtggcccacccaggagccaagtctgtgccccccaagccagcaaacacagctgcagcccgggccatcttcccaccagcttctcaccgctcccccatcagccatgaaggctccctgtcctcagctgccatgtcccccagcttctcaccctctctgtctcctctggctgctcgctcacccgttgtctcaccatttggggtggcccagggtccctcagcctcagcactcagcgcagagtctggcctggagccacctgatgacacggagctgcacatctagctgtggcccaggctgggccccgacctgggatgcgcacagtgtccccaacgcaggccccactctgagcctgccctgggcagcctcggactatgactggctacggggaggccaccaccaggccccagctctccaccctgaactccccagccccctcagagtactaggaccacagaagccctgttgctcactgacctgtgaccaggtccaatgtggggagaaatatgaaggaggtagcagccctgggttctcctcagtgagggatccctgccctgcaccagcaccctgagatggagctgagactttatttattgggggtagggggatggaggaggtccctccaacatgtttggacccagctcctttgggttccactgacacccctgcccctgcccctgcccagaaccaagtgccatttctcactctggagccttaataaactgcaatttgtatcc

SEQ ID NO: 588 - DNA, 2551 bp, Homo sapiens
caacctccccgccgacccgcggtccaggcctcggtctctctcttcggcggcgagccgcggcccagaccccggcagaggacacttgtcggcacgttctcacccctgtcatctcagccccctgcctagctccaccccaggcttgggaacccggcccctgacggcccattgtccgcgggcccagcccccgcgctgaacgcacgctcgcccttgcccctaaccagcgcgtctaccccggcaacgcgcagtgacctgggatgcagccctcaggctgggcggccgccagggaggcggcgggccgcgacatgctggccgccgacctccggtgcagcctcttcgcctcggccctgcagagctacaagcgcgactcggtgctgcggcccttccccgcgtcctacgcccgcggcgactgtaaggactttgaagccctgcttgcagatgccagcaagttacctaacctgaaagaacttctccagtcctccggagacaaccacaaacgggcctgggacctggtgagctggattttatcctcaaaggtcctgacaatccacagtgcagggaaggcagagtttgaaaagatccaaaagctgactggggctcctcacacgcctgttcctgcaccggacttcctgtttgaaattgagtactttgacccagccaacgccaaattttatgagaccaaaggagaacgagacctaatctatgcatttcatggtagccgcctagaaaacttccattccattatccacaatggcctgcactgccatctgaacaagacatccttgttcggagaggggacctacctcaccagtgacttgagcctggccctcatatacagcccccatggccatgggtggcagcacagcctcctcggccccatccttagctgtgtggccgtgtgtgaggtcattgaccatccggacgtcaagtgccaaaccaagaagaaggattccaaggagatagatcgcagacgagcgagaatcaaacatagtgaagggggagacatccctcccaagtacttcgtggtcaccaataaccagctgctgcgagtgaagtacctcctggtgtattcacagaagccacccaagagcagggcttcgagccagctctcctggttttccagccattggtttaccgtcatgatatccctgtatctgctgctgctgctcatagtgagtgtcatcaactcctctgctttccaacacttttggaatcgtgcgaaaagataatctttctgggcctggtgtgggggctacctcaactatgtgccttatggtaacttgttctgtacctcctatgcctcatgtccagccaggttgagcctaggggccagttgggggaccacaggacaattttcatatggcctaaatgtatccattgcctttgatgatgttcccagccatactccagtcaacggggactactagtccctcactcttaggttttaggggagtccttccatctgctccttcttaaactgtcctagggagttggcttttcagccagggccaaaggaaaaagccctgctgcatttaaaaacaaagtgtccaagctgtcagtggtgtgtttacaatctctcctggcagaggttggccctttctctaatgccttctggaaggcggaaaatgtgggaactataaatcactaggcggttgccttgttttgacttgagacacccaagaggaacagtcatgtttctcataaaaatcagtgggatcatttttgaattccatcagcctttgtatgtgagtgcaaaacattttaacagttttctcaaatcaacaaacagccttctcctatagctgtacttgcccccctccccaaaaaaccatggatgagaaagaaaggagtcaggggcctgataaaaaatacagacttaatgagcaactcaagatgagaaaactgctctttttccaaaaattaccaactgctgattacagctgaaatggaaccaaatgtttgttttctgatttttttttaatagctgtttaacaaattagtctttgctgagtaaaaggggaaatttctaaacctagtgcactgtttggccagtgtccacagcctcttttctggctgtgttttagagaaagggatttgagctataggctcgcctcctgttctcattctcacaaagctgccttgactgtggcctgcaaccacgagtgccatgctttcaggtcttctgtggcctactggccttcaagacagaggcctgccccagtgtgccacagatccatgtggatggagcctccttcagaggggtcacaggtctttgagactcagcctgggctttaatgtgtaggaaaagccttctggccacccagagagccggagccctgcttgctgtattctctgctcccttcttcctgctgggttttagccataatagggcccggtacgatttgggagtgacatttctgtaaagaagaggaaaaatcatttttctataatttgtaaagttgtgaaagagccactaccacagtttttacattgattattggaacatttcagaataaataaagatattttcttaatgaaaaaaaaaaaaaaaaaa

SEQ ID NO: 589 - DNA, 1460 bp, Homo sapiens; identical to SEQ ID NO: 402

SEQ ID NO: 590 - DNA, 3443 bp, Homo sapiens
agcggtaagcgggaagcgagggcgaggggtaggggctggggaagggcgagcgggaggcgcgggctctctctagcagggggctgcagccatgaagaggctcttagctgccgctggcaagggcgtgcggggcccggagcccccgaaccccttcagcgaacgggtctacactgagaaggactacgggaccatctacttcggggatctagggaagatccatacagctgcctcccggggccaagtccagaagctggagaagatgacagtagggaagaagcccgtcaacctgaacaaaagagatatgaagaagaggactgctctacactgggcctgtgtcaatggccatgcagaagtagtaacatttctggtagacagaaagtgccagcttaatgtccttgatggcgaagggaggacacctctgatgaaggctctacaatgcgagagggaggcttgtgcaaatattctcatagatgctggtgctgatctaaattatgtagatgtgtatggcaacacggctctccattatgccgtttatagtgagaatttgttaatggtggcaacactgctgtcctatggtgcagtcatcgaggtgcaaaacaaggctagcctcacaccccttttactggccatacagaaaagaagcaagcaaactgtggaatttttactaacaaaaaatgcaaatgcaaacgcatttaatgagtctaaatgcacagccctcatgcttgccatatgtgaaggctcatcagagatagtcggcatgcttcttcagcaaaatgttgacgtctttgctgaagacatacatggaataactgcagaacgttatgctgctgcttgtggagttaattacattcatcaacaacttttggaacatatacgaaaattacctaaaaatcctcaaaataccaatccagaaggaacatctacaggaacacctgatgaggctgcacccttggcggaaagaacacctgacacggctgaaagcttgctggaaaaaacacctgacgaggctgcacgcttggtggagggaacgtctgccaaaattcaatgtctggggaaagcaacatctggaaagtttgaacagtcaacagaagaaacacctaggaaaattttgaggcctacaaaagaaacatctgagaaattttcatggccagcaaaagaaagatctaggaagatcacatgggaggaaaaagaaacatctgtaaagactgaatgcgtggcaggagtaacacctaataaaactgaagttttggaaaaaggaacatctaatatgattgcatgtcctacaaaagaaacatctacaaaagcaagtacaaatgtggatgtgagttctgtagagcctatattcagtctttttggcacacggactattgaaaattcacagtgtacaaaagttgaggaagaccttaatcttgctaccaagattatctctaagagtgctgcacagaattatacgtgtttacctgatgctacatatcaaaaagatatcaaaacaataaatcacaaaatagaagatcagatgttcccatcagaatccaaacgagaggaagatgaagaatattcttgggattctgggagtctctttgagagttctgcaaagactcaagtgtgtatacctgagtctatgtatcagaaagtaatggagataaatagagaagtagaagagcttcctgagaagccatctgccttcaagcctgccgttgaaatgcaaaagactgttccaaataaagcctttgaattgaagaatgaacaaacattgagagcagctcagatgttcccatcagaatccaaacaaaaggacgatgaagaaaattcttgggattctgagagtccctgtgagacggtttcacagaaggatgtgtatttacccaaagctacacatcaaaaagaattcgataccttaagtggaaaattagaagcctacctgtggaaggaaagtttctcttccaaataaagccttagaattaaaggacagagaaacattcaaagcagagtctcctgataaagatggtcttctgaagcctacctgtggaaggaaagtttctcttccaaataaagccttagaattaaaggacagagaaacactcaaagcagagtctcctgataatgatggtcttctgaagcctacctgtggaaggaaagtttctcttccaaataaagctttagaattgaaggacagagaaacattcaaagcagctcagatgttcccatcagaatccaaacaaaaggatgatgaagaaaattcttgggattttgagagtttccttgaggctctcttacagaatgatgggtgtttacccaaggctacacatcaaaaagaattcgataccttaagtggaaaattagaagagtctcctgataaagatggtcttctgaagcctacctgtggaaggaaagtttctcttccaaataaagccttagaattaaaggacagagaaacactcaaagcagagtctcctgataaagatggtcttctgaagcctacctgtgtaaggaaagtttctcttccaaataaagccttagaattaaaggacagagaaacattaaaagcagctcagatgttcccatcagaatccaaacaaaaggatgatgaagaaaattcttgggattttgagagtttccttgagactctcttacagaatgatgtgtgtttacccaaggctacacatcaaaaagaattcgataccttaagtggaaaattagaagatttcaggccgggcactgtggttcacgcctgtaatcccagccctttgggaggcagaggcatgcggatcacgaggtcagcagatcgagaccatcctggctaacatggtgaaaccccgtctctatgaaaaaatacaaaaaattagccaagcatggtggtgggtgcctctagtcccagctactcgggaggctgaggcaggagaatgtgagaacccatgaggcagagattgcagtgagccaagatcatgcacctacactccagcctgggtgacagggccagactctgtgaaaaaaaaaaaaaaaaaagaatttatttattgtggcactattcacaacagcaaagacttggaaccaaaccaaatgtccaacaacgctagactggattaagaaagtatggcacatatacaccatggaacactacgcagccataaaaaatgataagttcatgtcctttgtagggacatgaatgaaactggaaaccatcattctcagcaaactctcgcaaggacaaaaaaccaaacactgcgtgttctcactcataggtgtgaattgaacaatgagaacacatggacacaggaaggggaacatcacactccggggactgttgtggggttggaggagggatagcattaggagatatacctaatgctaaatgacgagttaatgggaacctgcacattgtgcacatgtaccctaaaacttaaagtataatattaaaataaaaaataaagaaaaaaaaaaaaaaa

SEQ ID NO: 591 - DNA, 2094 bp, Homo sapiens
gcgcggatcttgcatctgaaactgagcagagcagggcgccgggcagggccggcgggccacgtgataagcccggaaacagctccgccccctcgcttcctgagccgccacatcccggcagccctcctacctgcgcacgtggtgccgccgctgctgcctcccgctcgccctgaacccagtgcctgcagccatggctcccggccagctcgccttatttagtgtctctgacaaaaccggccttgtggaatttgcaagaaacctgaccgctcttggtttgaatctggtcgcttccggagggactgcaaaagctctcagggatgctggtctggcagtcagagatgtctctgagttgacgggatttcctgaaatgttggggggacgtgtgaaaactttgcatcctgcagtccatgctggaatcctagctcgtaatattccagaagataatgctgacatggccagacttgatttcaatcttataagagttgttgcctgcaatctctatccctttgtaaagacagtggcttctccaggtgtaactgttgaggaggctgtggagcaaattgacattggtggagtaaccttactgagagctgcagccaaaaaccacgctcgagtgacagtggtgtgtgaaccagaggactatgtggtggtgtccacggagatgcagagctccgagagtaaggacacctccttggagactagacgccagttagccttgaaggcattcactcatacggcacaatatgatgaagcaatttcagattatttcaggaaacagtacagcaaaggcgtatctcagatgcccttgagatatggaatgaacccacatcagacccctgcccagctgtacacactgcagcccaagcttcccatcacagttctaaatggagcccctggatttataaacttgtgcgatgctttgaacgcctggcagctggtgaaggaactcaaggaggctttaggtattccagccgctgcctctttcaaacatgtcagcccagcaggtgctgctgttggaattccactcagtgaagatgaggccaaagtctgcatggtttatgatctctataaaaccctcacacccatctcagcggcatatgcaagagcaagaggggctgataggatgtcttcatttggtgattttgttgcattgtccgatgtttgtgatgtaccaactgcaaaaattatttccagagaagtatctgatggtataattgccccaggatatgaagaagaagccttgacaatactttccaaaaagaaaaatggaaactattgtgtccttcagatggaccaatcttacaaaccagatgaaaatgaagttcgaactctctttggtcttcatttaagccagaagagaaataatggtgtcgtcgacaagtcattatttagcaatgttgttaccaaaaataaagatttgccagagtctgccctccgagacctcatcgtagccaccattgctgtcaagtacactcagtctaactctgtgtgctacgccaagaacgggcaggttatcggcattggagcaggacagcagtctcgtatacactgcactcgccttgcaggagataaggcaaactattggtggcttagacaccatccacaagtgctttcgatgaagtttaaaacaggagtgaagagagcagaaatctccaatgccatcgatcaatatgtgactggaaccattggcgaggatgaagatttgataaagtggaaggcactgtttgaggaagtccctgagttactcactgaggcagagaagaaggaatgggttgagaaactgactgaagtttctatcagctctgatgccttcttccctttccgagataacgtagacagagctaaaaggagtggtgtggcgtacattgcggctccctccggttctgctgctgacaaagttgtgattgaggcctgcgacgaactgggaatcatcctcgctcatacgaaccttcggctcttccaccactgattttaccacacactgttttttggcttgcttatgtgtaggtgaacagtcacgcctgaaactttgaggataactttttaaaaaaataaaacagtatctcttaatcactggatccatagttaaaaaaaaaa

SEQ ID NO: 592 - DNA, 2389 bp, Homo sapiens
agcgacgcggtgacgccacaaaaatggcggacgctggaaagcgccgttcctgactctaatgtacttagacacttgaagccacaaaaggatttatccccgaggttcctcatctgctcgcgaggatgccttttctcttctgccttgcgaaataacagcagcctagctgttgcccgtgaccagtgagaaaggcagcgtcgcgggctgattaggtttcacccaaagggtgccggcgccgaattggtttctaacgagaacttttaaaatgatccgttccaaaaaagggtaggagccgcgagaccctccaactgcccagagaaaacaagtctcgtctggcaaagttctcggcccacgcggtccgcggccaagggccaacggtccctcgccccacgttgccgcagcactgcgcgtgcgcgagccgctgtcaaacgcgctgacggaggccgagaagaaaaaaaggcgggagccgtcaatcccgggttgagcaaaatggcgcgggagaaggagatgcaggagttcacccgtagcttcttccgaggccgcccggacctcagcacgcttacgcattccatcgtgcggcggaggtacttagctcactcgggccgcagccacctggagcccgaggagaagcaggcactgaagcggctggtggaggaggagctgctgaagatgcaggtggatgaagccgcttccagggaagacaaactggaccttaccaagaagggcaagaggcctcccaccccttgtagcgacccggagagaaaaaggttccgcttcaattcagagtcggagtccggctctgaagcctccagcccagactactttggacccccagcaaagaatggggtggcagcagaagtcagcccagccaaagaggagaatccaaggcgagcctcaaaggcagttgaggagagcagtgatgaggaacggcagagggacctgcccgcacagaggggagaggagagcagtgaggaggaggaaaaggggtacaaggggaagactaggaagaaacctgtggtaaagaagcaggcaccaggcaaggcctcagtcagtaggaagcaggccagggaagaaagtgaggagagcgaggcagaacccgttcagaggacagcaaagaaggtggagggaaataaaggaactaaaagcctgaaggaaagtgaacaggagagtgaagaggagatcctagcccagaagaaagagcagagagaggaggaagtggaggaggaagagaaagaagaggatgaggaaaagggggattggaaacccagaaccaggagcaatggccggagaaagtcagctagggaggagaggagctgtaagcagaaaagccaggcaaagaggctcttgggagactcagacagcgaggaagagcagaaagaggcagccagcagtggggatgacagtgggagagatagagaacccccagtgcagaggaagagtgaggacaggacccagcttaagggtgggaagaggttgagtggaagcagcgaggacgaggaagacagtgggaagggggaacccacagctaaaggctctagaaagatggccagactgggcagcaccagtggtgaggaaagtgacttggagagggaggtaagtgacagcgaggcagggggaggcccccagggggagaggaagaaccgctcttccaagaagagctccaggaaaggcaggacacgaagctcctcttcctcctcagatggaagtccagaggccaaaggagggaaggctggctcaggtcgccgtggagaggaccacccggctgtgatgaggctgaagcgctacattcgggcctgtggtgcccatcgaaactacaagaagctgttgggctcctgttgctcacacaaggagcgcctgagtatcctccgggcagaactggaagcgctaggcatgaagggtaccccttccctagggaagtgtcgggccctgaaggagcagagggaggaggcagctgaggtggcctccttggatgttgcgaacatcatcagtggctcgggccggccacgcagacgtacagcctggaaccctttaggagaagcagcacccccaggggagctgtaccgacggaccctggactcagatgaagagcggccccgtcccgcacccccagactggtcacatatgcgtggcatcatcagcagtgatggcgagagtaactgagctctgccacccccaggagggacccttgatacatgtacaaagcatacatagcaccccttgccctgtgtctgtggaacagaagcagcttccttcagagaagactgcagctcccaaggacacaagctgttgggatgctacttctcagcttcacgctgtccctttaaggtgtttattttttaagactcaataaaggagtgtttttaatcacctcatcaaaaaaaaaaaaaaaaaa

SEQ ID NO: 593 - DNA, 8231 bp, Homo sapiens
agttggtgcagcggcggttggggtgagagcgcctacgccacccctcccctcctccggccccggcccccaccccgccgggcccagccccagccccggcccgggctccagccctagtacccgtcccagcccgagtcgggtccgtcccgtgcgggcaggtgccgcccctctgccggcgacgccccgggccgcccgcccgtccgcttgccaccatggagctggaggacggtgtggtgtatcaggaggagcccggcggctccggggccgtgatgtcggagcgggtgtccggcctggccggctccatctaccgcgagttcgagcggcttatcgggcgctatgacgaggaggtggtcaaagagctgatgccgctggtggtggctgtgctggagaacctggactcggtgttcgcgcaggaccaggagcaccaggtggagctggagctgctgcgggacgacaacgagcagctcatcacccagtacgagcgggagaaggcgctgcgcaagcacgctgaggagaaattcattgaatttgaagactctcaagaacaggaaaaaaaggacttacagacccgagtggaatctttagaatctcaaacaagacaacttgagctgaaagcgaaaaactatgctgaccagattagcagacttgaagaaagagaagcagaactgaagaaggaatataatgcattacatcaaagacacactgagatgatccataattatatggaacatttagaaagaacaaaacttcatcagctctcagggagtgatcaactagaatccacagctcatagtagaattagaaaagaacgccctatatcattaggaattttcccattacctgctggagatggattgcttacacctgatgctcagaaaggaggagagacccctggatctgagcaatggaaatttcaggaattaagtcaaccacgttctcataccagcctgaaggatgagctttctgatgttagccaaggcggatctaaagctaccactccagcatcaacagctaattcagatgtggcaacaattcctactgatactcccttaaaggaagaaaacgaaggatttgtgaaggttacagatgcgccaaataaatcagagataagcaaacacattgaagtacaggtagcccaggaaactagaaatgtatctactggctctgctgaaaatgaagaaaagtcagaagttcaagcaatcatcgaatctactcctgagctggatatggacaaagatctcagtggatataaaggttcaagcactcccaccaaaggcatagagaacaaagcttttgatcgcaatacagaatctctctttgaagaactgtcttcagctggctcaggcctaataggagatgtggatgaaggagcagatttactaggaatgggtcgggaagttgagaatcttatattagaaaatacacaactgttggaaaccaaaaatgctttgaacatagtgaagaatgatttgatagcaaaagtggatgaactgacctgtgagaaagatgtgctgcaaggggaattggaggctgtgaagcaagccaaactgaaactagaggaaaagaacagagaattggaggaagagcttaggaaagctcgggcagaagctgaagatgcaaggcaaaaagcaaaagatgacgatgatagtgatattcccacagcccagaggaaacggtttactagagtagaaatggcccgtgttctcatggagcgaaaccagtataaagagagattgatggagcttcaggaagctgttcgatggacagagatgattcgggcatcacgagaaaatccagccatgcaggaaaaaaaaaggtcaagcatttggcagtttttcagccgacttttcagctcctcaagtaacacgactaagaagcctgaaccacctgttaatctgaagtacaatgcacccacgtctcatgttactccgtccgtcaagaaaagaagcagcaccttatctcagctccctggggataagtccaaagcctttgatttccttagtgaagaaactgaagctagtttagcctcacgcagagaacaaaagagagagcagtatcgtcaggtaaaagcacatgttcagaaggaagacggtagagtgcaggcttttggctggagtctgcctcagaagtacaaacaggtaaccaatggtcaaggtgaaaataagatgaaaaatttacctgtgcctgtctatctcagacctctggatgaaaaagatacatcaatgaagctgtggtgtgctgttggagtcaatttatctggtgggaagaccagagatggtggttctgttgttggagcaagtgtattttacaaggatgttgctggtttggatacagaaggcagtaaacagcgaagtgcctctcagagtagtttagataagttagatcaggaacttaaggaacagcagaaggagttaaaaaatcaagaagaattatccagtctagtttggatctgtaccagcactcattcggctacaaaagttcttattattgatgctgttcaacctggcaacatcctagacagtttcactgtttgcaactctcatgttctgtgcattgcaagtgtgccaggtgcacgagaaacagactaccctgcaggagaagatctttcagaatctggtcaggtagacaaagcatctttatgtggaagtatgacaagcaacagctcagcagagacagacagcctgttaggaggcatcacagtggttggttgttctgcagaaggtgtgacgggagctgccacttcccctagtacaaatggtgcttctccagtgatggataaaccaccagaaatggaagcagaaaatagtgaggttgatgaaaatgttccaacagcagaagaagcaactgaagctacagaagggaatgcggggtcagctgaagacacagtggacatctcccaaactggcgtctacacagagcatgtctttacagatcctttgggagttcagatcccagaagacctctccccagtgtatcagtcgagcaatgactcagatgcatataaagatcaaatatcagtactgccaaatgaacaagacttggtgagagaagaagcccagaaaatgagtagtcttttaccaactatgtggcttggagctcaaaatggctgtttgtatgtccattcatctgtagcccagtggaggaaatgtctccattccattaaacttaaagattcgattctcagtattgtacacgtgaagggaatcgtgttagtagccctggctgacggcacccttgcaatctttcacagaggagtggatgggcagtgggatttgtcaaactatcacctcttagaccttggacggcctcatcattccatccgttgcatgactgtggtacatgacaaagtctggtgtggctataggaacaaaatctatgtggtgcagccaaaggccatgaaaatagagaaatcttttgatgcacatcccaggaaggagagccaagtgcgacagcttgcgtgggtgggggatggcgtgtgggtctccattcgcttggattctacgctccgtctctatcatgcacacacttatcaacatctacaggatgtggacattgagccttatgtaagcaaaatgttaggtactggaaaactgggcttctcttttgtgagaattacagctcttatggtgtcttgtaatcgtttgtgggtggggacaggaaatggtgtcattatctccatcccattgacagaaacaaataaaacctcaggtgtaccaggaaatcgtcctggaagtgtaatccgtgtatatggtgatgaaaacagtgataaagtgactccagggacatttataccctattgttcaatggcacatgcacagctttgcttccatgggcaccgggatgctgtgaaattctttgtggcagtcccaggtcaagtcatcagcccacaaagtagcagtagtggcacggatctgacgggtgacaaagcagggccatctgcacaggagcctggtagtcagacgcccttgaagtctatgcttgtcatcagtggaggagagggctacatcgacttccgaatgggtgatgaaggtggagaatcagaacttcttggagaggatcttccacttgaaccttctgtcaccaaagcagaaaggagtcacttgatagtgtggcaagtgatgtatggcaatgagtgagcccatgggaaacaggtggagatggggaagccgtctcttctgcatggtttattttccctctatccttttatttaatgctcttttgtgagataagtttcaccacataatgtgtgagcattttttcctgttaactttatattacaaaatccgttctaccataacaatacagaggaactagctgtgttactgcaccagtgttataggtaacttcagtatattatgaacaaatcaaagaatgtttacttcctgcaaactggtgaattatagaaagcaatccagatgtggtttactctgccacagtctaatgtcattcacttcatttgatggggtcacttgttagctgtcactaataatggaattaatgggaaacacttgataaatgaaactgtaccgttaaatacaatagctgagttttccccagtgtattgtaaaattgacacacactaatacaagatggattatcaggatgtatctaaatgtcccgagagggttaaaagctaactgtaaattactttaactttcactttcaaatctgacaaatcttgtttatatggtatataaaactttgttttcatcagatttgggggggttttatattaaagaaattaagactacactatttaaataaacgtttcctgtttctgacttattagagctctaaagtttatgaggcctacttctctgaatattctgatgggttttttttgagaccagtctcattttcatactgacatgtctgaaagatttattatttataaagcttaggacatactctgggaagcttagaagatacttcagcactgggaggattttttaaaggaaatgtgttttgtatttcttgtaccagagaatggtgatgttgattgagttttttccatgtaaaaaatgtacttgtttgccaaatgttcctagattgctcttaacctgttaatacaagtaaaactgtagtggggatggagtctggcctaagtacagaatgagggatttaattagaaaagttattttcttttgttctgtatcaaactgcagaacagctatatacttggtattttgtacgtgaataacgttttagcttttgtgcccttttgagcttgaagggttatcctcaaaggggaaaactatgaaggggaagaagacaaacctaagataccataaagtaaaggttgacattacatattttcattcacaatgcccattaaaaaaaaaaaataggttgggcatggtggctcacgcctgtaatcccaacactttaggaggctgaggcagatggattgcttgagcccaggagttcaagaccagcctgggcaacatggcgaaaccctgtctctaccaaaaaaaaaaaacaaaataaattaaccgggtgtggtggcacatgcctgtagtcccagctacttgggaggctgaggtgggaggatgacctgggcccaggaggtggaggttgcagtgagccttgatagcaccactgcactccagcctgggtgacggagcaagaccctgtctcaaaacagacaaacaagcaaaaaatagattaaagtctggatttcactgattttcttgcttaataagttttttaaaaccacgatgctgcaattttttccctctcaagcttcttgaaaatgtgtgatttacccttttttatctattactctaggcaaagctaaatatgatttttttttttttttttgagacggagtctggctctgttgcccaggctggaatgcagtggtgcgatctcagctcactgcaacctccacctctcaggttcaagtagttctcctgcctcagcctcccaagtagctgggattacaggtgtgtgccaccctgcccagctaatttttgtatttttagtagagacagggtttcaccacattggccaggctggtctcaaactcctgacctcagatgatctacccgccttggcctcccgaagtgcttgaattacaggcgtgagcccccgcgccggtccgaagcaaagctaaatgtaattttatgtactgttttaacagtataaacctatgggataaaggcccccaatcatcagaaggactactgaaaagaaaagaaagcaaacgtagatgtcaaattgtctaaacattcttaagtaccactgattttttttttctggactattatacaaagatgtctgtaaaaagtataccagtggcttttatgcatatacacgattaggctagattgtgaagtacatgggatttcatgagccagaggaggcatttggatccattgggccacatgtgactataagcacattgtgtacacaataaaattgtagccactcatgtattaaaactgttttggtaaaagctgtattaaaagaataattttttgcttgagctacttagtcacttttttgcagggcaccaaaatgtaggctacttttccatagcttgtttgctatgtttttatttcatcttaaatctgagccatttttggcaatatcttttaaaaaatcattattaaacatttattggaaatgttgtatagattcacaagaaagagacaccaaagtgtttgggaattttaatcccaagaagtaaacatcccagagtcagatcccatttgctgttgttcagccatgtttgtatgactgaatgtaatttaggaaatcaggagttagagatgaaaaatacaaacatgtcaaatggttgtaattgctttttttgaacttactggctttaacttaagtaatataggtgtgtagttgttttatctaaagatgtcagattatctgtggccctgttaattaactgcagggaccagagagaggacaaaaatgcctgtataatttgctttaaaggcttgtccttatgtttgtaatttcagttaaatattttctacagattgcttcacttcccctttcccccaataacaagttcatattcttgtaatgtttactttggtcaacgtggtaatttttggaagaaaatgccaaaatgtaagcttctcacaagcagcaaaggaatgtaactgcctgtagctaccacatcaagggagagaagaggcttgcgtactttgggttgatctcactgtacaaaaaaagtgtacccctattggaagaaataaggaatacttgaaggtttctcctttttttacacttgagtcatgtgcaaggttgaaccatatgaaattgccagtgttcaaccattgctgatctgcaaaagcgacaatatcatatgcctcaacctaacacttactcttaaatgcaggttaaaatctctgtgaggcaaagggataatattctctaggaactcacttttgagagtatttttctctaacccatgtggatctaaattttaaaaataggaatgaatctcttaattgcagcttgtggagagtataaaacattttgagcacaatatgcagcacataacttttcagattgtgtttgcatagaaaaggttaaaatcaattctttcagttactgtattgttcatttcttgtaaaggtcttcctacatttgagacgagaccctttaacataggctgccttagtaacaaaataaaacagatgtgtcataatattaactgtcctaaagaacatgtgtcttgcaaatgccatggaactgaatatttatttccttgtgagtattatgaccgttaccaaaggactcaaccagatttagggctcttcttaattgatcatgttcagaaagggactcatttggtcccactttgtaacatgggaagagtagaagagaaaattaaatgtggaaatcataaatgcttttctaacagggttatgctattctgtaacactaaatgtctgtcttttctcttaaaagattaagttttattaattttgtcatacatttctctatttgaatatatcttaaccattttatgttccaaattcgttttttgtccaagacattctatcagaattttacttgcctctataatctgaaaaatgggttctagaatgtcccacttgctgtctcttagaggctgagcttcatttctatgagcaaagagctcatttagcaatgtagttatttcagtatttatttctattatggaatccctggggttcagaatgtaactttgtacatgagatatatataaatatgtatatgaacatgta

SEQ ID NO: 594 - DNA, 1298 bp, Homo sapiens
agctggagccgcggcgcgctgagcgagcaggcggggcgggagcgcccacagctcggagccaccaggcgctgacgaggagcccggctgagggaggatgcgccgctgacgcctgcgggagccgcgcgcctggggcgggaggatgctccagaggggcctctggccgtggcgcacgcggctgctgccgacccctggcacctggcgcccagcgcgcccgtggccgctgccgcctccgccccaggttttgcgtgtgaagctgtgtggaaatgtgaaatactaccagtcacaccattatagtaccgtggtgccacctgatgaaataacagttatttatagacatggccttcccttggtaacacttaccttgccatctagaaaagaacgttgtcaattcgtagtcaaaccaatgttgtcaacagttggttcattccttcaggacctacaaaatgaagataagggtatcaaaactgcagccatcttcacagcagatggcaacatgatttcagcttctaccttgatggatattttgctaatgaatgattttaaacttgtcattaataaaatagcatatgatgtgcagtgtccaaagagagaaaaaccaagtaatgagcacactgctgagatggaacacatgaaatctttggttcacagactatttacaatcttgcatttagaagagtctcagaaaaagagagagcaccatttactggagaaaattgaccacctgaaggaacagctgcagccccttgaacaggtgaaagctggaatagaagctcattcggaagccaaaaccagtggactcctgtgggctggattggcactgctgtccattcagggtggggcactggcctggctcacgtggtgggtgtactcctgggatatcatggagccagttacatacttcatcacatttgcaaattctatggtcttttttgcatactttatagtcactcgacaggattatacttactcagctgttaagagtaggcaatttcttcagttcttccacaagaaatcaaagcaacagcactttgatgtgcagcaatacaacaagttaaaagaagaccttgctaaggctaaagaatccctgaaacaggcgcgtcattctctctgtttgcaaatgcaagtagaagaactcaatgaaaagaattaatcttacagttttaaatgtcgtcagattttccattatgtattgattttgcaacttaggatgtttttgagtcccatggttcattttgattgtttaatctttgttattaaattcttgtaaaacagaaaaaaaaaaaaaaaaaaaaaaaaaa

SEQ ID NO: 595 - DNA, 1028 bp, Homo sapiens
gggggcgcgtggctgcagcggggcccgcgtggtgcctcctgaggcggcccccggatgaagagatctgggaacccgggagccgaggtaacgaacagctcggtggcagggcctgactgctgcggaggcctcggcaatattgattttagacaggcagacttctgcgttatgacccggctgctgggctacgtggaccccctggatcccagctttgtggctgccgtcatcaccatcaccttcaatccgctctactggaatgtggttgcacgatgggaacacaagacccgcaagctgagcagggccttcggatccccctacctggcctgctactctctaagcgtcaccatcctgctcctgaacttcctgcgctcgcactgcttcacgcaggccatgctgagccagcccaggatggagagcctggacacccccgcggcctacagcctgggcctcgcgctcctgggactgggcgtcgtgctcgtgctctccagcttctttgcactggggttcgctggaactttcctaggtgattacttcgggatcctcaaggaggcgagagtgaccgtgttccccttcaacatcctggacaaccccatgtactggggaagcacagccaactacctgggctgggccatcatgcacgccagccccacgggcctgctcctgacggtgctggtggccctcacctacatagtggctctcctatacgaagagcccttcaccgctgagatctaccggcagaaagcctccgggtcccacaagaggagctgattgagctgcaacagctttgctgaaggcctggccagcctcctggcctgccccaagtggcaggccctgcgcagggcgagaatggtgcctgctgctcagggctcgcccccggcgtgggctgccccagtgccttggaacctgctgccttggggaccctggacgtgccgacatatggccattgagctccaacccacacattcccattcaccaataaaggcaccctgaccccaaaaaaaaaaaaaaaaaaaaaaaaaaaaaaaaaaaaa

SEQ ID NO: 596 - DNA, 1617 bp, Homo sapiens
gggcgtccgtcgtggtcttctgatgacgcagttagtcggctgcaatggcgccggtgaggcggtccgcgaagtggcggcctggtggtattgaggcgcgtggtgaaggggtttccactgtcgggtacaggaataagaatgtgagacagaagacatggcggcctaaccacccgcaagccttcgtggggagcgttcgcgagggacaaggctttgcttttcgaagaaaactgaaaatacagcaaagttacaagaaattgctacggaaggaaaagaaggctcaaacgtcactggaatctcaattcacagatcgatacccagataatctgaaacatctctatttagctgaagaggaaagacataggaagcaagcaagaaaagtcgaccatcctttgtcagaacaagttcaccagccgttgcttgaagaacagtgtagcattgacgagcctttatttgaagatcagtgtagctttgaccagcctcagccagaagaacaatgtattaaaacagtaaactcctttacaattccaaagaaaaataaaaagaaaacatcaaatcaaaaagcacaagaagaatatgaacagatacaagccaaacgtgctgctaagaaacaagaattcgagaggagaaaacaggagagagaagaagcccaaaggcagtacaaaaagaagaaaatggaagtgtttaaaatactgaacaaaaagactaaaaagggccaaccaaacttgaatgtacaaatggagtaccttcttcaaaaaatacaagaaaaatgttaaacattttgttcctacaggttaaaatatctgctgcctattaggttcttctgtgacatgtgcctcccagcagtgaactaaatttgtcgacataaactggattgctaaactatgctaaatataagatgttcacatatttttattatggtaaaaaattttctaaatatgttctacatgtttcttatttatttgcctctgaaggaaggttggcctgaagaactgaaagaacctcttattttgcaagacaggcccaagcatgtaatacttttgtaccatatgagatttatatgaaataaattttttaaaaataaggaatcagagctatcaatgaagcatttcaatgaaatatttcaatttagtaaacagttacgttgttttaaaatttattttaatgatgagggaggcaaagactcctcttggactttttatttattttaagtacatgttacagggtgatgggtgctgaaataaactgccctcaccatataacaaagcgaccttcacaaagcagtgaactcaaagtctgatatttataaacattcccttaaatggatgtacatggcttgttagtctaaggtcttttaaataatgatggaaaccccacagtgtcacagcaagaattaagctttccagttcctatggaccctatactttaagaacattatctctgtctcccttgttggtacccttgtgagctgagataagccactgggataactgcttctcatgctttgcaaattgcagaagaatgagaaaggcttgaaatatatatatagtcattgtaagcaaaaagggctgaccaataatacttgccaaatattgaataataaaattttataaatgatagcaa

SEQ ID NO: 597 - DNA, 4164 bp, Homo sapiens
cgaccaatcgcggggaggggagggcgttagccagcgtggcgctggctcccggaatatggagccctgggcgcgggggcggcgtgtcaggtggttgcggagctggtaagaatcatattctaagaactcagccactcaggtatccaccatggtgctgggtcctgaacagaagatgtcagatgacagtgtttctggagatcatggggagtctgccagtcttggtaacatcaaccctgcctatagtaatccctctctttcacagtcccctggggactcagaggagtacttcgccacttactttaatgagaagatctccattcctgaggaggagtactcttgttttagctttcgtaaactctgggctttcaccggaccaggttttcttatgagcattgcctacctggatccaggaaatattgaatccgatttgcagtctggagcagtggctggatttaagttgctctggatccttctgttggccacccttgtggggctgctgctccagcggcttgcagctagactgggagtggttactgggctgcatcttgctgaagtatgtcaccgtcagtatcccaaggtcccacgagtcatcctgtggctgatggtggagttggctatcatcggctcagacatgcaagaagtcattggctcagccattgctatcaatcttctgtctgtaggaagaattcctctgtggggtggcgttctcatcaccattgcagatacttttgtatttctcttcttggacaaatatggcttgcggaagctagaagcattttttggctttctcatcactattatggccctcacatttggatatgagtatgttacagtgaaacccagccagagccaggtactcaagggcatgttcgtaccatcctgttcaggctgtcgcactccacagattgaacaggctgtgggcatcgtgggagctgtcatcatgccacacaacatgtacctgcattctgccttagtcaagtctagacaggtaaaccggaacaataagcaggaagttcgagaagccaataagtactttttcattgaatcctgcattgcactctttgtttccttcatcatcaatgtctttgttgtctcagtctttgctgaagcattttttgggaaaaccaacgagcaggtggttgaagtctgtacaaataccagcagtcctcatgctggcctctttcctaaagataactcgacactggctgtggacatctacaaagggggtgttgtgctgggatgttactttgggcctgctgcactctacatttgggcagtggggatcctggctgcaggacagagctccaccatgacaggaacctattctggccagtttgtcatggagggattcctgaacctaaagtggtcacgctttgcccgagtggttctgactcgctctattgccatcatccccactctgcttgttgctgtcttccaagatgtagagcatctaacagggatgaatgactttctgaatgttctacagagcttacagcttccctttgctctcatacccatcctcacatttacgagcttgcggccagtaatgagtgactttgccaatggactaggctggcggattgcaggaggaatcttggtccttatcatctgttccatcaatatgtactttgtagtggtttatgtccgggacctagggcatgtggcattatatgtggtggctgctgtggtcagcgtggcttatctgggctttgtgttctacttgggttggcaatgtttgattgcactgggcatgtccttcctggactgtgggcatacggtaagcatctctaaaggcctgctgacagaagaagccacccgtggctacgttaaataacactggattagtctgtcttctgcaggtagccatcagagccagtgtgtttctatggtttactgtgtgaacatagccaaaagtatgtgccgttgcacagactgtgtttatgactcaaccgttggttggaaaagactttgtttcatgtgtatttgaaagatggaattattttttccttcctgacctaaccttagaactggattagggtgggatctttgaaaagctgacatttgctgctatcattccaacactaaattcttaagtagttgcccaagggccagctcagtttatccttcggagagacaaggatatgcatgattcttaaccaggctatatgttaaaaaaaaattggaaaatgcaatacattttttattatacaaactacagaatgagtatgcaagttttatttatcaaaatgtaatggatttttaaaggctgagaaattttccttatacctaccttttcagttattttaattataccaaattatcaactagaatagcttcatccatatgaaatataaaatgaagagacacctagctctatcaggcttaggattctttgaacttatttccactttaatttctcagtggaagttaagaggggtgagaaaacaaagaaggggaaaaactgacaactaacaaaaccagcaccacatcgctaggtggtgcttactaattaccttctcaggattttcctcagattgaaaagcttatgaggatttcttgggagtcttaataacctgcctgttagtacagagctttcctgatgatatttactcttgagcacatgtggttgtaaaaccttaactttctttctccaggagggtggtgatagaaacagatggtagtatttatgaactgatgttctcgtgaaatgttgagggtggggagaaaagactttaagggaggagagccatctattttgttcctaaagccacctctcagcagaatcgtcatgtttttctgatgcaccgctctgcttcatgcccaagatgacttgcgaggcaatctcaggagctgtggacttaaccgttgcaaagcacactgtctttctcagcgttctctgcaagtcagtaggtgttagtatggttgcaaagttcactgtctcagcaaagttgaactgggctacctctctacagctgtttcctcagagggaaaaatcttgagaccagatggtggagctctggagtcagaggaaatgggtgtcttcagcacaaagctgctgcttttacttcagccacttctgacatttttacataccgagcctgagattgtgtgattatctcaaatcaaatcactttgatggagataaataatcaaaactgttttatagtcattgatttggtgagaacagtaatggaaaatggtgttgaaggacttctcatttttggagctttccttccagagtcctggctgattggtgttcgctgttcatctgagcccccaaaagcattattactgatacttgcacacagtcaaaagcgcagactggatggatggtcttttataaggcatttaagggtacactactgtgtttcactgaccatacatttttcttagcccctcaagtaatatagcacagagttatgaatgacaattcccctaaccattcctcttcatatctgcctcttccccttaccatcgtaattctccaaactggtcataaaggcactctgtgaagatattggggactgacatcttaagctctcacctggctgcagtaggaaaggccaaactgacgacaaaaaaaaaattctttataaagatgatatggtaacatgtatctttgccctgggtctgggtgggtccagtcagtctcagatttacaagcatttaggagcctaggtaaaagctgctagtattcttttaaaagttatatttatgacttgcaatgatagaaaactccttccaattaaatggcattttataatattatgtgtgtacttcacagtgttaaaaataccctcatacgttattgcatttgatcttcacagaaagtgcattttaaccagtactctgggtgcaataaataatatgtagaaatttaagtcctccaattccagcatatccagtgagttttgacagtgtgtttatgtggaatgtttaaggatatacaattgtactttatataaattggttcttgttcttcttaaatgtgacatgaaataattgtgctgctacattatactggaaattaacaggggaaaagggaagagctcttggctcccttgaggttctgctagtggtgttaggagtggttacaactgagcttttagtaaccatttaaccgtatgtaaacttggtttctaattaaaaaaaaatttctttttccaa

SEQ ID NO: 598 - DNA, 3024 bp, Homo sapiens
agaaaaggcgccgggcgggcccgacacacgccggaggagccgggtggtgcagagccggagccggagccggagccgcgccgcgccgcaccatggcgcccaccctggccactgcccatcggcgccgctggtggatggcctgcacggccgtgctggagaacctcctcttctcggcagtcctcctgggctggggctcgctgctcatcatgctcaagtcagagggcttttactcctacctgtgtaccgagccagagaatgtcaccaatggcacagtgggcggcacagcagagccggggcacgaggaggtgagctggatgaacggctggctcagctgccaggcccaggacgagatgctaaatttggccttcactgtgggctcctttctgctcagtgccatcaccctgcccctgggtatcgtcatggacaagtatggcccgaggaagctcaggctgctgggcagcgcctgcttcgcggtttcctgcttgctgattgcgtacggagcaagtaaaccaaacgctctctccgtgctcatcttcatcgccctggctctgaatggctttggtgggatgtgtatgaccttcacctcattaacactgcccaacatgttcggcgaccttcggtccacgtttattgccttgatgattgggtcctacgcctcctcggcagtcacctttccaggaatcaagctcatctatgatgctggtgtctccttcatcgtcgtcctcgtggtctgggccggctgctccgggctggttttcctcaactgcttctttaactggccccttgagcccttcccggggccggaggacatggactactcggtgaagatcaagttcagctggctgggctttgaccacaagatcacagggaagcagttctacaagcaggtgaccacggtgggccggcgcctgagtgtgggcagctccatgaggagtgccaaggagcaggtggcgctgcaggagggccacaagctgtgcctgtccaccgtcgacctggaggtgaagtgccagccggatgccgcagtggccccctccttcatgcacagcgtgttcagccccatcctgctgctcagcctggtcaccatgtgcgtcacgcagctgcggctcatcttctacatgggggctatgaacaacatcctcaagttcctggtcagcggcgaccagaagacagttggcctctacacctccatcttcggcgtgctccagctgctgtgcctgctgacggcccccgtcattggctacatcatggactggaggctgaaggagtgtgaagacgcctccgaggagcccgaggagaaagacgccaaccaaggcgagaagaaaaagaagaagcgggaccggcagatccagaagatcactaatgccatgcgggccttcgccttcaccaacctgctgctcgtgggctttggggtgacctgcctcattcccaacctgcctctccagatcctctccttcatcctgcacacaatcgtgcgaggattcatccactccgctgtcgggggcctgtacgctgccgtgtacccctccacccagttcggcagcctcacgggactgcagtctctgatcagcgcgctcttcgcccttctgcagcagccgctgtttctggccatgatgggtcctctccagggagaccctctgtgggtgaacgtggggctgctccttctcagcctgctgggcttctgcctcccgctctacctgatctgctaccggcgccagctggagcggcagctgcagcagaggcaggaggatgacaaactcttcctcaaaatcaacggctcgtccaaccaggaggccttcgtgtagtggctgccgcctcggaactgcggtctcctgcctgtgcttcagtgactgacccctgtcctgcccctccagagtaccccacgcacccccaggaccttcgccgtctccgtgccagcgttcacgctccctcccggggccctgcctcggagctctgtggtggaaggacgggagagggccccggacacgcgcgttttctcctgccgaacgcaggggctgccctgactttgctctgccgccccccggggacccggggcctggggtctctgtggtgcctgcagcaggagccaggaacgcccggcaggcaggcgctctcccgccagtgtctggattctgcctcttgccaaagcagagggggctgccatcccctgcctgccacctgcccctcggctgcatgcccacagccgtacctgcctgaggacaaaggcttgcactgtctcgcccgcgcctggcccccaccccctccccggccagcctgaggctgcctgaggaaggaaggacccgcttcctgttgtcggtgctaattcctttgtaattccagccccctgtcgcctgtccagggcctgcccacccgttggaggccggtggagaagccccacctggcttatgccctggagagggtttagcgggctgggtggacccctcgcctcctccccgagggccaatgccgcggacacgttttcactgtcaccctcgttctgtctgccacctgaagggaatttgaggaccgccgccagggcaccccgtacatacacacagctgcttttgtggaggtggacgaaaggctgtggccggcagacgtggaggtccaggccggggtggggacgtgggtgggtccgaggggtgtgtggggtcggggtgggctctaggagttagcccttatccccactgaccaggcgggagccgccaggcctgcagctgggccagtgcccaggagccatcctggcgtggggccaggagcttgtccaaggccacaggcccacagcaccccctgccggcgggctccgtggggccctggagctgatgacgggggaggcccgtccgcctggcccaccaacccgcccaccttgactgcccccagaagtgtgtcttgagacctcctgggcgtgcttagaggggtgagttgtgtttggatttttagttattttctcttcagttttattagacttcttttttataaagcaataaatccattttcctccgggtaaaaaaaaaaaaaaaaaaaaaaaaa

(The sequence listing continues in the following parts.)
